United States Patent Application Publication US 2014/0259212 A1 - sequence listing, part 14

SEQ ID NO: 44146 - protein, 725 aa, marine gamma proteobacterium HTCC2143
MDVSYILNDLNDAQRQAVAASATNLLVLAGAGSGKTRVLVHRIAWLIQAEGLSPFSILSVTFTNKAAKEMRARIDELLGSSASGLGAPRGMWVGTFHGIAHRLLKAHWKQAGLPQNFQILDSDDQLRLVKRIHREFDLDESRWPPRQSQWFINGQKDEGKRAAHIEDYGKDLNHSTMLRVYLAYEQACDRQGVVDFAELLLRAHELWLKQPAILQHYQERFKHILVDEFQDTNTIQYAWLRVLAGKNIPVVAVGDDDQSIYGWRGAKIENIQQYSKDFPNTQIVRLEQNYRSTSTILNAANAVIDNNTDRLGKELWTDGGEGELISVYAGFNEQDEARFIVERIEEWVKDGHDRSSSAILYRSNAQSRVLEEAMIRGGIPYRIYGGQRFYDRLEIKNALAYMRLTNNRDDDTATERVINTPTRGIGSKTIEVIRAYAREHNQSLWRAAVNIIDNKLLPNRASSALQGFIEMIDVMDKNTDDVTLEELADHVVNASGLIEFHKKEKGEKGQARIENLQELVVAARQFESSDEAISPLQEFLDSAALDAGEQQADEFEDSVQLMTLHSAKGLEFPLVFLVGMEENLFPHKMSMEESGRLEEERRLCYVGITRAMEKLYITYAESRRMYGNENYNSPSRFIREIPQELMQEVRLNTAISRPVSFAPSHNNYAIPDTGISLGQQVYHSIFGAGTVLDFEGHGPSARVQVNFDDEGSKWLVVQYANLEAI

SEQ ID NO: 44147 - DNA, 2166 bp, marine gamma proteobacterium HTCC2080
  CDS (1)..(2166): transl_table=11
atggacgtatctgatattctcactgacctcaacgcggcgcaacgggatgccgtagcggcagagtcgggcaatttactggtattagctggggctggctcgggaaagacgcgcgtattggtacaccgaatggcgtggcttattcgtgctgaaggtgtatctccccatgcgttgttgtcggtcacctttaccaataaagccgcgcgtgaaatgcgtagccgtattgaatctatgttggacgtttcgacacagggaatgtgggtcgggaccttccatggtttggctcaccggctgcttaaacaacattggcaggaggctcagcttccacaaaattttcagatactggatagcgatgatcagttacgccttgtgaagcgggtgtgtcgcgacttgaacttagacgaggcgcagtggccaccaaggcaggctcagtggtacatcaatgggcaaaaagatgaaggcttgcgtgccagccatatcgatccaccctttggtgatttatatgctaaaaccatgctgcgtgtttacagcgcttatgaagaggcttgtcagcgtggcggattagttgatttcgctgagttgctattgcgggcccatgagctttggctgaagtcccctgagactttgctgcactatcagcgtcgatttcgcacgatcttagtggatgaatttcaggacacaaacaccattcagtatgcttggcttcgggttttagcgggtcaaagcataccggttgtggcggttggagacgatgaccagtcaatttatgggtggcgaggcgccaagatcgaaaacattcatcgtttcggcgaggacttcacccccgcacagacgatccgacttgagcagaattaccgttcgacccaaacgattcttaaagcagctaacggtctcatcagtcataactttgggcgcttaggtaaagagctttggacggcaggggactccggagagccgatcagcttatatgccggattcaatgagcaggacgaagctagatttattgtcgagcgcattgagagctgggtcgctgatggcaacacgcggcgctccagcgctattttatatcgctctaatgcacagtctcgagtacttgaagaggctttaatccgcgcacagattccctaccgcatctatgggggtcaacgcttttatgaacgcttggaaattcgaaatgccctagcgtacatgcgtctactaatcaggcgtagcgacgatacggcactagagcgggttcttaacctgccaccccgaggcattggcaacaagacggtggagcagctgcgagacctagcacgaactcgccaagtacccatgtggcaggccattgtgattgcccgagacgagcagttattttcatcccgggcactcaaggcactgtctggcttcactgtgctggtcgacgagctagattctgcgactttggagctacccttggaagagcttaccgagcatgttgttgcccgctccggtttggtggaatatcaccgtgctgagaaaggtgagcgtggtcaggcccgggtagagaacctggaggagttggtatctgcggctaaaactttcgttccagatgacacggatttaccctctttgcagcaatttttagatagtgctgcactcgatgcgggtgatgctcaggccgatcctcatgaagatagtgttcagcttatgaccttgcactctgcaaaggggcttgaattccccatggtctttctcgcgggtatggaggagaacttgtttcctcatcgtatgtcgttggatgagcctggtcgtctggaagaagagcgaagactttgttatgtcggtattactcgagcaatgcaaaagctggtgctaacttacgcggaaagtcgaagactacatgggtcagaatcctacaataccgcctcacggtttgttcgtgaactcccttctgagctcttgaatgaggttcgattgggtgcatctgtatcacgcccgctatcctctctcacctctttgtccccaaccccgagcgcggctcatatcgatagtggtgtgagcttggggcagcgtgtcatgcatcaggtattcggtgagggtgttgtgacaaactttgagggcggtggatccaatgcgcgagtagaggtaagttttgccgaggggtcaaaatggttggttttacaatatgccaatctgcagccgctttaa

SEQ ID NO: 44148 - protein, 721 aa, marine gamma proteobacterium HTCC2080
MDVSDILTDLNAAQRDAVAAESGNLLVLAGAGSGKTRVLVHRMAWLIRAEGVSPHALLSVTFTNKAAREMRSRIESMLDVSTQGMWVGTFHGLAHRLLKQHWQEAQLPQNFQILDSDDQLRLVKRVCRDLNLDEAQWPPRQAQWYINGQKDEGLRASHIDPPFGDLYAKTMLRVYSAYEEACQRGGLVDFAELLLRAHELWLKSPETLLHYQRRFRTILVDEFQDTNTIQYAWLRVLAGQSIPVVAVGDDDQSIYGWRGAKIENIHRFGEDFTPAQTIRLEQNYRSTQTILKAANGLISHNFGRLGKELWTAGDSGEPISLYAGFNEQDEARFIVERIESWVADGNTRRSSAILYRSNAQSRVLEEALIRAQIPYRIYGGQRFYERLEIRNALAYMRLLIRRSDDTALERVLNLPPRGIGNKTVEQLRDLARTRQVPMWQAIVIARDEQLFSSRALKALSGFTVLVDELDSATLELPLEELTEHVVARSGLVEYHRAEKGERGQARVENLEELVSAAKTFVPDDTDLPSLQQFLDSAALDAGDAQADPHEDSVQLMTLHSAKGLEFPMVFLAGMEENLFPHRMSLDEPGRLEEERRLCYVGITRAMQKLVLTYAESRRLHGSESYNTASRFVRELPSELLNEVRLGASVSRPLSSLTSLSPTPSAAHIDSGVSLGQRVMHQVFGEGVVTNFEGGGSNARVEVSFAEGSKWLVLQYANLQPL

SEQ ID NO: 44149 - DNA, 1866 bp, Candidatus Desulfococcus oleovorans Hxd3
  CDS (1)..(1866): transl_table=11
atgagcgatttaaatccggaacagcaaaaggcgtctgagtttaccgacggggtctgcgtggtcatagcagtgcccggcagtggtaaaacccggaccatgatggaaagaatcggcatcctggtcaataagcatggcatccccccggaaaacatcctgggcctcacctttacccggaacgcggcggatgagatgagacacagactggtcccggtgttaggagagatgtcatccagggtctttttaaccaccatacattcgttctgttacacgttattgcggtcggaagggattgtctttgagattctttccggcagggaacagatgattttcataaaggaggtcataaaaaagctcaaaatcagagaggtgtccgccggcatggtgcttggagaaatctccctggcgaaaaacaacctgatcggttgcgaggagttccgggtcatgcatgcgggtgaccggaccatggtcaggatcgctgatatctacgaagcctatgaccgtgaaaaatcggcacgtatgctcatggactttgatgatctgctggtgagaacccatgacatgctcaataaccgtatcgacatacgagaaaaatatcaggaggtgttttgtcatctgctggtggatgagttccaggacaccaatcccgcccagatggaaatcttaaaactgttgataccggaaaaccggcagggctctttctggtgcacgggagacgaccatcaggcgatattttcctttaccggggcttcggtgggtaacatcattcatttcaaatccatctttccggattcacagcagatgatactgcatgtcaactaccggtcaactccccagatccttgcagcctgccagaacctgatccggcataacgaaaaacagatccataaaaccttaaaaacggacaatccggacggtgaggaggtcatcgttcttgagtcctcttctgaagagaccgaagccatcaacctggtccatgagatacagaccttaaaagaatctacggattatgattaccaggatatggccgtgctctaccggtgcaattttcaaagccggatcatcgaagaggtgttctctcagcacaaaatcccttatcacattgaaaacggcctctgcttttatgaccggcgggaggtaaagattctgctggactatctgcgggttatatcctcccctgagacagacgaaggagatgaggcccttgccgggattttaaatgtccccaaccggtatatcggcagaaagttcatcggcgagctcaggtcctttgccgcagaaaaacagtttcatctctaccgggccttaaaagaactgcctgtcacccttccttatatccggaaaaacattcaggcgttaaccggatttttagatccgctgatcagtgaggccggccatatcaggcctgctgaggcaataagcctggtcaggacctctctggatattgaccgatatgtcagtgaagaggacatgcccagcccggatgacgtgaagattcagaatatggaccagctgctgctgtccgcggcccggtatgatgatatcagggcctttctggactatgcggcgggctttcagaacgaatcggtcagtgacaacagggagggggtcagcctgatgaccattcataaggcaaaggggctggagtttcccgtggtgttcctggtcggtatggtggaggggattctgcccacccggcgcaatgaaaacatcgaggaggaacggcgtatctgctttgtcgccatttcccgtgccatgcatcttttgtatttgagccattacatgacctgcctgggtcaggcggcccgcacatcccgattcctttgcgagatactgggccaggagaccgacaaaaaggtttctgcctga

SEQ ID NO: 44150 - protein, 621 aa, Candidatus Desulfococcus oleovorans Hxd3
MSDLNPEQQKASEFTDGVCVVIAVPGSGKTRTMMERIGILVNKHGIPPENILGLTFTRNAADEMRHRLVPVLGEMSSRVFLTTIHSFCYTLLRSEGIVFEILSGREQMIFIKEVIKKLKIREVSAGMVLGEISLAKNNLIGCEEFRVMHAGDRTMVRIADIYEAYDREKSARMLMDFDDLLVRTHDMLNNRIDIREKYQEVFCHLLVDEFQDTNPAQMEILKLLIPENRQGSFWCTGDDHQAIFSFTGASVGNIIHFKSIFPDSQQMILHVNYRSTPQILAACQNLIRHNEKQIHKTLKTDNPDGEEVIVLESSSEETEAINLVHEIQTLKESTDYDYQDMAVLYRCNFQSRIIEEVFSQHKIPYHIENGLCFYDRREVKILLDYLRVISSPETDEGDEALAGILNVPNRYIGRKFIGELRSFAAEKQFHLYRALKELPVTLPYIRKNIQALTGFLDPLISEAGHIRPAEAISLVRTSLDIDRYVSEEDMPSPDDVKIQNMDQLLLSAARYDDIRAFLDYAAGFQNESVSDNREGVSLMTIHKAKGLEFPVVFLVGMVEGILPTRRNENIEEERRICFVAISRAMHLLYLSHYMTCLGQAARTSRFLCEILGQETDKKVSA

SEQ ID NO: 44151 - DNA, 2073 bp, Escherichia coli B
  CDS (1)..(2073): transl_table=11
atgcgattctgctacaatcctccccccgttcgaagattgagcaatacacctatgcgtctaaaccccggccaacaacaagctgtcgaattcgttaccggcccctgcctggtgctggcgggcgcgggttccggtaaaactcgtgttatcaccaataaaatcgcccatctgatccgcggttgcggttatcaggcgcggcacattgcggcggtgacctttactaataaagcagcgcgcgagatgaaagagcgtgtagggcagacgctggggcgcaaagaggcgcgtgggctgatgatctccactttccatacgttggggctggatatcatcaaacgcgagtatgcggcgcttgggatgaaagcgaacttctcgttgtttgacgataccgatcagcttgctttgcttaaagagttgaccgaggggctgattgaagatgacaaagttctcctgcaacaactgatttcgaccatctctaactggaagaatgatctcaaaacaccgtcccaggcggcagcaagtgcgattggcgagcgggaccgtatttttgcccattgttatgggctgtatgatgcacacctgaaagcctgtaacgttctcgacttcgatgatctgattttattgccgacgttgctgctgcaacgcaatgaagaagtccgcgagcgctggcagaacaaaattcgctatctgctggtggatgagtatcaggacaccaacaccagccagtatgagctggtgaaactgctggtgggcagccgcgcgcgctttaccgtggtgggtgacgatgaccagtcgatctactcctggcgcggtgcacgtccgcaaaacctggtgctgctgagtcaggattttccggcgctgaaggtgattaagcttgagcagaactatcgctcttccgggcgtattctgaaagcggcgaacatcctgatcgccaataacccgcacgtctttgaaaagcgtctgttctccgaactgggttatggcgcggagctaaaagtattaagcgcgaataacgaagaacatgaggctgagcgcgttactggcgagctgatcgcccatcacttcgtcaataaaacgcagtacaaagattacgccattctttatcgcggtaaccatcagtcgcgggtgtttgaaaaattcctgatgcaaaaccgcatcccgtacaaaatatctggtggtacgtcgtttttctctcgtcctgaaatcaaggacttgctggcttatctgcgcgtgctgactaacccggacgatgacagcgcatttctgcgtatcgttaacacgccgaagcgagagattggcccggctacgctgaaaaagctgggtgagtgggcgatgacgcgcaataaaagcatgtttaccgccagctttgatatgggcctgagtcagacgcttagcggacgtggttatgaagcattgacccgcttcactcactggttggcagaaatccagcgtctggcggagcgggagccgattgccgcggtgcgtgatctgatccatggcatggattatgaatcctggctgtacgaaacatcgcccagcccgaaagccgccgaaatgcgcatgaagaacgtcaaccaactgtttagctggatgacggagatgctggaaggcagtgaactggatgagccgatgacgctcacccaggtggtgacgcgctttactttgcgcgacatgatggagcgtggtgagagtgaagaagagctggatcaggtgcaactgatgactctccacgcgtcgaaagggctggagtttccttatgtctacatggtcggtatggaagaagggtttttgccgcaccagagcagcatcgatgaagataatatcgatgaggagcggcggctggcctatgtcggcattacccgcgcccagaaggaattgacctttacgctgtgtaaagaacgccgtcagtacggcgaactggtgcgcccggagccgagccgctttttgctggagctgccgcaggatgatctgatttgggaacaggagcgcaaagtggtcagcgccgaagaacggatgcagaaagggcaaagccatctggcgaatctgaaagcgatgatggcggcaaaacgagggaaataa

SEQ ID NO: 44152 - protein, 690 aa, Escherichia coli B
MRFCYNPPPVRRLSNTPMRLNPGQQQAVEFVTGPCLVLAGAGSGKTRVITNKIAHLIRGCGYQARHIAAVTFTNKAAREMKERVGQTLGRKEARGLMISTFHTLGLDIIKREYAALGMKANFSLFDDTDQLALLKELTEGLIEDDKVLLQQLISTISNWKNDLKTPSQAAASAIGERDRIFAHCYGLYDAHLKACNVLDFDDLILLPTLLLQRNEEVRERWQNKIRYLLVDEYQDTNTSQYELVKLLVGSRARFTVVGDDDQSIYSWRGARPQNLVLLSQDFPALKVIKLEQNYRSSGRILKAANILIANNPHVFEKRLFSELGYGAELKVLSANNEEHEAERVTGELIAHHFVNKTQYKDYAILYRGNHQSRVFEKFLMQNRIPYKISGGTSFFSRPEIKDLLAYLRVLTNPDDDSAFLRIVNTPKREIGPATLKKLGEWAMTRNKSMFTASFDMGLSQTLSGRGYEALTRFTHWLAEIQRLAEREPIAAVRDLIHGMDYESWLYETSPSPKAAEMRMKNVNQLFSWMTEMLEGSELDEPMTLTQVVTRFTLRDMMERGESEEELDQVQLMTLHASKGLEFPYVYMVGMEEGFLPHQSSIDEDNIDEERRLAYVGITRAQKELTFTLCKERRQYGELVRPEPSRFLLELPQDDLIWEQERKVVSAEERMQKGQSHLANLKAMMAAKRGK

SEQ ID NO: 44153 - DNA, 2187 bp, Pseudomonas putida GB-1
  CDS (1)..(2187): transl_table=11
atgcacacagatgacctctccctcctgcttaattccctcaacgatgcccaacgccaggccgtagcggccacgctcgggcgtcaattggtgcttgccggcgccggttccggtaaaacccgcgtgctggtgcaccgcatcgcctggcttatccaggtagagcaggcgtcgccgcattcgatcctgtcggtgaccttcaccaacaaggctgctgcagaaatgcgccagcggatcgagcaactgctggggatcaacccggcgggtatgtgggtaggcaccttccacggcctggcccatcgcctgctgcgggcccactggcaggaagcacggttggttcagaacttccagatcctcgacagcgacgaccagcaacgcctgatcaagcgggtaatgcgtgagctgggcctggacgagcagaagtggccggcacgccaggcccagtggttcatcaacgggcagaaggacgagggcctgcgcccgcagcatatccaggccggtggcgacctgttcctggcgaccatgcgcgaggtctataccgcctacgagcaggcctgcgagcgcgccggggtcatcgacttctccgagctgctgctgcgcgccctggacctgtggcgcgaccacccgggcctgttggagcactaccagcggcgcttccagcacgtgctggtggacgagttccaggataccaacgccgtgcagtacgcctggctgcgcctgttggcgcgcggtggcgccagcttgatggccgtaggcgatgacgaccagtcgatctacggctggcgcggcgccaagatcgaaaacattcaccagtacaccgccgacttccccgacgccgagatgatccgcctggagcagaactaccgctccaccggcggcatcctcaaggctgccaacgccctgatcgccaacaacagtgggcgcctgggcaaagagctgtggaccgacatgggcgaaggcgaaccgctgaccctgtacgcggcctacaacgaacatgacgaagcgcgctacgtggtagaaaccatcgaaagcctggtcaagcagggcaatgcgcgtaacgagatcgccattctgtaccgttccaacgcccagtcgcgggtgctggaagaggccctgctgcgcgagcgcatcccctaccgcatctatggcggccaacgcttcttcgaacgcgccgaaatcaagaacgccatggcatacctgcggctgatcgaagggcgtggcaacgatgccgccctggagcgggtgatcaacgtgccgccgcgcggtattggcgaaaaaaccgtcgaagccatccgtgaacacgcccgtcacagccagctgtcgatgtgggaagccatgtgccagctgctcgccgccaaggccctgaagggccgcgccgccagtgccctgggggctttcatcgagctgatcgaggggctggccgccaaagtcgtggacatgccgctgcataccatgacccagaccaccatcgagcagtccgggctgatcctctatcaccaggaggaaaaaggtgaaaagggccaggcacgggtagaaaaccttgaggaactggtcagcgctgcacgcaacttcgaatccgccgacgaagatgccgacctctcgccactgtcagccttcttggggcatgcctcgcttgaagcgggcgatacccaggctgatgagcatgaagacagcatccagctgatgaccctgcacagcgccaaaggcctggagttcccgtatgtgttcctggtgggcatggaagaaggcctgttcccgcacaagatgagcctggaagaacccggccgcctggaagaggaacggcgcctggcctacgtgggcatcacccgcgccatgcgccagctggtcatgacctatgccgaaacccgtcgcctgtatggcagcgagacctacaacaaggtgtcgcgtttcgtgcgcgaaattccgccaggcttggttcaggaagtgcgcctgtccaacagcgtcagccgcccgttcggtggggccaagaccgccaccaacagcaacctgtttgccaatgccagtattccgcagaccgcgttcaaccttggccagcgtgtacaacatgcagtgtttggcgaaggtgtgatcctcaacttcgagggctcgggtgcgcaggcgcgggtgcaggtgaactttgccgaaggcagcaagtggctgatgctggggtatgccaagctcgaggccatctga

SEQ ID NO: 44154 - protein, 728 aa, Pseudomonas putida GB-1
MHTDDLSLLLNSLNDAQRQAVAATLGRQLVLAGAGSGKTRVLVHRIAWLIQVEQASPHSILSVTFTNKAAAEMRQRIEQLLGINPAGMWVGTFHGLAHRLLRAHWQEARLVQNFQILDSDDQQRLIKRVMRELGLDEQKWPARQAQWFINGQKDEGLRPQHIQAGGDLFLATMREVYTAYEQACERAGVIDFSELLLRALDLWRDHPGLLEHYQRRFQHVLVDEFQDTNAVQYAWLRLLARGGASLMAVGDDDQSIYGWRGAKIENIHQYTADFPDAEMIRLEQNYRSTGGILKAANALIANNSGRLGKELWTDMGEGEPLTLYAAYNEHDEARYVVETIESLVKQGNARNEIAILYRSNAQSRVLEEALLRERIPYRIYGGQRFFERAEIKNAMAYLRLIEGRGNDAALERVINVPPRGIGEKTVEAIREHARHSQLSMWEAMCQLLAAKALKGRAASALGAFIELIEGLAAKVVDMPLHTMTQTTIEQSGLILYHQEEKGEKGQARVENLEELVSAARNFESADEDADLSPLSAFLGHASLEAGDTQADEHEDSIQLMTLHSAKGLEFPYVFLVGMEEGLFPHKMSLEEPGRLEEERRLAYVGITRAMRQLVMTYAETRRLYGSETYNKVSRFVREIPPGLVQEVRLSNSVSRPFGGAKTATNSNLFANASIPQTAFNLGQRVQHAVFGEGVILNFEGSGAQARVQVNFAEGSKWLMLGYAKLEAI

SEQ ID NO: 44155 - DNA, 2010 bp, Pseudomonas putida GB-1
  CDS (1)..(2010): transl_table=11
atgtcccgactcaatccccggcagcaggaagcccgtgactatgtcggcggccctcttttggtgctcgccggtgcaggctcgggcaagaccagcgtgatcacgcgcaagattgcccacctcatccagaactgcggcatccgtgcccagtacatcgtggcgatgacctttaccaacaaggccgcgcgcgagatgaaggagcgtgtcggcaccttgctgcgcccgggggaaggccgagggcttacggtgtgcacgttccacaacctgggcctgaacatcatccgcaaggagcacgagcgcctcggctacaagccgggcttctcgatcttcgacgagtccgacatcaaggcgttgctgtcggacatcatgcagaaggaatactccggcgacgacggcatcgacgagatcaagaacatgatcggtgcctggaagaacgaccttatcctgccgccagaggccctggaaaaagcgcgcaacccgcgcgagcagaccgccgccatcgtctacacccactaccagcgcacgctcaaggcgttcaacgcggtggacttcgacgacctgatcctgcaaccggtcaagttgttccaggagcaccctgaagtgctggagcgctggcagaaccgcgtgcgctacctgctggtggacgaataccaggacaccaacgccagccagtacctgctggtgaagatgctgatcggcatgcgcaaccagttcaccgtggtgggcgacgacgaccagtcgatctacgcctggcgaggtgcccgcccggaaaacctgatgctgctcaaggaggactacccctccctgaagatcgtcatgctcgaacagaactaccgctccaccagccgtatcctgcgctgcgccaacgtgctgattgccaacaacccgcacgcgttcgaaaagcagctgtggagcgaaatgggcgtaggcgacgagatccgcgtgatccgctgcaaaaacgaggaagccgaggccgaacgcgtggccatggaaatcctcaccttgcacctgcgcaccaaccgcccgtacagcgacttcgccatcctctaccggggcaactaccaggccaagctgatcgaactgaagctgcagcaccaccaggtgccgtatcgcctgtcgggcggcaacagcttcttcggccgccaggaggtcaaggacctgatggcctacctgcgcctgctggtgaacccggacgatgacaacgcctacttgcgggtgatcaacgtaccgcgccgggaaatcggctccaccaccctggaaaagctcggcaactactccaccgaacgcggcatttcgatgtacgccgccagcgaggagttgggcttgggcgagcacctggacgcccgctacaccgaacgtttgcagcgcttcaagcactggctggacggggtgcgtcacaaggtcgccctggaagacccgattgccgcactgcacgagatgatccgcgacatcgactacgagaactggatccgccagcagaccgccagcgacaaggctgcggacttccgtatcagcaacgtctggttcctggtcgaagcgctgaaaaacaccctcgagaaggatgaagagggtgacatgaccatcgaggacgccatcggcaagctggtgctgcgcgacatgctcgagcgccagcaggaagaggaagaaaacgccgaaggtgtgcagatgatgaccctgcacgcctccaagggcctggagttcccttacgtattcatcatgggcatggaagaggaaatcctcccgcaccgctccagcatcgaggccgacaccatcgaagaggaacgccgcctggcctacgtgggcattacccgcgcgcgccagactctggccttcaccttcgctgccaagcgcaagcagtacggtgaaatcatcgactgcacgccaagccggttcctcgacgaactgcctccggacgacctggcctgggagggcctggacgatgcaccggtcgaggtgaaggccgcacgcggcaacaacgccctggccgatatccgggcaatgctcaaacgctga

SEQ ID NO: 44156 - protein, 669 aa, Pseudomonas putida GB-1
MSRLNPRQQEARDYVGGPLLVLAGAGSGKTSVITRKIAHLIQNCGIRAQYIVAMTFTNKAAREMKERVGTLLRPGEGRGLTVCTFHNLGLNIIRKEHERLGYKPGFSIFDESDIKALLSDIMQKEYSGDDGIDEIKNMIGAWKNDLILPPEALEKARNPREQTAAIVYTHYQRTLKAFNAVDFDDLILQPVKLFQEHPEVLERWQNRVRYLLVDEYQDTNASQYLLVKMLIGMRNQFTVVGDDDQSIYAWRGARPENLMLLKEDYPSLKIVMLEQNYRSTSRILRCANVLIANNPHAFEKQLWSEMGVGDEIRVIRCKNEEAEAERVAMEILTLHLRTNRPYSDFAILYRGNYQAKLIELKLQHHQVPYRLSGGNSFFGRQEVKDLMAYLRLLVNPDDDNAYLRVINVPRREIGSTTLEKLGNYSTERGISMYAASEELGLGEHLDARYTERLQRFKHWLDGVRHKVALEDPIAALHEMIRDIDYENWIRQQTASDKAADFRISNVWFLVEALKNTLEKDEEGDMTIEDAIGKLVLRDMLERQQEEEENAEGVQMMTLHASKGLEFPYVFIMGMEEEILPHRSSIEADTIEEERRLAYVGITRARQTLAFTFAAKRKQYGEIIDCTPSRFLDELPPDDLAWEGLDDAPVEVKAARGNNALADIRAMLKR

SEQ ID NO: 44157 - DNA, 2166 bp, Marinobacter sp. ELB17
  CDS (1)..(2166): transl_table=11
atggacgtttcctacattatcgacggcctgaacgacgcccagcgcgaggcggtgacggcagaaagcgatcacttgctggttctggccggcgccggcagtggcaaaacccgggtgctggtacaccgcatggcgtggcagatgcaggtgaaccgggtaccggcaaccggccttctggcggtgacctttaccaacaaggccgccaaggaaatgcgccaccgcattgaggagatgatgaacataccctctcgcggcctgtggattggcaccttccacggtattgcccatcgcctgctgcgcgcccactggaaagacgcaaacctgccggaaaacttccaggtactggacagcgacgaccagctgcgcatggtgaagcgggtaatgcgcgaagcccaaatcgacgaaacccagttcccgcccaagcaggcccagtggtggatcagcagccagaaagacgaaggtctgcgcgctgacaatattcaggaaaatcccggtgaccacttcaccagcaccatggtgcgggtgtaccgccagtacgaaaaactgtgccagcaaagcggcctggtggattttggcgaattgctgctgcgctctcacgaactctggctgcaccgcccggaactgctggcccattaccagcagcgctttcagcacattctggtggacgagtttcaggacaccaacgccattcaatacgcctggctgcaagttctggccagcaaccgcgtgccattaaccgtggtgggcgacgacgaccagtctatttacggctggcgcggcgccaaagtcgaaaacatccagcagtaccagcgcgatttccccaacgcccgtctggtaaagctggagcagaattaccgctctaccaagctgatcctgaaagccgccaactcggtgattgacaacaatcagggccgcttgggtaaagaactgtggagcgacggggttgacggtgaaccggtcagcctttacgccgcgtttaacgagcaagacgaagccaactacattgccgacaccatcaccagctgggtgcaagacggcaatctgcgcgccgaatgcgcgattctttaccgctccaacgcccagtcccgcgtactggaagaatcgctgatgcgccaaggcatcccataccgggtttacggcggcctgcgcttctatgatcgccaggaaattcgcaacgcactggcttacctgcgcctggtgcattaccgccgcgacgacgctgcgtttgagcgggtggtaaatctgccaccgcggggcataggggccaaaagcctggccgatttgcgccaatacgccggcaagcaaagcatctcaatgtgggaatccgcccagcgcatgctggacgccggccagatgaaaggccgcgcaaaaaccggattgcagaaattcctgtcgatcatcgaagaactgtctgcgctggcggaacatggaacccttcatggcctaatgcagcagaccatcgacgacagcggtttgaaggagtaccacgccagcgaaaaaggtgaaaagggccaggggcgggtagaaaacctggaagagctggtaaatgcgttgacgacttacgaagtggaggagggcattgatccgctgtctgaattcatcgcccaggctgcgctggacgctggtgaagctcaggcggaagaccacgaagacagcgtgcagttaatgactctgcactctgcaaaagggttggagttcccgctggtgttcatggccggcgttgaagaaggtctgttcccccacagcatgtcgttggaggaaccgggacgtatggaggaagagcgccgtcttgcgtatgtgggcattacccgcgcgatgaagaagctgataatcacctacgccgaatcccgccgtttgtacggtcaggaaaagttcaatgcgctgtcgcggttcgtgcgggaaatccctggcgactgtattcaagaagtgcggctgcgcaatacggtgacccgcccggccatggtggcgcggcctaacgaaagtatgttcagccaggaatcggccaagcagtcgggtttcagcctggggcagcaggttatgcatccgaagttcggcgaaggcacggtgatgaacagcgaaggcagcggccatcacacccggattcaggttaactttgatgacggtgccaagtggctggtattggcgtatgcgccgctggaggcttgttaa

SEQ ID NO: 44158 - protein, 721 aa, Marinobacter sp. ELB17
MDVSYIIDGLNDAQREAVTAESDHLLVLAGAGSGKTRVLVHRMAWQMQVNRVPATGLLAVTFTNKAAKEMRHRIEEMMNIPSRGLWIGTFHGIAHRLLRAHWKDANLPENFQVLDSDDQLRMVKRVMREAQIDETQFPPKQAQWWISSQKDEGLRADNIQENPGDHFTSTMVRVYRQYEKLCQQSGLVDFGELLLRSHELWLHRPELLAHYQQRFQHILVDEFQDTNAIQYAWLQVLASNRVPLTVVGDDDQSIYGWRGAKVENIQQYQRDFPNARLVKLEQNYRSTKLILKAANSVIDNNQGRLGKELWSDGVDGEPVSLYAAFNEQDEANYIADTITSWVQDGNLRAECAILYRSNAQSRVLEESLMRQGIPYRVYGGLRFYDRQEIRNALAYLRLVHYRRDDAAFERVVNLPPRGIGAKSLADLRQYAGKQSISMWESAQRMLDAGQMKGRAKTGLQKFLSIIEELSALAEHGTLHGLMQQTIDDSGLKEYHASEKGEKGQGRVENLEELVNALTTYEVEEGIDPLSEFIAQAALDAGEAQAEDHEDSVQLMTLHSAKGLEFPLVFMAGVEEGLFPHSMSLEEPGRMEEERRLAYVGITRAMKKLIITYAESRRLYGQEKFNALSRFVREIPGDCIQEVRLRNTVTRPAMVARPNESMFSQESAKQSGFSLGQQVMHPKFGEGTVMNSEGSGHHTRIQVNFDDGAKWLVLAYAPLEAC

SEQ ID NO: 44159 - DNA, 4113 bp, Serratia marcescens
  CDS (1896)..(4058): transl_table=11
gccgcaggccaaacagatcggccagattggttcggtagcgctgtcgatgctgggcgacgatggcgagctgggcatggtgatcttcagcagtcgcgatacgcaacactatcagcagggcatgggcacggtaatgctcaatcaactggcgcgcatgctgccggaactgctggaacgctggatcgaacgcgcatgacgccgattgcgcccagcctgcagcagccggtggacgcttttctgcgttatctcaaggtagaacggcaactcagcccgctgacgcagctcagctattcgcgccagctgacggcgctgatgcgcctggcgcaggagatcggcgtcaccgactggacgacgctggacgccgcccgggtgcgcatgctggcggcgcgcagcaaacgtgccggtctgcagtccgccagcctggcgctgcggctctcttcattgcgcagtttcctcgactggctggtcagccagggcgtgctgcacgccaaccccgccaagggcatccgcacgccgcgcagcggccgccatctgccgaaaaacatcgacgtcgatgaaatgaaccagctgctggagatcgatctcaacgatccgctggcggtgcgcgatcgcgccatgctggaggtgatgtatggcgccggcctgcgcctctccgagctggtggggctggattgccgccatgtcgatatggcggccggcgaggtgtgggtgatggggaaaggcagcaaagaacgcaaactgccgattgggcgcaccgccgtcacctggctggaacactggctggcgatgcgcgatctgtttggaccgcaggacgacgccatgttcctgtccaatcaggggcgacgcatctcgacgcgcaacgtgcaaaaacgcttcgccgaatggggcgtgaagcagggcgtcaacagccatatccacccgcacaagctgcgccactccttcgccacccatatgctggagtccagtggcgatctgcgcgcggtgcaggagctgctcggccacgctaacctgaccaccacgcagatttatacccacctcgactttcaacatctggcgaacgtgtacgatgccgcgcatccgcgcgccaaacgggggaaatcctgatgcatttttatcgcccgctgcgcccgctggcggcgctgactttcgatctggacgacacgctgtatgacaatcgtccggtgattagacagaccgaacaacagtcggtggctttcctgcagagctaccatcccggtctgaacagcttccagtcggcggatttccaccgcctgcgccaggagctgcgtgagcaggatccggagatctaccacgatgtcacccagtggcgctggcgcgccattcatctggcgctgagccggcaggggctgcgcgacgctgaagcggcaatcggggccgatgcggcgatgcaaaacttcgcgctgtggcgcagccgcatcgaggtaccggaagcgacccacgccacgctgaaggcgctggccgcgcgctatccgctggtggcgatcaccaacggcaacgccgatccggcgcagtgcggcctggacggctacttccagttcgtgttgcgctccgggccggacgggcgcgccaaaccgtaccaggacatgtatcacctggccgtcgaacggctgggcgtggcgcccgggcagatcctgcacgtgggcgacgatctgactaccgacgtcgccggcgcgctgcgcgcggggctgcaggcctgttggatcaacgatcggcaacgctgcctgatgcaggccgccgacagccgcctgctgccgcatattgagatttcgcagttggcatcgctgacagcattgttataatccctgccagaactctgtataaatttccagtgaaaaacccgtcaccggcgggttttcccttaaccattagtggtgcctatggacgtctccgatctgctcgacagcctgaatgaaaaacaacgtgaagccgtggcggcgccgcgcagcaacctgttggttctggccggagcgggcagcggcaagacgcgggtgctggtgcatcgcatcgcctggctgctgtcggtggagaactgctcgccgtattcgatcatggcggtgaccttcaccaacaaggcggcggcggaaatgcgtcaccgaatcgaacatctgatcggcaccagccagggcggcatgtggatcggcaccttccacggcctggcgcatcgtctgttgcgcgcccaccacctggaagccaacctgccgcaggatttccagatcctcgacagcgacgaccagctgcggctgctcaagcgcatcatcaaggcgctgaacgtcgacgagaagcagtggccgccgcgtcaggcgatgtggtacatcaacggcaagaaagacgagggcctgcgcccacagcacgtcgagacctacaacaacccggtagaggccacctggctgcgcatctaccaggcctatcaggaagcctgcgatcgcgcggggctggtggatttcgccgagctgctgctgcgcgcgcacgagctgtggctgaacaagccgcatatcctcaaccactaccgcgaacgtttcaccaacgtgctggtggatgaattccaggataccaacagcatccagtacgcctggatccgcctgctggcgggcggcaacagcaacgtgatgatcgtcggcgacgatgaccagtcgatctacggctggcgcggcgcgcaggtggaaaacatccagcgcttcctgaaagatttccccggcgcggaaaccatccgcttggagcagaactaccgttccaccagcaacatcctgaaagcggccaacaccctgatcgccaacaacgacgggcgcatgggcaaaaacctgtggaccgaaggcggcgaaggtgaaccgatttccctctactgtgccttcaacgaactcgacgaagcgcgcttcgtggtcaaccgcatcaagacctggcaggacaacggcggggcgctgaacgactgcgccatcctgtaccgcagcaacgcccagtcgcgggtgctggaagaggcgctgctgcagacggcgatgccgtaccgcatctacggcggccagcgcttcttcgaacgccaggaaatcaaggatgcgctggcttacctgcgcctcatttccaaccgcaacgacgacgcagccttcgagcgcgtggtcaacaccccgacgcgcggcatcggcgatcgcaccctcgacgtggtgcgccaggcggcgcgcgatcgccagctgacgctgtggcaggcgacgcgcgagctgatgcaggacaaggtgttggccggccgcgccgcgtcggcgctgcagcgtttcatcgaactggtggaatcgctggcccatgaaaccgccgacatgccgctgcatgtgcagaccgaccgggtgatccgcgactccgggctgttcatcatgtatgaacaggagaagggcgagaaggggcaggcgcgtatcgaaaacctcgaggaactggtgacggcgacgcgccagttcagctatcaggacgaatatcaggatctgatgccgctgcaggcgttcctgtcgcatgcggcgctggaagcgggcgaaggccacgccgacgcctatcaggacgcggtgcagctgatgactctgcactcggccaaggggctggagttcccgctggtgtttatcgtcggcatggaagagggcatgttcccgagccagatgtcgctggatgaaggcggccgtctggaggaggagcgccgtctggcctatgtgggcgtaacgcgcgccatgcagaagctgacgctgacctatgccgaaacgcgccgtctgtacggcaaagaagtttaccatcggccgtcgcgctttatcggcgaactgccggaggagtgcgtggaagaagtgcgcctgcgcgccagcgtatcgcgcccggtcaatcaccgccgcatgggcacgccgatcagcgagaacgataccggctataagctgggccagcgcgtgcgccatcccaagtttggcgaaggcaccatcgtcaatctggagggcagcggcgagcacagccggctgcagatcgccttcccgggtgaaggcatcaaatggctggtggcggcctacgcgcgtttggaaacggtctaacgagagaggcgttgcaggggcaagcccctgcaatcgttcaccatcagtgaaggtt

SEQ ID NO: 44160 - protein, 720 aa, Serratia marcescens
MDVSDLLDSLNEKQREAVAAPRSNLLVLAGAGSGKTRVLVHRIAWLLSVENCSPYSIMAVTFTNKAAAEMRHRIEHLIGTSQGGMWIGTFHGLAHRLLRAHHLEANLPQDFQILDSDDQLRLLKRIIKALNVDEKQWPPRQAMWYINGKKDEGLRPQHVETYNNPVEATWLRIYQAYQEACDRAGLVDFAELLLRAHELWLNKPHILNHYRERFTNVLVDEFQDTNSIQYAWIRLLAGGNSNVMIVGDDDQSIYGWRGAQVENIQRFLKDFPGAETIRLEQNYRSTSNILKAANTLIANNDGRMGKNLWTEGGEGEPISLYCAFNELDEARFVVNRIKTWQDNGGALNDCAILYRSNAQSRVLEEALLQTAMPYRIYGGQRFFERQEIKDALAYLRLISNRNDDAAFERVVNTPTRGIGDRTLDVVRQAARDRQLTLWQATRELMQDKVLAGRAASALQRFIELVESLAHETADMPLHVQTDRVIRDSGLFIMYEQEKGEKGQARIENLEELVTATRQFSYQDEYQDLMPLQAFLSHAALEAGEGHADAYQDAVQLMTLHSAKGLEFPLVFIVGMEEGMFPSQMSLDEGGRLEEERRLAYVGVTRAMQKLTLTYAETRRLYGKEVYHRPSRFIGELPEECVEEVRLRASVSRPVNHRRMGTPISENDTGYKLGQRVRHPKFGEGTIVNLEGSGEHSRLQIAFPGEGIKWLVAAYARLETV

SEQ ID NO: 44161 - DNA, 2580 bp, Ostreococcus tauri
  CDS (1)..(2580)
atgcgcgcggagacggcgtcggcgtccatggcgcaccgcgcgcgactggcgcgcgcgctggacgggactcgacgacgcgcggcgttcgaacgcggcgacgcgcgcgcgagcgggtcggtggtgcggcgatggcgaacgggcgcgacggcgcgcgacgacgcgtggggagggcgaggggtctccgcggaggcgttggaaccggtgcacgtgcgtgggttgaacgacgcgcagcgcgcggcggtgctggcgccggtgggcgcgacgcgcgtgctcgcgggaccggggtcgggaaagacgcacgtgttgattggacgcgtcgcgcacctgattcacgaggagaagacgccgccgagggagattttgtgcattacgtttacgaataaagcggcgaaggagctgcgggagcggttgagggacaagattggagaggtggcggcgaaggagatcacggcggggacgtttcactccgtcgcggcgagaatgctgcgacggcacggggagcgaattccgggcatcggacgcacgggagagtttacgatttacgacgcggacgacagcaagcaaatcgtgcagagcgtgctagtgaacaagtttggcgagtcgaagaaaaccgctcagccgggaccgatgcggaactggattagtacggcaaagtcgtgcgtgaagcactccgtcggtctgcgaggttcacaaatgctcagagcgctggaagacgccaaaaagccgataccgccaatgtcgcaacaacgctttgtggaactgtacgacgagtacgaggatggcctgcgacaggcgaacgcgtttgatttcgacgacttactttcggcgaccgtcgcgatgttggagatgtgtccggacgtccgcgcgtattacgagcgtcgttggagtcaggttcttgtggacgaatttcaggatacgtcgacgacgcaatacgagttgattcgaaagctatcgcagcctcaagggtccgtttttgtcgtaggtgacgccgatcaggctatttatggttggcgcggagccgaggtggcgaacattcgaacgcagttcgaccaggactttaaggaggttcagacacacatgttgacgacaaactatcggagcacgtcgaccatcgttgaggcggcgcaagcagttatcaaggagagctcatttccttctccactcgatctcgtcgcgcacactcccggaggacgagacgttgcgatcgtcgaagcgaacgatgatcgagaagaggcagagttcatcgccttggaggcgcgtaagctcgttcaagattctgatttgcgctactcggatgtggctgtactgtatagaacgaactctcaagctcgcgtgctcgaggaagcattcattcgagccggcgtgccgcacacagttgtcggcgacacttctttctatagtagaaaagagatcaaggatatgattgcgtacttacgcattgtgtcgaattcgtcggacacggtgagcttgaatcgcatcatcaacacgccaacgcgaggtatagggaactcgaccatcgaaaaactcaatgcttggctcaaaacgctaccgaagaaggatgggctttcaccgtccattggtgatgcgctcttgcgaggcgcatggaagacgaatccgggtgaacaaagcgagctgttaccgagtgcagacgagatgggattgaccgcgcgcgcacgaacggcagtgctaaacttcgtcgagctcatgcgtgcgtgccaacagaccgcaatgaatgcgaccccgggggaactcctagaggatgtcatcaagcgcactgggtacgagacgatggtactcgacgcggacgatggcgtcgatcgctgggctttcgtgcaggagttaatcaatctagcaaaggaacccccgcgagatgtggatgaaacgatccaagaccgcgtcgggcttgaagctctgggcgcattcttggaaggagtttcgctcctgacgagtgcagagaccgacgacgtaacgggcggcgataaagcaaagctcatgacaatgcacgccagcaaaggattggagtttgacacagttttcatcgccggcgttgaagacggattgataccattcatccgaaacggtgatagtgatgatgaccaggatgaagaagtgcgtctattttacgtcggtataacgcgtgcgaagcgcaaacttatgctgtgtcacgcccgcgagaggaggcggttcggtcagagtccgcaggcggcgaggcggtcattccttctcgacagtatctctgcgacgctcaccggaacaaagaagcccgagcgaccggtgaccctccacggtggtgtatccgcgcgagcgagaaatggtaccggtatgcttgagaaaggcaaagcagactggagcgcacgcgtcaccgtcgatctcccgccacccacgcgcaagcgcgaaggaacgactcgagatcggatcgtcaagtcgcgagacctcatcaagaaggttacgggtgccgatgcggtggttccattgccgttgcgcaaagcacaggccgcgagtgagagttcgtcagggtcaagcgcaagggcgaaacccaagcgcgccgcgcgacacgtcaaaaagtcgccggacgagtag

SEQ ID NO: 44162 - protein, 859 aa, Ostreococcus tauri
MRAETASASMAHRARLARALDGTRRRAAFERGDARASGSVVRRWRTGATARDDAWGGRGVSAEALEPVHVRGLNDAQRAAVLAPVGATRVLAGPGSGKTHVLIGRVAHLIHEEKTPPREILCITFTNKAAKELRERLRDKIGEVAAKEITAGTFHSVAARMLRRHGERIPGIGRTGEFTIYDADDSKQIVQSVLVNKFGESKKTAQPGPMRNWISTAKSCVKHSVGLRGSQMLRALEDAKKPIPPMSQQRFVELYDEYEDGLRQANAFDFDDLLSATVAMLEMCPDVRAYYERRWSQVLVDEFQDTSTTQYELIRKLSQPQGSVFVVGDADQAIYGWRGAEVANIRTQFDQDFKEVQTHMLTTNYRSTSTIVEAAQAVIKESSFPSPLDLVAHTPGGRDVAIVEANDDREEAEFIALEARKLVQDSDLRYSDVAVLYRTNSQARVLEEAFIRAGVPHTVVGDTSFYSRKEIKDMIAYLRIVSNSSDTVSLNRIINTPTRGIGNSTIEKLNAWLKTLPKKDGLSPSIGDALLRGAWKTNPGEQSELLPSADEMGLTARARTAVLNFVELMRACQQTAMNATPGELLEDVIKRTGYETMVLDADDGVDRWAFVQELINLAKEPPRDVDETIQDRVGLEALGAFLEGVSLLTSAETDDVTGGDKAKLMTMHASKGLEFDTVFIAGVEDGLIPFIRNGDSDDDQDEEVRLFYVGITRAKRKLMLCHARERRRFGQSPQAARRSFLLDSISATLTGTKKPERPVTLHGGVSARARNGTGMLEKGKADWSARVTVDLPPPTRKREGTTRDRIVKSRDLIKKVTGADAVVPLPLRKAQAASESSSGSSARAKPKRAARHVKKSPDE

SEQ ID NO: 44163 - DNA, 2997 bp, Aspergillus oryzae
  CDS (1)..(2997)
atggattcgatactcgatgggttgaattccgcgcagagagccgctgtatcgtcgccatccccgattctccaggtcctcgccccgcccggctcaggaaagaccaagaccttaacggcgcgcgtcgcgtacctcctcgcccaccatggctatcgaccgcaagatgtcatttgctgcacgttcacaatcaaagcgagccgggagatgcgggagcgtctggcaaagttggtcggggaccgggtgcagtcaaaattgattctgggaacgtttcactccatctgtcgacggtacttggtgacttatgggtatttgattgggctgcggaaagggtttggaattgcagattccggggatagtttggctattattaggagaattgtcaagcggttacaactcaatatccagcctaatatggctcgcgggcggatttcgtatcaaaaagctcatggggtgacgccggaggatctggaagcgaaacagatgaagggctccaaggtgctggagcatcgggagtttattcaggtttaccaagcgtacgaatcgcatctggcggattcgaatttactcgattacgatgatctacttctacggtgcgcccagctgcttcgacaacatccggagtgtgtttcgaacgtccagtcagtcctagtcgatgagtttcaagacacaaatcacatccagtaccagttgatgaaccttttcgcatcacagaatagacggattacagttgtcggggatccggatcagagtatatacgggtttcgatcggctgagattaagaacttgacgcgtatgcagcagctgtatagcgatacatctgttgtgttgttagaggataattaccggtcgtcggggtccatcttgagctcagctcaagatgtcatcgaacaagattcgtcacggccagctaaaaggctgcaaccaacccatagtgtggggacgatgccggtactgcggaaattgccaacagcggaggctgaagctcagtggatcgttctcgaaattaaaagatgcattgctatgacggggaagctgctgaagtattccgattttgcgatattgctcaggtcggctgcactttcgcgacagatcgaatcggaaatgggaaaacagggcatgccgtacaggatggtcggaggcttacgtttcttcgatagagtagagatcaaactacttctggattacctgagagttatcagccagccgggaaacaccgatgcgcttctgcgaattatcaacgttccatcaaggaaaatcggtgaagaatcgatccgatcgttaatgagtggcgcggagaaagcgaacaagcctctctgggatttcatgaaggacgtggcacaaggtcgcaggtcgaccgaaaagactttgtcgaagcctaccagcaatgggctaggtaattttgtcggtctcatcgagtcgtcgagagagaaactcctcgaatgtaccgactgttcggccccgaagaagcttcttgagtttgtgatcaaaaagctttcctttcgagaataccttacgtcgacgtacggtaccaacgaggagaacaaatgggcgaacgtggaggagcttatgggccaagcggaagatacggctgcagccggggaggaaaacgagcatgacgatagcctcccagaaattcaaggcctctcacagcagcaagctcatccgggagaagaggcattatcgcgatttctggccaatgtggcgctctccaccgaggttcttcagcaagagggagaggacggtgagcaatcacaggagagagtgacgatttccactatccatgccgcaaaaggcctggaatggccggttgtcttcgtgccagctgtgtataacggcattatccctcattcgcgtgcagaggattcggatgaagagagacggctgctctacgtggccatgactagagcgcaggcgctgttgtacctgagttacccccttgagcagtcccgcagcggtgaaacgacgagtgtatcaacatttcttccggaaaaaatcatagaatcacgatttcgtctattaggacctaatctgcatgaacagatcgtctatgcaatcgctgacatcttacggcggccgagaccgactctcgaggctatgctcgagggtcaggtctcactaccttccacgcttgatgaccaatggacggtagacggtcgagaggctgcggacgccgtgtttagatgggacggctctagagcagtcgatggagaggaacctagcgctaaaagaccacggtatagccgagaatcttcgatatcaaccacaaccacgtacgtgtctgcctcaacatacacaatgaatggctcgaacttgtccgtaccaacgaccatgtcgcttggattctcgacagcacgggagtatatcgcgacgagcacagccgctaagcaggaacaaaagccgggactcgggttcgagaacaaatcaaaaacagcaggaaccggatcatctggacgcagtgcggttggcctttcgcagcagagcatatccgggttcttcagtaagccttcgtctcagcccaaaccgaaatctagcgaatcagcaccggcacattgccacaagacccctggcgatcgaaacaatgtcattgggcaggcggtagacggcaaaaataaaaacgtgctcccaacgaacttctcgacgtatagaccacaggcgcagcgcctgcaagcagcccgtccgattctcgaaccgtcggaccccaaccgttacacgtggctggcgacgtcttcaaagcccacggagaaaccgatcttgcgcagcggtgaagagggcaaggaaatatccgacaagggcgaagccgggagggagtgggcagcgagcgaggttaaaagacctcaagggccggttgggggtgcccgaccagcgaccacgtatcacacgactacaatgtcgatgttacagagcgcggcaccagtaccgacgagaagaactctggggattcgacgaagtatgaatgggtgggaagaacggatgaagagggcaggcaatcagcggccgtga

SEQ ID NO: 44164 - protein, 998 aa, Aspergillus oryzae
MDSILDGLNSAQRAAVSSPSPILQVLAPPGSGKTKTLTARVAYLLAHHGYRPQDVICCTFTIKASREMRERLAKLVGDRVQSKLILGTFHSICRRYLVTYGYLIGLRKGFGIADSGDSLAIIRRIVKRLQLNIQPNMARGRISYQKAHGVTPEDLEAKQMKGSKVLEHREFIQVYQAYESHLADSNLLDYDDLLLRCAQLLRQHPECVSNVQSVLVDEFQDTNHIQYQLMNLFASQNRRITVVGDPDQSIYGFRSAEIKNLTRMQQLYSDTSVVLLEDNYRSSGSILSSAQDVIEQDSSRPAKRLQPTHSVGTMPVLRKLPTAEAEAQWIVLEIKRCIAMTGKLLKYSDFAILLRSAALSRQIESEMGKQGMPYRMVGGLRFFDRVEIKLLLDYLRVISQPGNTDALLRIINVPSRKIGEESIRSLMSGAEKANKPLWDFMKDVAQGRRSTEKTLSKPTSNGLGNFVGLIESSREKLLECTDCSAPKKLLEFVIKKLSFREYLTSTYGTNEENKWANVEELMGQAEDTAAAGEENEHDDSLPEIQGLSQQQAHPGEEALSRFLANVALSTEVLQQEGEDGEQSQERVTISTIHAAKGLEWPVVFVPAVYNGIIPHSRAEDSDEERRLLYVAMTRAQALLYLSYPLEQSRSGETTSVSTFLPEKIIESRFRLLGPNLHEQIVYAIADILRRPRPTLEAMLEGQVSLPSTLDDQWTVDGREAADAVFRWDGSRAVDGEEPSAKRPRYSRESSISTTTTYVSASTYTMNGSNLSVPTTMSLGFSTAREYIATSTAAKQEQKPGLGFENKSKTAGTGSSGRSAVGLSQQSISGFFSKPSSQPKPKSSESAPAHCHKTPGDRNNVIGQAVDGKNKNVLPTNFSTYRPQAQRLQAARPILEPSDPNRYTWLATSSKPTEKPILRSGEEGKEISDKGEAGREWAASEVKRPQGPVGGARPATTYHTTTMSMLQSAAPVPTRRTLGIRRSMNGWEERMKRAGNQRP

SEQ ID NO: 44165 - DNA, 2220 bp, Bacillus subtilis
  CDS (1)..(2220): transl_table=11
ttgaattatattagcaatcaattactaagcggtttaaaccccgttcagcaggaagcagtcaaaacaacggacgggcctcttttgctgatggcgggagcgggtagcggaaagacgcgtgtcctgacccatagaattgcttatttaatggcagaaaagcatgtggcgccgtggaacattctggcgatcacatttacaaataaagcggcacgcgaaatgaaagaacgtgtggaaagcatcctcggacccggcgcggacgatatctggatctccacattccacagcatgtgcgtgcggatcttgcgcagagatatcgaccggattgggatcaaccgaaatttctccatccttgatacggctgaccagctttcagtgatcaaggggattttgaaggagcgcaatcttgatccgaagaagtttgacccgagaagcatcctcggcacgatcagcagtgcaaaaaacgaattgaccgaaccggaggaattctctaaagttgctggcggctactacgatcaggtggtcagcgatgtatatgctgattatcagaagaagctattgaaaaaccagtcgctcgatttcgacgatttaattatgacgacgattaaactgtttgacagagtgcctgaagtgcttgaattttatcagcgcaaattccagtacatccacgttgatgagtatcaggatacgaacagggcacaatacatgctcgttaagcagcttgccgagcgtttccagaacctttgcgttgtgggggattctgatcagtcaatctacagatggcgcggcgcggatatcaccaacattctttcatttgaaaaagattatccgaatgcaagcgtgattttgctagaacaaaactatcgttcaacgaaacggattttgcgcgcggctaacgaggtcattaaaaacaactctaaccgcaaaccgaaaaatttgtggacggaaaatgatgaaggcatcaagatttcctattatcgcggtgataatgagttcggtgaaggacagtttgtggccggcaaaattcatcagcttcacagcacaggcaagcggaagctgtcggatatcgccatattataccggacaaacgcgcagtcccgtgtgattgaggaaacgcttctcaaagcgggcttgaactataacattgtcggcggcacaaagttctatgacagaaaagaaattaaagacattcttgcgtacctgcgcctcgtatccaatccggatgacgatatcagtttcacgcgcattgtcaatgtgccgaagcgcggagtcggcgcgacatcacttgaaaaaatcgcttcgtatgcggccataaacggcttgtcctttttccaagcgattcagcaggttgattttatcggcgtcagtgccaaagcggcaaacgcgcttgacagctttagacagatgattgaaaacctgaccaatatgcaggattacttatccattacagagctgacagaagaaattcttgataagacggaatacagagaaatgctgaaggctgagaaatcgatcgaagcccaaagccgtttagaaaatatcgacgagttcctgtctgttacgaaaaactttgaacagaaaagtgaagacaagacactcgttgcgttcctgacagacttggcattgatcgcagatattgatcagctcgatcagaaggaggaagagtcaggcggcaaggatgcgatcaccctgatgacactgcacgccgcgaaaggactggagtttccggttgttttcttgatggggcttgaagaaggcgtcttcccgcatagccgttcactcatggaggaagcggaaatggaagaagaacgccgccttgcgtacgttgggattacaagggcggaacaggagctttatctgaccaatgctaaaatgcgcaccttgtttggccggacaaatatgaacccggaatctcgcttcattgctgaaataccggatgatttattggaaaacctaaatgagaaaaaagaaacaagagcgacgtctgcgagaaaaatgcagccgagacgcggccctgtttcacgcccggtatcctacgccagcaaaacaggcggcgacaccttgaactgggcagtcggagataaggcgggccataaaaaatggggaacaggaactgtcgtcagcgtgaaaggcgaaggagaagggacagagcttgatattgccttcccgagccctgtcggcgtgaaacgcctgttagcagcatttgctcctattgaaaagcagtaa

SEQ ID NO: 44166 - protein, 739 aa, Bacillus subtilis
MNYISNQLLSGLNPVQQEAVKTTDGPLLLMAGAGSGKTRVLTHRIAYLMAEKHVAPWNILAITFTNKAAREMKERVESILGPGADDIWISTFHSMCVRILRRDIDRIGINRNFSILDTADQLSVIKGILKERNLDPKKFDPRSILGTISSAKNELTEPEEFSKVAGGYYDQVVSDVYADYQKKLLKNQSLDFDDLIMTTIKLFDRVPEVLEFYQRKFQYIHVDEYQDTNRAQYMLVKQLAERFQNLCVVGDSDQSIYRWRGADITNILSFEKDYPNASVILLEQNYRSTKRILRAANEVIKNNSNRKPKNLWTENDEGIKISYYRGDNEFGEGQFVAGKIHQLHSTGKRKLSDIAILYRTNAQSRVIEETLLKAGLNYNIVGGTKFYDRKEIKDILAYLRLVSNPDDDISFTRIVNVPKRGVGATSLEKIASYAAINGLSFFQAIQQVDFIGVSAKAANALDSFRQMIENLTNMQDYLSITELTEEILDKTEYREMLKAEKSIEAQSRLENIDEFLSVTKNFEQKSEDKTLVAFLTDLALIADIDQLDQKEEESGGKDAITLMTLHAAKGLEFPVVFLMGLEEGVFPHSRSLMEEAEMEEERRLAYVGITRAEQELYLTNAKMRTLFGRTNMNPESRFIAEIPDDLLENLNEKKETRATSARKMQPRRGPVSRPVSYASKTGGDTLNWAVGDKAGHKKWGTGTVVSVKGEGEGTELDIAFPSPVGVKRLLAAFAPIEKQ

SEQ ID NO: 44167 - DNA, 2193 bp, Staphylococcus aureus
  CDS (1)..(2193): transl_table=11
atgaatgcgttattaaatcatatgaatacagagcaaagtgaagctgtaaagacaacagaaggaccattgttaattatggcaggtgctggttcagggaagacacgtgttttaacacatagaattgcttatttattagacgaaaaagatgtctcaccatacaatgttttggctattacttttacaaataaagcagcaagagaaatgaaagaacgtgttcaaaaattagtaggtgatcaagcagaagtgatttggatgtcaacattccactcaatgtgtgtgcgtattttacgtcgtgatgcagatcgaattggtatagaacgcaattttacgataattgatcctacagaccaaaaatctgttattaaagacgtcttaaaaaatgaaaatattgatagtaaaaagtttgaaccacgtatgtttatcggtgcgatcagtaatttgaaaaatgaacttaaaacacctgcagatgctcaaaaagaagccacagattatcactcgcaaatggtagcaacggtttatagtggatatcaacgccaattgtcacgtaatgaagcgttagattttgatgaccttattatgacaacgattaacttatttgagcgtgtaccagaagttctagaatattatcagaacaaattccaatatattcatgtagatgagtatcaagataccaataaagcacaatacacattagttaaattattagcaagtaagtttaaaaacttatgtgttgtaggtgactcagatcagtcaatttatggttggcgtggtgctgatattcaaaatatcttatcatttgaaaaagactacccagaagcgaatacaatctttttagagcaaaattatcgttcgacgaaaacgattttaaatgcggctaacgaagtgattaaaaataattctgaacgtaagccaaaaggactgtggactgcaaatacgaatggtgagaaaattcattactatgaagcaatgacagaacgtgatgaagcggaatttgtaatacgagaaattatgaagcatcaacgtaatggtaagaaatatcaagatatggcaattttatatagaacaaatgcacaatcacgtgtacttgaggaaacattcatgaaatctaatatgccatacacaatggttggtggccaaaagttctatgaccgtaaagaaattaaagatttattaagttatttgcgtataattgccaatagtaatgatgacattagtttgcaacgtattattaatgttccaaaaagaggtgtaggtccttcatctgttgaaaaagttcaaaattatgcacttcaaaacaatatcagtatgtttgatgcacttggagaagctgattttatcggattgtcaaaaaaggtgacacaagagtgtcttaatttttacgagttaatccaaagcttgataaaagaacaagaatttttagaaattcatgaaatagttgatgaagtattacaaaagtctggctaccgagaaatgcttgaacgtgaaaatacactagaatctcgaagtagattagaaaacatcgatgaatttatgtcagtaccaaaagactatgaggaaaataccccattagaagaacagtcattaattaactttttaacggatttatcgttagtagctgatattgatgaggcagatactgaaaatggcgtaacactaatgacgatgcactcggctaagggccttgaatttccaatcgtctttataatgggaatggaagaatctttattcccacatattagagcgattaagagtgaaggtgatcatgaaatgcaagaagaacgtcgtatttgttatgtagcaatcacaagggctgaagaggtgttatacatcactcatgcgacatcaagaatgttatttggtcgccctcagtcaaatatgccatctagatttttaaaggaaattccagaatcactattagaaaatcattcaagtggcaaacgacaaacgatacaacctaaggcaaaaccttttgctaaacgtggatttagtcaacgaacaacgtcaacgaaaaaacaagtatcgtcatctgattggaatgtaggtgacaaagtgatgcataaagcctggggagaaggcatggtgagtaatgtaaacgagaaaaatggctcaatcgaactagatattatctttaaatcacaagggccaaaacgtttgttagcgcaatttgcaccaattgaaaaaaaggaggattaa

SEQ ID NO: 44168 - protein, 730 aa, Staphylococcus aureus
MNALLNHMNTEQSEAVKTTEGPLLIMAGAGSGKTRVLTHRIAYLLDEKDVSPYNVLAITFTNKAAREMKERVQKLVGDQAEVIWMSTFHSMCVRILRRDADRIGIERNFTIIDPTDQKSVIKDVLKNENIDSKKFEPRMFIGAISNLKNELKTPADAQKEATDYHSQMVATVYSGYQRQLSRNEALDFDDLIMTTINLFERVPEVLEYYQNKFQYIHVDEYQDTNKAQYTLVKLLASKFKNLCVVGDSDQSIYGWRGADIQNILSFEKDYPEANTIFLEQNYRSTKTILNAANEVIKNNSERKPKGLWTANTNGEKIHYYEAMTERDEAEFVIREIMKHQRNGKKYQDMAILYRTNAQSRVLEETFMKSNMPYTMVGGQKFYDRKEIKDLLSYLRIIANSNDDISLQRIINVPKRGVGPSSVEKVQNYALQNNISMFDALGEADFIGLSKKVTQECLNFYELIQSLIKEQEFLEIHEIVDEVLQKSGYREMLERENTLESRSRLENIDEFMSVPKDYEENTPLEEQSLINFLTDLSLVADIDEADTENGVTLMTMHSAKGLEFPIVFIMGMEESLFPHIRAIKSEGDHEMQEERRICYVAITRAEEVLYITHATSRMLFGRPQSNMPSRFLKEIPESLLENHSSGKRQTIQPKAKPFAKRGFSQRTTSTKKQVSSSDWNVGDKVMHKAWGEGMVSNVNEKNGSIELDIIFKSQGPKRLLAQFAPIEKKED

SEQ ID NO: 44169 - DNA, 1938 bp, Buchnera aphidicola subsp
  CDS (1)..(1938): transl_table=11
atgtctctaaatttttctcaaaaaaatgctgttgaactcactaatgggccctgtctaatactagcaggggccggttctggaaaaacaaaagttattattaataaaattatttatttaattaatcattgccaatatgaacctgataatattgccgcagtaacttttactaataaagctgcctatgaaatgagaatacgtctttcgaaatatttaaatattccagaaataaaaaaaataattatttctacttttcactcattaggacttgaaattattaaaaaagaaattgatgcgttagaattaaacaacaatttcactttattagatgaaaaagatcaaatacttttattaaaaaaaatatgtaaaaaagaaatcaaaaacaatattcaattattaaaaaaattaaattttatgatttcttattggaaaaataaatttcttactcctttacaagttcaattattagcaaaatctagtcaagaaaaagattttgcatatgtttatgaacaatatactaattatctttataaagctaatatattagatttcgatgatttgatttgcatgccaacattattattaaaaaacaacaaaaaaataaaaatacgttggcaaaaaaagatctcttatttattagtggatgaatatcaagacacaaacaatagtcaatacgaacttattaaaatgcttgctaataaaaattctgattttactttagtcggtgatgatgatcagtctatttattcatggagaggagcaaatcctcaaaatatttttttattaaaaaaagattttcctaatttaaaaattatcaaaatggaacataattatcgatcttcaggaagaatattaaaagctgcgaatagtcttattgcaaataatatacattatttagaaaaaaaactattttcacaacttaaatatggaaatttaataaaagtattaataggtaaaaatgaagaaaatgaagctcaaaaaatagttaaaaaaattatatctcaatatgctaaaaaaaaaataaaataccgagattttgctattttatatcgtggaaattatcaatctagaattcttgaaaaagctttaataaaagaaaatataccatataatatttctgaaaaatcctcatttttttcacgtcctgaaatcaaagatttattaagttatcttcgtgttgttattaatcgagacgacaatcacgcatttatgagaattgtaaatatcccttcacgtcaaataggaaaaacaacattaaaaaaattagaagaatgggctaataaaaaacatgtaagtctttttcaagctagtaataatatagaaataaaaaaatttttaaatgaaaatactataaaaaaaattaaaaattttatctctaaaatagaaaaattcactgcgtggtcttgtttgaaaccatctaatattatagatgatattgttgatgatcttgagtatgaaaaatggttatctaaatttttaaaagatcctaataaaattaaaaatagtataaataatgttcatacattatcacaatggtttaaaaatatgattaaaggagatgattttgaaaaaccaatgactttatttcaaattgttacacggatgacaatccgtgatattttagatgataatattataaaagaacaacaagatcgagtacaattaatgactttacatgcttctaaaggattggaatttcctgcagtatttatcattggcatgtgtgagggaattttacctaatcaaaaaagtatcgataatgataatatcgaagaagaacgaagattaacttatgttggaattactcgagcaaaaaaacaattgttttttacttattgttacaaacgcactcaatatggtcaaattttagatatgcttcctagtagatttttatttgaactacctcaagaagatttaaaatgggagaaaaaaattttttag

SEQ ID NO: 44170 - protein, 645 aa, Buchnera aphidicola subsp
MSLNFSQKNAVELTNGPCLILAGAGSGKTKVIINKIIYLINHCQYEPDNIAAVTFTNKAAYEMRIRLSKYLNIPEIKKIIISTFHSLGLEIIKKEIDALELNNNFTLLDEKDQILLLKKICKKEIKNNIQLLKKLNFMISYWKNKFLTPLQVQLLAKSSQEKDFAYVYEQYTNYLYKANILDFDDLICMPTLLLKNNKKIKIRWQKKISYLLVDEYQDTNNSQYELIKMLANKNSDFTLVGDDDQSIYSWRGANPQNIFLLKKDFPNLKIIKMEHNYRSSGRILKAANSLIANNIHYLEKKLFSQLKYGNLIKVLIGKNEENEAQKIVKKIISQYAKKKIKYRDFAILYRGNYQSRILEKALIKENIPYNISEKSSFFSRPEIKDLLSYLRVVINRDDNHAFMRIVNIPSRQIGKTTLKKLEEWANKKHVSLFQASNNIEIKKFLNENTIKKIKNFISKIEKFTAWSCLKPSNIIDDIVDDLEYEKWLSKFLKDPNKIKNSINNVHTLSQWFKNMIKGDDFEKPMTLFQIVTRMTIRDILDDNIIKEQQDRVQLMTLHASKGLEFPAVFIIGMCEGILPNQKSIDNDNIEEERRLTYVGITRAKKQLFFTYCYKRTQYGQILDMLPSRFLFELPQEDLKWEKKIF

SEQ ID NO: 44171 - DNA, 2022 bp, Escherichia coli
  CDS (1)..(2022): transl_table=11
atgcgtctaaaccccggccaacaacaagctgtcgaattcgttaccggcccctgcctggtgctggcgggcgcgggttccggtaaaactcgtgttatcaccaataaaatcgcccatctgatccgcggttgcggttatcaggcgcggcacattgcggcggtgacctttactaataaagcagcgcgcgagatgaaagagcgtgtagggcagacgctggggcgcaaagaggcgcgtgggctgatgatctccactttccatacgttggggctggatatcatcaaacgcgagtatgcggcgcttgggatgaaagcgaacttctcgttgtttgacgataccgatcagcttgctttgcttaaagagttgaccgaggggctgattgaagatgacaaagttctcctgcaacaactgatttcgaccatctctaactggaagaatgatctcaaaacaccgtcccaggcggcagcaagtgcgattggcgagcgggaccgtatttttgcccattgttatgggctgtatgatgcacacctgaaagcctgtaacgttctcgacttcgatgatctgattttattgccgacgttgctgctgcaacgcaatgaagaagtccgcaagcgctggcagaacaaaattcgctatctgctggtggatgagtatcaggacaccaacaccagccagtatgagctggtgaaactgctggtgggcagccgcgcgcgctttaccgtggtgggtgacgatgaccagtcgatctactcctggcgcggtgcacgtccgcaaaacctggtgctgctgagtcaggattttccggcgctgaaggtgattaagcttgagcagaactatcgctcttccgggcgtattctgaaagcggcgaacatcctgatcgccaataacccgcacgtctttgaaaagcgtctgttctccgaactgggttatggcgcggagctaaaagtattaagcgcgaataacgaagaacatgaggctgagcgcgttactggcgagctgatcgcccatcacttcgtcaataaaacgcagtacaaagattacgccattctttatcgcggtaaccatcagtcgcgggtgtttgaaaaattcctgatgcaaaaccgcatcccgtacaaaatatctggtggtacgtcgtttttctctcgtcctgaaatcaaggacttgctggcttatctgcgcgtgctgactaacccggacgatgacagcgcatttctgcgtatcgttaacacgccgaagcgagagattggcccggctacgctgaaaaagctgggtgagtgggcgatgacgcgcaataaaagcatgtttaccgccagctttgatatgggcctgagtcagacgcttagcggacgtggttatgaagcattgacccgcttcactcactggttggcagaaatccagcgtctggcggagcgggagccgattgccgcggtgcgtgatctgatccatggcatggattatgaatcctggctgtacgaaacatcgcccagcccgaaagccgccgaaatgcgcatgaagaacgtcaaccaactgtttagctggatgacggagatgctggaaggcagtgaactggatgagccgatgacgctcacccaggtggtgacgcgctttactttgcgcgacatgatggagcgtggtgagagtgaagaagagctggatcaggtgcaactgatgactctccacgcgtcgaaagggctggagtttccttatgtctacatggtcggtatggaagaagggtttttgccgcaccagagcagcatcgatgaagataatatcgatgaggagcggcggctggcctatgtcggcattacccgcgcccagaaggaattgacctttacgctgtgtaaagaacgccgtcagtacggcgaactggtgcgcccggagccgagccgctttttgctggagctgccgcaggatgatctgatttgggaacaggagcgcaaagtggtcagcgccgaagaacggatgcagaaagggcaaagccatctggcgaatctgaaagcgatgatggcggcaaaacgagggaaataa

SEQ ID NO: 44172 - protein, 673 aa, Escherichia coli
MRLNPGQQQAVEFVTGPCLVLAGAGSGKTRVITNKIAHLIRGCGYQARHIAAVTFTNKAAREMKERVGQTLGRKEARGLMISTFHTLGLDIIKREYAALGMKANFSLFDDTDQLALLKELTEGLIEDDKVLLQQLISTISNWKNDLKTPSQAAASAIGERDRIFAHCYGLYDAHLKACNVLDFDDLILLPTLLLQRNEEVRKRWQNKIRYLLVDEYQDTNTSQYELVKLLVGSRARFTVVGDDDQSIYSWRGARPQNLVLLSQDFPALKVIKLEQNYRSSGRILKAANILIANNPHVFEKRLFSELGYGAELKVLSANNEEHEAERVTGELIAHHFVNKTQYKDYAILYRGNHQSRVFEKFLMQNRIPYKISGGTSFFSRPEIKDLLAYLRVLTNPDDDSAFLRIVNTPKREIGPATLKKLGEWAMTRNKSMFTASFDMGLSQTLSGRGYEALTRFTHWLAEIQRLAEREPIAAVRDLIHGMDYESWLYETSPSPKAAEMRMKNVNQLFSWMTEMLEGSELDEPMTLTQVVTRFTLRDMMERGESEEELDQVQLMTLHASKGLEFPYVYMVGMEEGFLPHQSSIDEDNIDEERRLAYVGITRAQKELTFTLCKERRQYGELVRPEPSRFLLELPQDDLIWEQERKVVSAEERMQKGQSHLANLKAMMAAKRGK

SEQ ID NO: 44173 - DNA, 2025 bp, Salmonella typhimurium
  CDS (1)..(2025): transl_table=11
atgcgtttaaatcccggccaacaacacgctgtcgaattcgtcaccggaccctgcctggtgctggcaggagcgggttctggtaaaactcgcgtaattaccaataaaatcgcccacctgatccgcggatgcggctatcaggcccggcatattgcggcggtgacgtttaccaacaaggcagcgcgtgagatgaaagaacgggttgggcagacgctcggccgtaaggaagcgcgcggtttgatgatctccacctttcatacgctagggctggatattattaagcgcgagtacgctgcgctggggatgaaatcgaacttttcattgtttgacgataccgaccaggtcgccttgctcaaagagctgaccgaaggcctgatcgaagacgacaaggttctgttgcaacagctgatctccacgatctccaactggaaaaacgatctcaaaacgcctgcgcaggcggcggccggggcgaaaggcgaacgcgatcgtatttttgcccactgctacgggctttacgacgcccatatgaaggcatgtaacgttctcgattttgatgatttgattttgctgccgacgctgctgctgcaacgcaatgacgaggtgcgcgagcgctggcagaataaaattcgttatctgctggtggatgaatatcaggatactaacaccagccagtatgagttggttaagctgctggtcgggcaacgcgcgcgctttacggtcgtaggcgatgacgatcagtctatctactcctggcgcggggcgcgtccgcaaaacctggtgttactgagccaggattttccggcgctgcaggtgattaagctggagcaaaactatcgttcttcgggccgcatcctgaaagcggcgaatattctcatcgccaacaatccgcacgtctttgaaaagcgcctcttttccgagctcggttacggcgcggaactcaaagtgttaagcgcaaacaatgaagagcatgaagctgagcgcgttaccggcgaactgattgcccatcactttgtgaacaagacccagtacaaggattacgccattctgtatcgcgggaatcatcagtcgcgggtatttgaaaaattcctcatgcagaaccgcattccgtacaaaatttccggcggcacctcatttttctcccgtccggagattaaagacctgctggcctacctgcgggtgttgaccaacccggatgatgacagcgctttcctgcgcatcgtgaatacgccaaaacgcgaaatcggtccggccacgctgcaaaagctgggtgaatgggcaatgacgcgtaataaaagcctgtttaccgccagctttgatatgggacttagccaaaagctgaccggacgtggttacgattcattgacgcgttttacccactggctgggggaaatccagcgtctggccgaacgcgagcctgtcgccgccgtgcgcgatctcatccacggtattgactatgaatcctggttgtacgaaacctcgccgagccccaaagcggcggaaatgcgtatgaaaaacgttaaccagctctttagctggatgactgagatgctggaaggcaacgaactcgatgagccgatgacgctgacccaggtggttacacgctttacactgcgcgatatgatggagcgtggcgagagcgaagaagagctggatcaggtacagttgatgacgcttcatgcatcgaaaggactggaattcccgtatgtctatatggtgggaatggaagaaggatttttgccgcatcaaagcagcattgacgaagataatattgaggaagagcgtcggctggcctatgttgggatcactcgcgcgcagaaagagctcacctttacattatgtaaagagcgccgtcagtatggggaactggtgcgcccggaacccagccgcttcctgttagaactcccgcaggatgatttaatctgggagcaggagcgcaaagtggtaagcgctgaggagcgaatgcaaaaagggcaaagtcacctggctaatctgaaagccatgatggcggcaaagcgagcgaaatcgtag

SEQ ID NO: 44174 - protein, 674 aa, Salmonella typhimurium
MRLNPGQQHAVEFVTGPCLVLAGAGSGKTRVITNKIAHLIRGCGYQARHIAAVTFTNKAAREMKERVGQTLGRKEARGLMISTFHTLGLDIIKREYAALGMKSNFSLFDDTDQVALLKELTEGLIEDDKVLLQQLISTISNWKNDLKTPAQAAAGAKGERDRIFAHCYGLYDAHMKACNVLDFDDLILLPTLLLQRNDEVRERWQNKIRYLLVDEYQDTNTSQYELVKLLVGQRARFTVVGDDDQSIYSWRGARPQNLVLLSQDFPALQVIKLEQNYRSSGRILKAANILIANNPHVFEKRLFSELGYGAELKVLSANNEEHEAERVTGELIAHHFVNKTQYKDYAILYRGNHQSRVFEKFLMQNRIPYKISGGTSFFSRPEIKDLLAYLRVLTNPDDDSAFLRIVNTPKREIGPATLQKLGEWAMTRNKSLFTASFDMGLSQKLTGRGYDSLTRFTHWLGEIQRLAEREPVAAVRDLIHGIDYESWLYETSPSPKAAEMRMKNVNQLFSWMTEMLEGNELDEPMTLTQVVTRFTLRDMMERGESEEELDQVQLMTLHASKGLEFPYVYMVGMEEGFLPHQSSIDEDNIEEERRLAYVGITRAQKELTFTLCKERRQYGELVRPEPSRFLLELPQDDLIWEQERKVVSAEERMQKGQSHLANLKAMMAAKRAKS

SEQ ID NO: 44175 - DNA, 2664 bp, Schizosaccharomyces pombe
  CDS (1)..(2664)
atggaaacgaaatcatcatacttgaagtttctgaatgaagaacaaaggattagtgttcagagtcctcataagtatactcaaattttagccggtcctgggtctggaaaaacccgtgttcttaccgctcgagtagcctatttacttcaaaagaaccatattgcagccgaagatttaattatagccacctttacgaacaaagccgcaaatgaaataaagctcagaattgaagctattttggggaatagtgaagcctctaagcttatttctgggacgtttcattctatagcgtacaagtatttggttaaatatggcaagcatatagggctatcctcaaattggttgattgctgacagaaatgatactcaagctattatgaagcgacttttagactctctcaagaaagctaaaaatccgattgcttctggtattagaggacaagaattgactcctcagaatgctctaaatcgcataactaaattaaagtccaacggtcttcttgttaaacctggaatggatcagttgagtttgattaatggtctggaagaaccacctaaagagcttcaaagccatcaatctgttgaattgtatagactttatcaaacttccttatggaagaacaatttagcggattttgatgatttgcttttaaactttattttattacttcaaaagcaaccagattgtgtgaggaatataaaacatattttaatcgatgaatttcaagatactagcaaaatccaatattttcttgttaagcttttggcattgcaaaattcagatatcacgattgttggcgatcccgatcaatcaatctatggatttcgaagtgctgaaattaggaacttaaaccaaatgtctgaagactttgaaggtacccaagtgcttcatttggaaagaaattaccgttcagctaaacctatacttgaattagcactgtctatcatttcacaggacaaaagcaggcctaagaaggggctcaaaagtaatcacatctcttccttaaagcctcattaccgattgtttgaaactaacaataaagaatcttactggatcgcaagagaaattaaacgtatagtaggttcttgtccagagcttatattttataacgatatcgcaatccttgtaaggtcctccagccttacaagaagtttagaacatgcactttccgaacttggtgtgccctaccgcatggttggagttaacaagttttttgatagagaagagattcgagacttaatagcttacttgagagtcctagctaacaaagattcgacttctttaattcgtgtcatcaatgtccctcctagaaatattggcaaaacaaaaatcgaccgtattattttcgaaagtgaaagaagaggattgaccttttggcaaactttaaatgaagtaaagaatgaaaatattttactttctcaaagaaatgacaagagttttctaaagtctttaaagtcttttctttgttcaatctccaaacttgaaaatcgttacttgtctaatgggcactcagcaactcttagtgatttacttttgggaatactttctgagattaaatattacgaatacctggttcggaaaaataaagaaactgtcgaagaaaaatgggaaaatgtaatggagcttgtacaacaaagcgataacatatcttgtatattctatgaattagattacaaaatatcaacaattgttctattgcagaattttttgactcaaatcgctcttgtgaatgaagaacagaaagagggcgaatctcagaaggttaccatttcaacccttcacgcagctaagggtttagagtggcctgttgtatttttaccttgtctttgtgaaaatattatccctcattctcgttcagacgacctcgacgaggaaagaaggctgctatatgtcggtgccacacgtgcacaggcgctactgtatctatcttcctttaaaagcgtcactggaatgtttgcagatatgcagaactcagacaatgtacaggacgtcagtccatttttaaaaggagaagaaatgaaaagatgggtgatggaaagtgaaatagtttttaatgaaaagattgcttctgaaattggaaccatattgggtcggaaatcttatgggaaaataactaatttaagcggtattggttcaaatgcaaatcataacggaactaaattcgaaaacttgggcttccaatgctgtcgtgttctagctgaggcagaattgaaaaagagagaacgagtcaaaagtgtcaatgactataataaagatgaaacaaattttagaaaacataatgccaagagatcgaaaaccgatatacgaagttggtttgagaaaaaacaaccaatcgattcagatgtagagatttctgagccgtcaaggtccgcaagcataatggttgcaaataaagatttaaatgatcgaagttttgaaactgtcaatcgtattgtatcgacaagagcctcaacgacaaacgcttctttcatgagcagcgtcagacaaaatcttggtagaggtccttctacgaaagatcaggtaataaatagaacgttgagggaaggtcaccaagatgttgtgcaacatactgaccttaatcaatcaaatactaaggtcgcgagtgcccgtcctgctggttcgagaaaacgattgggtgtaaggctacgagtttcacgaatgttatag

SEQ ID NO: 44176 - protein, 887 aa, Schizosaccharomyces pombe
METKSSYLKFLNEEQRISVQSPHKYTQILAGPGSGKTRVLTARVAYLLQKNHIAAEDLIIATFTNKAANEIKLRIEAILGNSEASKLISGTFHSIAYKYLVKYGKHIGLSSNWLIADRNDTQAIMKRLLDSLKKAKNPIASGIRGQELTPQNALNRITKLKSNGLLVKPGMDQLSLINGLEEPPKELQSHQSVELYRLYQTSLWKNNLADFDDLLLNFILLLQKQPDCVRNIKHILIDEFQDTSKIQYFLVKLLALQNSDITIVGDPDQSIYGFRSAEIRNLNQMSEDFEGTQVLHLERNYRSAKPILELALSIISQDKSRPKKGLKSNHISSLKPHYRLFETNNKESYWIAREIKRIVGSCPELIFYNDIAILVRSSSLTRSLEHALSELGVPYRMVGVNKFFDREEIRDLIAYLRVLANKDSTSLIRVINVPPRNIGKTKIDRIIFESERRGLTFWQTLNEVKNENILLSQRNDKSFLKSLKSFLCSISKLENRYLSNGHSATLSDLLLGILSEIKYYEYLVRKNKETVEEKWENVMELVQQSDNISCIFYELDYKISTIVLLQNFLTQIALVNEEQKEGESQKVTISTLHAAKGLEWPVVFLPCLCENIIPHSRSDDLDEERRLLYVGATRAQALLYLSSFKSVTGMFADMQNSDNVQDVSPFLKGEEMKRWVMESEIVFNEKIASEIGTILGRKSYGKITNLSGIGSNANHNGTKFENLGFQCCRVLAEAELKKRERVKSVNDYNKDETNFRKHNAKRSKTDIRSWFEKKQPIDSDVEISEPSRSASIMVANKDLNDRSFETVNRIVSTRASTTNASFMSSVRQNLGRGPSTKDQVINRTLREGHQDVVQHTDLNQSNTKVASARPAGSRKRLGVRLRVSRML

SEQ ID NO: 44177 - DNA, 3525 bp, Saccharomyces cerevisiae
  CDS (1)..(3525)
atgtcgtcgaacaatgatctttggttgcatttagtatcccagttaaatactcaacagagagcagcggccctctttgattacactagagggctgcaggtcattgccggtcccggcacagggaagactaaggttttaacttcaagagtagcgtatcttattctgcaccaccatattcatccccgcgatattatagtgactactttcactaacaaagctgctaacgaaatgaaagagcgtttgcaagaaatgttacgcggggcaggcgtgaatatttcggagctcttaattggtacttttcatagtatttgcctgaaaatactttatagatttggccacttggtggatctacagaaagactggagaattattgatgagaaggaaatagatgtcattttagatgatatgatcgaaaaagttcccgaccaaataagggattatgcttcctcaatcacaaggaaagtaaatctttgtatgccgagtaaaaatggagatgaatggactattcatccgaagctgatcaagaaacagatatcaaagctaaaatcaaacgcaatattacctgaggaatacatcttagattcgaatcatgacgccgcgcttggttacttttaccaaatataccaatcagagctaagcaagaaaaatacgttagattttgatgacttattaatgtacacctttcgtttgctgactagagtgcgtgttttatccaacataaagcatgttttagttgacgaatttcaagatactaacggcattcaattggacttgatgtttctttttgctaagggaaatcatcatctttcgagggggatgaccatcgtaggtgatcctgatcaaagcatatatgctttcagaaacgccttagcgcacaactttctagaaatgggcagaaaatgtcccatcgagtactcaactatcatacttgttgaaaattatcgttcatcacaaaaaattctaaatacaagcgaaattttaataacgcaacaaaacaaaggtcggcagaatagggctccactccgtgcccaatttgacctggattttccaccagtttacatgaatttccccgcttactttttggaagcaccttctttagttcgggaactactatatttgaaggcattgccaaacctattcacatttaatgactttgctatcctagtaagacaacgaagacaaattaaaaggatcgaaagtgcattaatagaacatcggataccctataaaattattaggggccacagtttctgggattccaaggaaacaagagcgatgttaaatttattaaaattgatattttctccgaatgacaaacatgcaattcttgcttcacttttatatccagcaaggggccttggtcctgctaccggtgagaagattaagaacgcattggacacgttagctaccgatgtgtcatgtttccaaatattgaaagacataagtagtaaaaaaataatgctagacataccgacgaaaggccgttctgtgattgctgacttcatttcaatgatagaaaattgtcaattgttgctccagagcactttactagggggtctttcagatttatttgataagctatatgaattatcaggtctgaaatacgaatacttgtacaaggatggtaagaaaaaaaatgatcagcttgaaaaatccgaacctaatttattaaacgcaagacataagaatattgaacttttgaaaaactatttcctggctcttctttccaagtcagaatcttcagataaagaaaaaaatgaagccattaaagcagcaacagatgaagccgaaccaatagagaacaaggtcatcactccaaaagaatacctccgtaatttcttcaattcactttcccttcattctgatgcagctgaggaggaagagtcggaatccaataaagatgcaaaaataaaacgtgagaagaatgggtttgtcacgatatctacaattcacggtgccaaaggtcttgagtggccggtagtttttattcctggatgcgaagaaggtataattccttgtgtgttcaacgatgataagaaagacgaatcagaggaggacgaagaagaagatcaagaaaatagtaagaaagatgcaagcccaaaaaagactagagttttatccgtggaagattctatagatgaggaaagaagaatgttttttgttgcacagactcgtgcaaaatacctgttgtacctatcaaatactgtaactgtggaagatgtcgatagaccaagaattgcaagccgatttttgactactgacttgataaaagccatgtccgatagccaaaaattatttgaaagtacgaatagtatcaaaaaactataccgaattttgaacaaaaagccgcctgctgaagatgataaactattctcccttgaccaattgcgcaaagactataaccaattcattgaaaataggagagaaaggatgatttggcaagggatacaaatgaatgatgtctatggaatacagttgtctagaaataaattattgggttctgttagtgatttcacgtcagctgcggaccagttacgactcgaaacgcaaaactctatattcccacagaagaaacttattgaaaaatcacgcccatccaaaatcaatggcaattacgctcctaaaagtagagttaaaagtccagaaaaaaggtacgctccagaaactacatcattccattctcctacaaagaaaaaggtgtatgcacctcaatacgtttcaacaactaatgtacctagtaggcaggagtttcattcttctactgggaaaaatattccttttctgagaagagaagataggtccatcacagacatatcaccacgatcatcaacgaggtcgttaaaaggagcatctccaaataagacgagccacatgtcagatgatttaatgagaccatcacctacgaggaaggacaaagttactcgtaatattcatttcgcaactgcaggaactttcagaatagaaacccagtcaaatgttgatgaactgcatcctccggaatactccaataaatcagggcagtcgcttacgtcgagtgaattttctgggttttctagcgcgtgcagtaattctgatcagccaacgaacttaatagaagatataaacaacgaattagatctatccgatgaggagttattaaatgacatatcaatagaaaggaggagagagcttttgggctcgaaaaagacgaaaaaaataaaaccaaaaactcgaaatagaaagtctaagagaggtgacaaggttaaggtggaggaagtgatagatttgaagagtgaatttgaggaagatgacagcagaaatacaacagctgctgagttattacataatccggatgacactacagttgacaatcgtccaataatctccaatgctaagtttttggctgacgcagcaatgaaaaagacacagaaattttccaaaaaggtgaagaatgaacctgcatcaagtcaaatggatatattttctcagctgtcacgtgcgaaaaaaaagtcaaaattaaacaacggtgaaatcatagtcatcgattag

SEQ ID NO: 44178 - protein, 1174 aa, Saccharomyces cerevisiae
MSSNNDLWLHLVSQLNTQQRAAALFDYTRGLQVIAGPGTGKTKVLTSRVAYLILHHHIHPRDIIVTTFTNKAANEMKERLQEMLRGAGVNISELLIGTFHSICLKILYRFGHLVDLQKDWRIIDEKEIDVILDDMIEKVPDQIRDYASSITRKVNLCMPSKNGDEWTIHPKLIKKQISKLKSNAILPEEYILDSNHDAALGYFYQIYQSELSKKNTLDFDDLLMYTFRLLTRVRVLSNIKHVLVDEFQDTNGIQLDLMFLFAKGNHHLSRGMTIVGDPDQSIYAFRNALAHNFLEMGRKCPIEYSTIILVENYRSSQKILNTSEILITQQNKGRQNRAPLRAQFDLDFPPVYMNFPAYFLEAPSLVRELLYLKALPNLFTFNDFAILVRQRRQIKRIESALIEHRIPYKIIRGHSFWDSKETRAMLNLLKLIFSPNDKHAILASLLYPARGLGPATGEKIKNALDTLATDVSCFQILKDISSKKIMLDIPTKGRSVIADFISMIENCQLLLQSTLLGGLSDLFDKLYELSGLKYEYLYKDGKKKNDQLEKSEPNLLNARHKNIELLKNYFLALLSKSESSDKEKNEAIKAATDEAEPIENKVITPKEYLRNFFNSLSLHSDAAEEEESESNKDAKIKREKNGFVTISTIHGAKGLEWPVVFIPGCEEGIIPCVFNDDKKDESEEDEEEDQENSKKDASPKKTRVLSVEDSIDEERRMFFVAQTRAKYLLYLSNTVTVEDVDRPRIASRFLTTDLIKAMSDSQKLFESTNSIKKLYRILNKKPPAEDDKLFSLDQLRKDYNQFIENRRERMIWQGIQMNDVYGIQLSRNKLLGSVSDFTSAADQLRLETQNSIFPQKKLIEKSRPSKINGNYAPKSRVKSPEKRYAPETTSFHSPTKKKVYAPQYVSTTNVPSRQEFHSSTGKNIPFLRREDRSITDISPRSSTRSLKGASPNKTSHMSDDLMRPSPTRKDKVTRNIHFATAGTFRIETQSNVDELHPPEYSNKSGQSLTSSEFSGFSSACSNSDQPTNLIEDINNELDLSDEELLNDISIERRRELLGSKKTKKIKPKTRNRKSKRGDKVKVEEVIDLKSEFEEDDSRNTTAAELLHNPDDTTVDNRPIISNAKFLADAAMKKTQKFSKKVKNEPASSQMDIFSQLSRAKKKSKLNNGEIIVID

SEQ ID NO: 44179 - DNA, 2184 bp, Haemophilus influenzae
  CDS (1)..(2184): transl_table=11
atgatggatatttctgaattacttgacggactcaacgataaacaacgcgaacgcgtagctgctcctcttggtaatcacttagtgctagctggtgcaggctcgggcaaaacgcgtgtattgacgcaccgtattgcttggttaattgcggtcgaaaatatttctgaaggcagcattatggcggtgacgtttaccaataaagccgcagcagaaatgcgtcatcgtattcaatctacccttgccaaacacgcacaacatcaattatttggtatgtggattggcaccttccatagcattgctcatcgtttgttgcgagctcatcatttagatgtgggattgccacaagatttccaaattttagattcagaagatcaacttcgtttaattaaacgattattaaaattacataattttgatgaaaaagcttttccgcctaaacaggcttgttggtacatcaataacaaaaaagatgaaggcttgcgaccaaatgatattgaagattttaatgatcgccaagaacgtgaatggattaaaatttatcagatctatcaagacacttgcgatcgcgcagggttggtcgattttgctgaattattaattcgggtctatgaattatttgagaaaaaaccattaattttgcaacgttatcaacaacgttttcagcatattttggtggatgaatttcaagacaccaataaaatccaatataaatggatcaaaattcttgctggaaaaacaggccaagtcatgattgtgggcgatgatgatcaatctatatacggttggcgtggtgcacaaatagaaaatatccaaaaattcttgaaagatttcaaagccgaaacaattcgccttgaacaaaactatcgttctaccgccaatatcctaaacagcgcaaatgaattaattgcaaacaatagtgatcgtcttggtaaaaatttatggacagagggtgagaaaggcgatcctgtgggcatctattctgcctttaatgaattagatgaagcaaaatttgtcgcttcacaaattcaggattgggtagaacatggcggaaaacttgatgattgcgctgtactttatcgtagtaatagccaatcacgggttattgaagaagctttaattcgttgtcaaattccataccgtatttatggcggtatgcgtttcttcgaacgtcaagaaattaaagatgcgttagcctatcttcgtttgattaataatcgtcaagatgatgcggcttttgagcgtgtaattaatacgccaacccgtggcattggcgaccgcactttagatatattgcgtaacttaacacgcgaacgccaaattaccttatggcaagcagtacaagtcgcaacacaagaaaatatgttggcagggcgagcctcaacagccttattacgtttccaagaattaattaattcactacaacttgataccgcagaaatgccgcttttcgcacaaactgattttgtgattaaacattcgggcttatatgaaatgtatcaacaagaaaaaggcgaaaaaggcgaagtgcgtattgaaaacttggaagaattagttaccgcaacccgtgaatttatcaaacctgataatgcggaagaaatgaccgaactcactgcctttttaacgcacgcttccttagaagctggcgaagaacaagcctcgccgcatcaatcttgtgtagaaatgatgacgttgcactctgcgaaaggcttagaatttcctcgtgtatttatggtgggcgtagaagaaggattattcccaagttttcgttcttttgaagaacccggacgtttagaagaagagcgtcgtttagcttatgtcggtattactcgcgcgaagaaaaaactgaccatctcttatgcggaaagccgtcgattatatgccaaagaagaacgccatttgccatcacggtttatcgcagaattaccgagagaatgtatccaagaaattcgtttacgagggacagtcactcgtgcgatgaacctagcaaaagtcggttcattgtcgaataccagtgcggtcgaaaatgaatggaaaatgggtcaaaaagttaaacacgaaaaatttggtttcggcacagtgattaatgtggaaggttctgaaaataacacacgtttacaaatagcattccaagcgcaaggcattaaatggttgattgcgcatttggcaaaattggaaaaagtgcggtag

SEQ ID NO: 44180 - protein, 727 aa, Haemophilus influenzae
MMDISELLDGLNDKQRERVAAPLGNHLVLAGAGSGKTRVLTHRIAWLIAVENISEGSIMAVTFTNKAAAEMRHRIQSTLAKHAQHQLFGMWIGTFHSIAHRLLRAHHLDVGLPQDFQILDSEDQLRLIKRLLKLHNFDEKAFPPKQACWYINNKKDEGLRPNDIEDFNDRQEREWIKIYQIYQDTCDRAGLVDFAELLIRVYELFEKKPLILQRYQQRFQHILVDEFQDTNKIQYKWIKILAGKTGQVMIVGDDDQSIYGWRGAQIENIQKFLKDFKAETIRLEQNYRSTANILNSANELIANNSDRLGKNLWTEGEKGDPVGIYSAFNELDEAKFVASQIQDWVEHGGKLDDCAVLYRSNSQSRVIEEALIRCQIPYRIYGGMRFFERQEIKDALAYLRLINNRQDDAAFERVINTPTRGIGDRTLDILRNLTRERQITLWQAVQVATQENMLAGRASTALLRFQELINSLQLDTAEMPLFAQTDFVIKHSGLYEMYQQEKGEKGEVRIENLEELVTATREFIKPDNAEEMTELTAFLTHASLEAGEEQASPHQSCVEMMTLHSAKGLEFPRVFMVGVEEGLFPSFRSFEEPGRLEEERRLAYVGITRAKKKLTISYAESRRLYAKEERHLPSRFIAELPRECIQEIRLRGTVTRAMNLAKVGSLSNTSAVENEWKMGQKVKHEKFGFGTVINVEGSENNTRLQIAFQAQGIKWLIAHLAKLEKVR

SEQ ID NO: 44181 - DNA, 2163 bp, Salmonella typhimurium
  CDS (1)..(2163): transl_table=11
atggacgtttcttacctgctcgacagccttaatgataaacagcgcgaagcggtggccgcgccacgtagcaacatgctggtgctggcgggcgcgggaagcgggaaaacccgcgtgctggtgcaccgtatcgcctggttactgagcgtagaaaacaactcgccatattccatcatggcggtgacctttaccaataaagcggcggcggaaatgcgccatcgtattggccagttgatggggaccagccagggcggaatgtgggtagggacgttccacggtctggcgcaccgcctgctgcgcgcgcatcatatggacgctaatttgccgcaggatttccagattctcgacagcgaagatcagatgcgtttgcttaaacgcctgattaaggcgatgaatcttgatgagaagcagtggccgccgcgtcaggcgatgtggtacatcaatagccagaaagacgaagggctacgcccgcaccatatccaaagctatggcaacccggtggagcagacctggcagaaggtgtatcaggcctatcaggaagcgtgcgatcgcgctggtctggtggattttgccgagctactgctgcgcgctcatgaactatggctgaacaagccgcacatcctgcaacactatcgcgagcggtttactaacatcctggtggacgaattccaggataccaacaacattcagtacgcctgggttcgtctgctggcgggcgataccggtaaggtgatgattgtcggcgacgatgaccagtcgatctacggctggcgcggggcccaggtagagaacatccagcgcttcctcaatgatttccccggcgcgcagaccattcgtctggagcagaattaccgctcgaccagcaacatccttagcgcggcgaacgctctgattgagaataacaatgggcgtttgggtaaaaagctgtggactgacggcgttgacggcgaaccgatatcgctgtactgcgctttcaacgaactggatgaagcgcgctttgtggttaaccgtatcaaaacctggcaggacaacggcggcgcgcttgcgcaatgcgccattctttatcgcagcaacgcccagtcgcgcgtgctggaagaagcgttattacaggccagtatgccgtaccgcatttacggcggtatgcgcttcttcgaacgccaggagatcaaagatgcgctctcttatctgcgtttgattgccaatcgcaacgatgatgccgcctttgaacgcgtggtgaataccccaacgcgcggtatcggcgaccgcacgctggacgtggtgcgccagacctcgcgcgatcgccagctaacattgtggcaggtgtgccgtgaattgttacaggaaaaagccctggccgggcgtgcggccagcgcgctgcaacgctttatggaactgatcgacgccctggcgcaggaaaccgccgacatgccgctgcatgtgcagactgaccgggtgatcaaagattccggcctgcgcaccatgtatgagcaagaaaaaggcgagaaaggccagacgcgcatcgaaaacttagaggaactggtgacggcaacgcggcagttcagctacaacgacgaagatgaagatttgatgccgttgcaggccttcctctctcacgcggcgctggaagcgggcgaggggcaggcggatacctggcaggatgcggtacagctgatgacgctgcactcggccaaaggcctggagtttccgcaggtgtttatcgtcgggatggaagaggggatgttccccagccagatgtcgctggatgagggcgggcgtttggaagaggagcgtcgtctggcctacgtcggcgttacccgtgccatgcagaaactgacgctaacctatgccgaaactcgccgtctgtatggtaaagaggtttatcatcgcccgtcgcgtttcatcggcgagttgccggaggagtgcgtggaagaggtccgtctgcgcgccaccgtcagtcgtccggtgagccatcaacgaatgggaacgccgctggcggaaaacgacacaggctacaaactcggccaacgcgtgcgccatgcgaagttcggcgagggaactattgtcaacctggagggcagcggcgagcatagccggttgcaggtggcttttcaggggcaagggatcaaatggctggttgccgcgtatgcgaagctggaaacggtttga

SEQ ID NO: 44182 - protein, 720 aa, Salmonella typhimurium
MDVSYLLDSLNDKQREAVAAPRSNMLVLAGAGSGKTRVLVHRIAWLLSVENNSPYSIMAVTFTNKAAAEMRHRIGQLMGTSQGGMWVGTFHGLAHRLLRAHHMDANLPQDFQILDSEDQMRLLKRLIKAMNLDEKQWPPRQAMWYINSQKDEGLRPHHIQSYGNPVEQTWQKVYQAYQEACDRAGLVDFAELLLRAHELWLNKPHILQHYRERFTNILVDEFQDTNNIQYAWVRLLAGDTGKVMIVGDDDQSIYGWRGAQVENIQRFLNDFPGAQTIRLEQNYRSTSNILSAANALIENNNGRLGKKLWTDGVDGEPISLYCAFNELDEARFVVNRIKTWQDNGGALAQCAILYRSNAQSRVLEEALLQASMPYRIYGGMRFFERQEIKDALSYLRLIANRNDDAAFERVVNTPTRGIGDRTLDVVRQTSRDRQLTLWQVCRELLQEKALAGRAASALQRFMELIDALAQETADMPLHVQTDRVIKDSGLRTMYEQEKGEKGQTRIENLEELVTATRQFSYNDEDEDLMPLQAFLSHAALEAGEGQADTWQDAVQLMTLHSAKGLEFPQVFIVGMEEGMFPSQMSLDEGGRLEEERRLAYVGVTRAMQKLTLTYAETRRLYGKEVYHRPSRFIGELPEECVEEVRLRATVSRPVSHQRMGTPLAENDTGYKLGQRVRHAKFGEGTIVNLEGSGEHSRLQVAFQGQGIKWLVAAYAKLETV

SEQ ID NO: 44183 - DNA, 23 bp, Artificial sequence
  primer
atggacgtttcttacctgctcga

SEQ ID NO: 44184 - DNA, 19 bp, Artificial sequence
  primer
ttacaccgactccagccgg

SEQ ID NO: 44185 - protein, 1208 aa, Artificial sequence
  consensus sequence
  Variant (3)..(4): Xaa in position 3 to 4 is any amino acid
  Variant (6)..(7): Xaa in position 6 to 7 is any amino acid
  Variant (10)..(16): Xaa in position 10 to 16 is any amino acid
  Variant (17)..(17): Xaa in position 17 is any or no amino acid
  Variant (19)..(20): Xaa in position 19 to 20 is any amino acid
  Variant (30)..(30): Xaa in position 30 is any amino acid
  Variant (32)..(33): Xaa in position 32 to 33 is any amino acid
  Variant (35)..(35): Xaa in position 35 is any amino acid
  Variant (37)..(37): Xaa in position 37 is any amino acid
  Variant (39)..(47): Xaa in position 39 to 47 is any amino acid
  Variant (48)..(54): Xaa in position 48 to 54 is any or no amino acid
  Variant (62)..(62): Xaa in position 62 is any amino acid
  Variant (65)..(66): Xaa in position 65 to 66 is any amino acid
  Variant (68)..(79): Xaa in position 68 to 79 is any amino acid
  Variant (80)..(111): Xaa in position 80 to 111 is any or no amino acid
  Variant (115)..(120): Xaa in position 115 to 120 is any amino acid
  Variant (123)..(127): Xaa in position 123 to 127 is any amino acid
  Variant (128)..(139): Xaa in position 128 to 139 is any or no amino acid
  Variant (141)..(141): Xaa in position 141 is any amino acid
  Variant (143)..(143): Xaa in position 143 is any amino acid
  Variant (145)..(146): Xaa in position 145 to 146 is any amino acid
  Variant (148)..(148): Xaa in position 148 is any amino acid
  Variant (149)..(152): Xaa in position 149 to 152 is any or no amino acid
  Variant (154)..(167): Xaa in position 154 to 167 is any amino acid
  Variant (168)..(186): Xaa in position 168 to 186 is any or no amino acid
  Variant (188)..(189): Xaa in position 188 to 189 is any amino acid
  Variant (190)..(190): Xaa in position 190 is any or no amino acid
  Variant (192)..(207): Xaa in position 192 to 207 is any amino acid
  Variant (208)..(230): Xaa in position 208 to 230 is any or no amino acid
  Variant (232)..(233): Xaa in position 232 to 233 is any amino acid
  Variant (235)..(244): Xaa in position 235 to 244 is any amino acid
  Variant (245)..(246): Xaa in position 245 to 246 is any or no amino acid
  Variant (249)..(250): Xaa in position 249 to 250 is any amino acid
  Variant (252)..(257): Xaa in position 252 to 257 is any amino acid
  Variant (259)..(267): Xaa in position 259 to 267 is any amino acid
  Variant (268)..(273): Xaa in position 268 to 273 is any or no amino acid
  Variant (275)..(277): Xaa in position 275 to 277 is any amino acid
  Variant (282)..(282): Xaa in position 282 is any amino acid
  Variant (287)..(288): Xaa in position 287 to 288 is any amino acid
  Variant (291)..(295): Xaa in position 291 to 295 is any amino acid
  Variant (297)..(304): Xaa in position 297 to 304 is any amino acid
  Variant (305)..(332): Xaa in position 305 to 332 is any or no amino acid
  Variant (336)..(336): Xaa in position 336 is any amino acid
  Variant (342)..(343): Xaa in position 342 to 343 is any amino acid
  Variant (347)..(349): Xaa in position 347 to 349 is any amino acid
  Variant (351)..(364): Xaa in position 351 to 364 is any amino acid
  Variant (365)..(373): Xaa in position 365 to 373 is any or no amino acid
  Variant (376)..(376): Xaa in position 376 is any amino acid
  Variant (381)..(383): Xaa in position 381 to 383 is any amino acid
  Variant (386)..(387): Xaa in position 386 to 387 is any amino acid
  Variant (390)..(391): Xaa in position 390 to 391 is any amino acid
  Variant (393)..(394): Xaa in position 393 to 394 is any amino acid
  Variant (396)..(397): Xaa in position 396 to 397 is any amino acid
  Variant (398)..(399): Xaa in position 398 to 399 is any or no amino acid
  Variant (401)..(402): Xaa in position 401 to 402 is any amino acid
  Variant (404)..(404): Xaa in position 404 is any amino acid
  Variant (406)..(411): Xaa in position 406 to 411 is any amino acid
  Variant (412)..(418): Xaa in position 412 to 418 is any or no amino acid
  Variant (420)..(432): Xaa in position 420 to 432 is any amino acid
  Variant (434)..(437): Xaa in position 434 to 437 is any amino acid
  Variant (439)..(455): Xaa in position 439 to 455 is any amino acid
  Variant (456)..(463): Xaa in position 456 to 463 is any or no amino acid
  Variant (465)..(465): Xaa in position 465 is any amino acid
  Variant (469)..(469): Xaa in position 469 is any amino acid
  Variant (471)..(471): Xaa in position 471 is any amino acid
  Variant (475)..(476): Xaa in position 475 to 476 is any amino acid
  Variant (478)..(486): Xaa in position 478 to 486 is any amino acid
  Variant (488)..(490): Xaa in position 488 to 490 is any amino acid
  Variant (493)..(494): Xaa in position 493 to 494 is any amino acid
  Variant (496)..(497): Xaa in position 496 to 497 is any amino acid
  Variant (499)..(499): Xaa in position 499 is any amino acid
  Variant (502)..(506): Xaa in position 502 to 506 is any amino acid
  Variant (510)..(515): Xaa in position 510 to 515 is any amino acid
  Variant (517)..(520): Xaa in position 517 to 520 is any amino acid
  Variant (521)..(529): Xaa in position 521 to 529 is any or no amino acid
  Variant (531)..(532): Xaa in position 531 to 532 is any amino acid
  Variant (534)..(534): Xaa in position 534 is any amino acid
  Variant (536)..(536): Xaa in position 536 is any amino acid
  Variant (541)..(553): Xaa in position 541 to 553 is any amino acid
  Variant (554)..(612): Xaa in position 554 to 612 is any or no amino acid
  Variant (614)..(650): Xaa in position 614 to 650 is any amino acid
  Variant (651)..(802): Xaa in position 651 to 802 is any or no amino acid
  Variant (804)..(805): Xaa in position 804 to 805 is any amino acid
  Variant (807)..(808): Xaa in position 807 to 808 is any amino acid
  Variant (811)..(813): Xaa in position 811 to 813 is any amino acid
  Variant (814)..(873): Xaa in position 814 to 873 is any or no amino acid
  Variant (875)..(876): Xaa in position 875 to 876 is any amino acid
  Variant (879)..(882): Xaa in position 879 to 882 is any amino acid
  Variant (884)..(893): Xaa in position 884 to 893 is any amino acid
  Variant (894)..(910): Xaa in position 894 to 910 is any or no amino acid
  Variant (912)..(913): Xaa in position 912 to 913 is any amino acid
  Variant (916)..(916): Xaa in position 916 is any amino acid
  Variant (918)..(918): Xaa in position 918 is any amino acid
  Variant (925)..(926): Xaa in position 925 to 926 is any amino acid
  Variant (929)..(930): Xaa in position 929 to 930 is any amino acid
  Variant (932)..(932): Xaa in position 932 is any amino acid
  Variant (934)..(934): Xaa in position 934 is any amino acid
  Variant (936)..(936): Xaa in position 936 is any amino acid
  Variant (939)..(946): Xaa in position 939 to 946 is any amino acid
  Variant (947)..(979): Xaa in position 947 to 979 is any or no amino acid
  Variant (985)..(985): Xaa in position 985 is any amino acid
  Variant (988)..(989): Xaa in position 988 to 989 is any amino acid
  Variant (993)..(995): Xaa in position 993 to 995 is any amino acid
  Variant (997)..(1000): Xaa in position 997 to 1000 is any amino acid
  Variant (1001)..(1003): Xaa in position 1001 to 1003 is any or no amino acid
  Variant (1005)..(1006): Xaa in position 1005 to 1006 is any amino acid
  Variant (1007)..(1007): Xaa in position 1007 is any or no amino acid
  Variant (1009)..(1012): Xaa in position 1009 to 1012 is any amino acid
  Variant (1013)..(1017): Xaa in position 1013 to 1017 is any or no amino acid
  Variant (1019)..(1019): Xaa in position 1019 is any amino acid
  Variant (1021)..(1022): Xaa in position 1021 to 1022 is any amino acid
  Variant (1024)..(1024): Xaa in position 1024 is any amino acid
  Variant (1026)..(1026): Xaa in position 1026 is any amino acid
  Variant (1027)..(1178): Xaa in position 1027 to 1178 is any or no amino acid
  Variant (1180)..(1180): Xaa in position 1180 is any amino acid
  Variant (1181)..(1183): Xaa in position 1181 to 1183 is any or no amino acid
  Variant (1185)..(1187): Xaa in position 1185 to 1187 is any amino acid
  Variant (1189)..(1189): Xaa in position 1189 is any amino acid
  Variant (1191)..(1197): Xaa in position 1191 to 1197 is any amino acid
  Variant (1198)..(1207): Xaa in position 1198 to 1207 is any or no amino acid
LNXXQXXAVXXXXXXXXLXXAGAGSGKTRXLXXRXAXLXXXXXXXXXXXXXXXXTFTNKAAXEMXXRXXXXXXXXXXXXXXXXXXXXXXXXXXXXXXXXXXXXXXXXXXXXTFHXXXXXXLRXXXXXXXXXXXXXXXXXFXIXDXXDXXXXXKXXXXXXXXXXXXXXXXXXXXXXXXXXXXXXXXXIXXXKXXXXXXXXXXXXXXXXXXXXXXXXXXXXXXXXXXXXXXXYXXYXXXXXXXXXXXXDFXXLXXXXXXLXXXXXXXXXXXXXXXFXXXLVDEXQDTNXXQYXXXXXLXXXXXXXXXXXXXXXXXXXXXXXXXXXXXXXXXXXXVGDXDQSIYXXRGAXXXNXXXXXXXXXXXXXXXXXXXXXXXLEXNYRSXXXILXXANXXIXXNXXXXRXXKXLXXXXXXXXXXXXXGXXXXXXXXXXXXXEXXXXAXXXXXXXXXXXXXXXXXXXXXXXXXAXLYRXNXQSRXXEXXXXXXXXXYXXXGGXXFXXRXEIXXXXXYLRXXXXXXDXXXXXXXXXXXXXRXXNXPXRGIGXXXXXXXXXXXXXXXXXXXXXXXXXXXXXXXXXXXXXXXXXXXXXXXXXXXXXXXXXXXXXXXXXXXXXXXXFXXXXXXXXXXXXXXXXXXXXXXXXXXXXXXXXXXXXXXXXXXXXXXXXXXXXXXXXXXXXXXXXXXXXXXXXXXXXXXXXXXXXXXXXXXXXXXXXXXXXXXXXXXXXXXXXXXXXXXXXXXXXXXXXXXXXXXXXXXXXXXXXXXXXXXXXXXXXXXXXXXXXXXXXXXXXXXXXXXXXXXXXXXXXXRXXNXXELXXXXXXXXXXXXXXXXXXXXXXXXXXXXXXXXXXXXXXXXXXXXXXXXXXXXXXXXXXXXXXXLXXFLXXXXLXXXXXXXXXXXXXXXXXXXXXXXXXXXVXXMTXHXAKGLEFXXVFXXGXEXGXFPXXXXXXXXXXXXXXXXXXXXXXXXXXXXXXXXXXXXXXXXXEERRLXYVXXTRAXXXLXXXXXXXRXXXGXXXXXXXXXSXFXXEXPXXXXXXXXXXXXXXXXXXXXXXXXXXXXXXXXXXXXXXXXXXXXXXXXXXXXXXXXXXXXXXXXXXXXXXXXXXXXXXXXXXXXXXXXXXXXXXXXXXXXXXXXXXXXXXXXXXXXXXXXXXXXXXXXXXXXXXXXXXXXXXXXXXXXXXXXXGXXXXHXXXGXGXXXXXXXXXXXXXXXXXF

SEQ ID NO: 44186 - protein, 26 aa, Artificial sequence
  protein pattern
  Variant (2)..(2): Xaa in position 2 is Ser or Thr
  Variant (3)..(3): Xaa in position 3 is Ile, Leu, Met or Val
  Variant (5)..(5): Xaa in position 5 is any amino acid
  Variant (6)..(6): Xaa in position 6 is Ala or Ser
  Variant (12)..(12): Xaa in position 12 is any amino acid
  Variant (13)..(13): Xaa in position 13 is any or no amino acid
  Variant (15)..(17): Xaa in position 15 to 17 is any amino acid
  Variant (18)..(18): Xaa in position 18 is any or no amino acid
  Variant (20)..(20): Xaa in position 20 is any amino acid
  Variant (22)..(22): Xaa in position 22 is Asp, Glu, Asn or Gln
  Variant (23)..(23): Xaa in position 23 is Asp, Glu, Gly, Asn or Ser
  Variant (24)..(25): Xaa in position 24 to 25 is any amino acid
MXXHXXKGLEFXXVXXXXGXEXXXXP

SEQ ID NO: 44187 - protein, 20 aa, Artificial sequence
  protein pattern
  Variant (4)..(4): Xaa in position 4 is any or no amino acid
  Variant (6)..(6): Xaa in position 6 is any or no amino acid
  Variant (11)..(11): Xaa in position 11 is any amino acid
  Variant (12)..(12): Xaa in position 12 is Phe or Trp
  Variant (14)..(14): Xaa in position 14 is Gly or Ser
  Variant (16)..(18): Xaa in position 16 to 18 is any amino acid
  Variant (20)..(20): Xaa in position 20 is Ile, Leu or Met
VGDXDXQSIYXXRXAXXXNX

SEQ ID NO: 44188 - protein, 19 aa, Artificial sequence
  protein pattern
  Variant (2)..(3): Xaa in position 2 to 3 is any or no amino acid
  Variant (12)..(12): Xaa in position 12 is any amino acid
  Variant (13)..(13): Xaa in position 13 is Ala, Thr or Val
  Variant (14)..(14): Xaa in position 14 is Ile or Leu
  Variant (15)..(16): Xaa in position 15 to 16 is any amino acid
  Variant (17)..(17): Xaa in position 17 is Lys or Arg
  Variant (18)..(18): Xaa in position 18 is Ile, Leu, Met or Val
  Variant (19)..(19): Xaa in position 19 is Ala, Ile, Leu or Val
LXXAGAGSGKTXXXXXXXX

SEQ ID NO: 44189 - protein, 28 aa, Artificial sequence
  protein pattern
  Variant (2)..(2): Xaa in position 2 is Ile, Leu, Met or Val
  Variant (3)..(3): Xaa in position 3 is Phe, Leu or Met
  Variant (6)..(6): Xaa in position 6 is any amino acid
  Variant (7)..(7): Xaa in position 7 is Asn or Gln
  Variant (8)..(9): Xaa in position 8 to 9 is any amino acid
  Variant (10)..(10): Xaa in position 10 is Ala, Gly, Ser or Thr
  Variant (11)..(13): Xaa in position 11 to 13 is any amino acid
  Variant (14)..(14): Xaa in position 14 is Glu or Gln
  Variant (15)..(23): Xaa in position 15 to 23 is any amino acid
  Variant (24)..(24): Xaa in position 24 is Phe, His or Tyr
  Variant (25)..(25): Xaa in position 25 is any amino acid
  Variant (26)..(26): Xaa in position 26 is Ile, Leu, Met or Val
  Variant (27)..(27): Xaa in position 27 is any amino acid
  Variant (28)..(28): Xaa in position 28 is Ala, Glu, Gly, Asn or Ser
AXXYRXXXXXXXXXXXXXXXXXXXXXXX

SEQ ID NO: 44190 - protein, 16 aa, Artificial sequence
  protein pattern
  Variant (2)..(3): Xaa in position 2 to 3 is any amino acid
  Variant (4)..(4): Xaa in position 4 is Ile, Leu or Val
  Variant (5)..(5): Xaa in position 5 is any amino acid
  Variant (6)..(6): Xaa in position 6 is Ile or Val
  Variant (9)..(9): Xaa in position 9 is Phe or Tyr
  Variant (14)..(15): Xaa in position 14 to 15 is any amino acid
FXXXXXDEXQDTNXXQ

SEQ ID NO: 44191 - protein, 19 aa, Artificial sequence
  protein pattern
  Variant (6)..(6): Xaa in position 6 is any amino acid
  Variant (9)..(9): Xaa in position 9 is Ala or Gly
  Variant (10)..(10): Xaa in position 10 is Ile, Met or Val
  Variant (14)..(16): Xaa in position 14 to 16 is any amino acid
  Variant (18)..(18): Xaa in position 18 is any amino acid
  Variant (19)..(19): Xaa in position 19 is Phe, Ile, Leu, Met or Val
EERRLXYVXXTRAXXXLXX

SEQ ID NO: 44192 - protein, 14 aa, Artificial sequence
  protein pattern
  Variant (8)..(8): Xaa in position 8 is any amino acid
  Variant (11)..(12): Xaa in position 11 to 12 is any amino acid
  Variant (14)..(14): Xaa in position 14 is Ala, Ile, Leu or Val
TFTNKAAXEMXXRX

SEQ ID NO: 44193 - protein, 20 aa, Artificial sequence
  protein pattern
  Variant (3)..(3): Xaa in position 3 is Glu, Gln, Arg or Ser
  Variant (8)..(10): Xaa in position 8 to 10 is any amino acid
  Variant (13)..(13): Xaa in position 13 is any amino acid
  Variant (14)..(14): Xaa in position 14 is any or no amino acid
  Variant (16)..(18): Xaa in position 16 to 18 is any amino acid
  Variant (19)..(19): Xaa in position 19 is any or no amino acid
LEXNYRSXXXILXXAXXXXI

SEQ ID NO: 44194 - protein, 18 aa, Artificial sequence
  protein pattern
  Variant (2)..(2): Xaa in position 2 is any amino acid
  Variant (4)..(4): Xaa in position 4 is Ile or Val
  Variant (5)..(5): Xaa in position 5 is Lys or Arg
  Variant (6)..(6): Xaa in position 6 is any amino acid
  Variant (7)..(7): Xaa in position 7 is Ala, Ile, Leu or Val
  Variant (8)..(8): Xaa in position 8 is Ile, Leu or Met
  Variant (9)..(9): Xaa in position 9 is Ala, Asp, Gly or Ser
  Variant (11)..(12): Xaa in position 11 to 12 is any or no amino acid
  Variant (14)..(17): Xaa in position 14 to 17 is any amino acid
  Variant (18)..(18): Xaa in position 18 is Ala, Asp, Gly, Asn, Gln or Ser
RXEXXXXXXYXXLXXXXX

SEQ ID NO: 44195 - protein, 11 aa, Artificial sequence
  protein pattern
  Variant (2)..(2): Xaa in position 2 is Ile or Val
  Variant (3)..(3): Xaa in position 3 is Ile, Leu or Val
  Variant (5)..(5): Xaa in position 5 is any amino acid
  Variant (7)..(7): Xaa in position 7 is any amino acid
  Variant (10)..(10): Xaa in position 10 is Ile, Leu, Met or Val
RXXNXPXRGXG

SEQ ID NO: 44196 - DNA, 300 bp, Escherichia coli
  CDS (1)..(300): transl_table=11
atgcagtcagggccaatgttgatggaaaacggtgtaattaatccgcgtattcatcccaacgtcgcctcaagcaaaattcgtaacggtgttgggattaataaacatgggaacgccgtgtttttgttgagccagcaggcaacaaatttttatgattttgcctgttatgccaaagcgaaactgaacgttgagcagctgctttatcttgatggcacgatttcacatatgtatatgaaaggcggggcaatcccgtggcaacgctatccttttgtcaccatgatttccgtcgagcggaaaggttaa

SEQ ID NO: 44197 - protein, 99 aa, Escherichia coli
MQSGPMLMENGVINPRIHPNVASSKIRNGVGINKHGNAVFLLSQQATNFYDFACYAKAKLNVEQLLYLDGTISHMYMKGGAIPWQRYPFVTMISVERKG

SEQ ID NO: 44198 - DNA, 765 bp, Escherichia coli O157:H7 EDL933
  CDS (1)..(765): transl_table=11
atggcgcatcggctactcattggtaaaggaatgatcaccttgaatctcaaacggatttttctcgccctcaccttacttcccttgtttgctgttgccgctgatgattgcgcactctcagatccaacgctgaccgtacaggcgtataccgttaatcctcaaacagagcgggtgaaaatgtactggcaaaaagccaatggcgaagcgtggggaactttacatgctctgctggcggatatgaatagtcagggtcaggtgcagatggcgatgaacggcggcatctatgatgaaagctatgcgccgctcggtttgtacatcgaaaacggtcagcagaaggtggcgttaaatctcgcttcaggtgaagggaatttctttatccgtcctggcggcgtgttttatgtcgcgggagataaagtcggcatcgttcgtctggatgccttcaaaaccagtaaagagattcagtttgcggtgcagtcagggccaatgttgatggaaaacagtgtaattaatccgcgtattcatcccaacgtcgcctcacgtaaaattcgtaacggtgttggaattaataaacatgggaatgccgtgtttttgttgagccagcaggcgacaaatttttatgattttgcctgttatgccaaagcgaaactgaacgttgagcagctgctttatcttgatggcacgatttcacatatgtatatgaaaggcggggcaatcccgtggcaacgctatccttttgtcaccatgatttccgtcgagcggaaaggttaa

SEQ ID NO: 44199 - protein, 254 aa, Escherichia coli O157:H7 EDL933
MAHRLLIGKGMITLNLKRIFLALTLLPLFAVAADDCALSDPTLTVQAYTVNPQTERVKMYWQKANGEAWGTLHALLADMNSQGQVQMAMNGGIYDESYAPLGLYIENGQQKVALNLASGEGNFFIRPGGVFYVAGDKVGIVRLDAFKTSKEIQFAVQSGPMLMENSVINPRIHPNVASRKIRNGVGINKHGNAVFLLSQQATNFYDFACYAKAKLNVEQLLYLDGTISHMYMKGGAIPWQRYPFVTMISVERKG

SEQ ID NO: 44200 - DNA, 753 bp, Sinorhizobium meliloti 1021
  CDS (1)..(753): transl_table=11
atgccgctgtttacaagagccttcatcgccggcgccgcccttctatccgccggtctcgctgcacccgcgttcggtgcctgccgcgatgttcgccacctcggcgaaacctacctcgcctgcagcttcgacccggcgacgagcgacatacgactctacaacaaggaccaggcgggcgtgccgttcaggtccttcagagcgctgtcgctcgaacttcgtcgtcgcgaacagtatctcgtcttcgcaatgaacggcggcatgtaccacgaggacctcgctccggtcgggctgcatgtggaggagggcgcggagcaggcgccgctcaatacaaatccgggttggggcaactttcacatgctgccgaacggcgtcttttatgtcggcgacggcaaggccggggtcatggctgcggaggcctatcgccttgccggcatcgagccgcgtttcgcgacgcaatccggtccgatgctcgtcatcgacggtgcgctgcatccccgtttcctgccggatagcgacagcctcaagacccgcaacggcgtcggggtgacgcccaatggccaggtggtcttcgccgtgtcgaaacggccggtgcgctttcacgatttcgcgaccttgtttcgcgacgcgctggattgccccaatgcgctctttctggatggcacgatctcgagcctttatgcgccggagatcaatcggcacgaccggctgtttccgctcggcccgatcatcgctgtcgtcgcgaagtttccgcgctga

SEQ ID NO: 44201 - protein, 250 aa, Sinorhizobium meliloti 1021
MPLFTRAFIAGAALLSAGLAAPAFGACRDVRHLGETYLACSFDPATSDIRLYNKDQAGVPFRSFRALSLELRRREQYLVFAMNGGMYHEDLAPVGLHVEEGAEQAPLNTNPGWGNFHMLPNGVFYVGDGKAGVMAAEAYRLAGIEPRFATQSGPMLVIDGALHPRFLPDSDSLKTRNGVGVTPNGQVVFAVSKRPVRFHDFATLFRDALDCPNALFLDGTISSLYAPEINRHDRLFPLGPIIAVVAKFPR

SEQ ID NO: 44202 - DNA, 765 bp, Agrobacterium tumefaciens str. C58
  CDS (1)..(765): transl_table=11
atgatcgtatcgatgaagaaactggcgcagttgctgctaccattgctattgccgttttcggctgaggccggcgggcagccggatttctgcaagagcatcaaccatgccggcggccgctataccgtctgtagcttcgacccggcaaaaaacaccatccgcatctatgatcaggatcatgtctccggacagggataccggaattttgccgatctatcttcggctttgtggcggcagcacatgttcagcgtcttcgccatgaatggcggcatgtatcattccgactattcgcccgttggcctcttcgtcgaaaatggcgtggagcgttcgccggtcagcacgcggggcggctggggaaatttccaccttctgccgaatggcgtattttatcttgatggtaacactgccggggtgctggagaccgaggcctatctggccgcggacccgaagcccgatttcgccacccagtccgggccgatgcttgtgatcgacggcaagctgcatccgcgcttcctgcccgatagtgacagcctgaaacgccgcaacggcgtcggtgtctcccgcgacggcatggtgcatttcgccatttcggaaacgaccgtccgcttctatgatttcggtacgctgttcagggatgtgctggatgcgccgaatgcgctttatctggacggcacgatatccagcgtcgatattcccgcgatgaaccggcgggaccagctgttttccatggggccgatcatcgccgtcgtcgacagggtgccggattag

SEQ ID NO: 44203 - protein, 254 aa, Agrobacterium tumefaciens str. C58
MIVSMKKLAQLLLPLLLPFSAEAGGQPDFCKSINHAGGRYTVCSFDPAKNTIRIYDQDHVSGQGYRNFADLSSALWRQHMFSVFAMNGGMYHSDYSPVGLFVENGVERSPVSTRGGWGNFHLLPNGVFYLDGNTAGVLETEAYLAADPKPDFATQSGPMLVIDGKLHPRFLPDSDSLKRRNGVGVSRDGMVHFAISETTVRFYDFGTLFRDVLDAPNALYLDGTISSVDIPAMNRRDQLFSMGPIIAVVDRVPD

SEQ ID NO: 44204 - DNA, 300 bp, Shigella flexneri 2a str. 2457T
  CDS (1)..(300): transl_table=11
gtgcagtcaggaccaatgttgatggaaaacggtgtaattaatccgcgtattcatcccaacgtcgcctcacgtaaaattcgtaacggtgttgggattaataaacatgggaatgccgtgtttttgttgagccagcaggcgacaaatttttatgattttgcctgttatgccaaagcgaaactgaacgttgagcagctgctttatcttggtggcacgatttcacatatgtatatgaaaggcggggcaatcccgtggcaacgctatccttttgtcaccatgatttccgtcgagcggaaaggttag

SEQ ID NO: 44205 - protein, 99 aa, Shigella flexneri 2a str. 2457T
MQSGPMLMENGVINPRIHPNVASRKIRNGVGINKHGNAVFLLSQQATNFYDFACYAKAKLNVEQLLYLGGTISHMYMKGGAIPWQRYPFVTMISVERKG

SEQ ID NO: 44206 - DNA, 738 bp, Silicibacter pomeroyi DSS-3
  CDS (1)..(738): transl_table=11
gtgatccgggccgcggccgtccttttcctgctgggtgtcgcggggcaggcggcggcggtagactgccgggatctaacccacgaaggcaatctttataccgtgtgtgaggtggatgcgcgcactgcggatctgcggctgtttctgaacgatgtcgagggcgcgcccttgggccagttctcgaccgtcgatcagacgttacagaccgagggcaagcggctggcctttgccatgaatgcgggcatgtatcacgatgaccgctcgcccgtcggccattatgtcgaggacgggatcgagcagaaacgagtgatcgccaatgccggaccggggaatttcggcctgctgccaaacggggtgttctgcctgcgttcggggcgggcggatgtgatcgagacactcgactatcaggccgcgaagccggattgccgctttgccacccaatcggggccgatgctggtaatcgacggggcgctgcatccgcggtttctgcccgattcgacctcgcgctatatccgcaacggggtcggcaccagcgccgacggcgcgcgggcggtgtttgcgatttcgggaaactcggtgacgttttacgaattcggcaccctgttccgcgatgtgctgaagacgccgaacgcgctctatttcgacggcaatatctcgcgcctctatgcgccttcgctgaaccgcgccgatctgggcttttccatgggtccgatcgtgggtgtcgcggtcgaggaccgctga

SEQ ID NO: 44207 - protein, 245 aa, Silicibacter pomeroyi DSS-3
MIRAAAVLFLLGVAGQAAAVDCRDLTHEGNLYTVCEVDARTADLRLFLNDVEGAPLGQFSTVDQTLQTEGKRLAFAMNAGMYHDDRSPVGHYVEDGIEQKRVIANAGPGNFGLLPNGVFCLRSGRADVIETLDYQAAKPDCRFATQSGPMLVIDGALHPRFLPDSTSRYIRNGVGTSADGARAVFAISGNSVTFYEFGTLFRDVLKTPNALYFDGNISRLYAPSLNRADLGFSMGPIVGVAVEDR

SEQ ID NO: 44208 - DNA, 774 bp, Silicibacter sp. TM1040
  CDS (1)..(774): transl_table=11
atgtggcgcgctctgctgtggggcctgcctcttgggattgtgctttggtcgggacaggcctctgccgtcgagtgccaggacctggcctatgaaggcaatcgctatgccctgtgcgaggtggacgccagccgggaagagcttcgactgttcctgcgcgacgatacgggtgcggtcatggggcatttctctaccatcgaggaccgactcgaagcagaaggcaagacgctggcctttgccaccaacgcaggcatgtatcactctgatcgctcgccggtggggctctatgtggaggacggcagccaggagatgcggttggttacaaaccccggtcctggcaattttgggcttgtgcccaatggcgtcttttgcctgcgtgaggggcgggccgatgtaatcgagaccctcgcctttgaggccagcggcaccacctgcaaaagtgcgacccaatccgggccaatgctggtgatagacggcgagttgcatcctcggttcctcaaggacagcgattcccgctacatccgcaatggcgtcgggaccagcgccgatggccgccgcgtggtctttgcgatttcgcgcaatacagtgaacttccacgattttgcgggcctctttcgcgatcacctccagctgccccaagcgctttattttgatggaaatatctcgcgtttgcatgcgcctgacctgcagcgatcggatgcgggcttcatgatggggccggtggtgggcgtgatcgaagatcgcgacacgaacgaaggcgacacgctacagaattga

SEQ ID NO: 44209 - protein, 257 aa, Silicibacter sp. TM1040
MWRALLWGLPLGIVLWSGQASAVECQDLAYEGNRYALCEVDASREELRLFLRDDTGAVMGHFSTIEDRLEAEGKTLAFATNAGMYHSDRSPVGLYVEDGSQEMRLVTNPGPGNFGLVPNGVFCLREGRADVIETLAFEASGTTCKSATQSGPMLVIDGELHPRFLKDSDSRYIRNGVGTSADGRRVVFAISRNTVNFHDFAGLFRDHLQLPQALYFDGNISRLHAPDLQRSDAGFMMGPVVGVIEDRDTNEGDTLQN

SEQ ID NO: 44210 - DNA, 747 bp, Sulfitobacter sp. EE-36
  CDS (1)..(747): transl_table=11
gtgaaacggttctgggccgcgcttggcttcatgggctgggccgccgcgcccgtccaagccgagacctgcgaaaccctgacctacaacggcaccggctataccctgtgccacgtcgacctgacgcaggaccggcttgagctgttcctttacgatgcggacggcaaaccgcatggatatttcaacacattgaatacggcgttgaaaaagcgcggcgcacagctgggctttgcgatgaacgcgggcatgtatcacgatacccgtgcgccggtgggttactaccttgagaacggcaaagaatatcagcaggtgatcagcagcgacggccccggtaactttggcctgctgcccaacggcgtgctctgcctgcgcgacgggcgtgccgatgtgatcgaaaccaaagcttttctgcgcgacgcccccgactgccgcagcgccacacaatcgggaccgatgttggtgatcgatggcaagatgcatccgcgctttctgaaagatggcacctcgcgctatatccgcaacggcgtcggtaccagcgccgatggcaaacgcgcggtttttgccatctcgaacgagacggtgaatttctatgatttcgcgctgctgttccgggatcacctgaagctgccaaatgcgctttattttgatggcaatatctcgaggatgcgcgcacccgatctgggccgcaatgacttgggctttagcgcgcttggccctatcattggcgtcgtgaagcccgacgcgccgtaa

SEQ ID NO: 44211 - protein, 248 aa, Sulfitobacter sp. EE-36
MKRFWAALGFMGWAAAPVQAETCETLTYNGTGYTLCHVDLTQDRLELFLYDADGKPHGYFNTLNTALKKRGAQLGFAMNAGMYHDTRAPVGYYLENGKEYQQVISSDGPGNFGLLPNGVLCLRDGRADVIETKAFLRDAPDCRSATQSGPMLVIDGKMHPRFLKDGTSRYIRNGVGTSADGKRAVFAISNETVNFYDFALLFRDHLKLPNALYFDGNISRMRAPDLGRNDLGFSALGPIIGVVKPDAP

SEQ ID NO: 44212 - DNA, 717 bp, Roseovarius nubinhibens ISM
  CDS (1)..(717): transl_table=11
gtggcggcgctctggcccgcctctgcccaggcggccgactgccgcgccctgacccatgagggggcggagttcaccatctgcgagatcgacgccggcacagaggtgattcgcctcttccacagcacccccgagggcgaggttctgggcagtttcccgcgcgtcgatcagatgctgcgcgaccggggcgagcggctcggcgtggcgatgaacgcgggcatgtatcacaatgacctcggccccgtcggcctctatgtcgaagagggccagcaggcgatgcggctgatcacctccaagggccccggcaatttcggtctcctgcccaatggcgtgttctgcatccgcgacggccgcgccgatgtgatcgaaagcctcgccttcgaggccgccgcgccggactgccgctatgccacgcaatcggggccgatgctggtgatcgacggggcgctgcatccgcgctttctgcccgacagcgacagcgtgcatgtccgcaacggcgtcggcacctccgccgacgggcagcgcgtggtgctcgccatctcggacgagcgggtgaatttctacacctttggcacgctgtttcgcgatacgctcaagctgcccaatgcgctctatttcgacggcaaggtgtcgcggctctatgcgccgggctccggtcgccatgatcgcggctttcccatggggccgatcgtcggcgtggtcgaagacgcgacagactag

SEQ ID NO: 44213 - protein, 238 aa, Roseovarius nubinhibens ISM
MAALWPASAQAADCRALTHEGAEFTICEIDAGTEVIRLFHSTPEGEVLGSFPRVDQMLRDRGERLGVAMNAGMYHNDLGPVGLYVEEGQQAMRLITSKGPGNFGLLPNGVFCIRDGRADVIESLAFEAAAPDCRYATQSGPMLVIDGALHPRFLPDSDSVHVRNGVGTSADGQRVVLAISDERVNFYTFGTLFRDTLKLPNALYFDGKVSRLYAPGSGRHDRGFPMGPIVGVVEDATD

SEQ ID NO: 44214 - DNA, 840 bp, Erythrobacter sp. NAP1
  CDS (1)..(840): transl_table=11
atgaggcgcgcagcaatcatcgtcgccgccctcgccctctcggcatgcgaacaacaacccgctggcgagccggtcgtgcgagcggagttgagcgaagcggtcgcgggcgaagaactcgccgtgcttgaggaaatcgtgcccgatgcgggcggcgttcccgatgcgaactctgcttgtgtgccggtgacgtttgaggaaacctccctcacccactgcatcgccgatccggcgacccaccgcatccgcacgagcctcgccccatcaagcggcgatgacttcggcacgatccgcgcatgggccgctggccgcaacgaaagcgcgattgcctttgtgatgaatgccgggatgtacggcgacgacctgcgccctctcggctacttcgtcgaggacggtgagcgccttgccgagctcgacagaggcgacggcagcggtaacttctacatgaagcccaatggcgtgttttttggcacgggcggcaactggaatatcatcgaaacaggcgtcttcctgcgcaccatcggcacgcgccccgcattcggcacccaatcaggcccgatgctggtcgtgaatggcgagttgcacccggacttccaggaaaacggcccatcgcgcgccattcgcaatggcgtgggcattgacgaagaaggccgcgctcacttcgtgatttcgaacgaggcaatcagcttcggacgcttcgcccgcttcttccgagacgaattgcagacccccaacgcgctgttcctcgacggcaacatttcctcgctctggaacccggcgtccgggcgcatggacgaccgccgcgtaggaccgcttttggtggtggagaaaattgatgagtaa

SEQ ID NO: 44215 - protein, 279 aa, Erythrobacter sp. NAP1
MRRAAIIVAALALSACEQQPAGEPVVRAELSEAVAGEELAVLEEIVPDAGGVPDANSACVPVTFEETSLTHCIADPATHRIRTSLAPSSGDDFGTIRAWAAGRNESAIAFVMNAGMYGDDLRPLGYFVEDGERLAELDRGDGSGNFYMKPNGVFFGTGGNWNIIETGVFLRTIGTRPAFGTQSGPMLVVNGELHPDFQENGPSRAIRNGVGIDEEGRAHFVISNEAISFGRFARFFRDELQTPNALFLDGNISSLWNPASGRMDDRRVGPLLVVEKIDE

SEQ ID NO: 44216 - DNA, 765 bp, Escherichia coli
  CDS (1)..(765): transl_table=11
atggcgcatcagctactcattggtaaaggaatgatcaccttgaatctcaaacggatttttctcgccctcaccttacttcccttgtttgctgttgccgctgatgattgcgcactctcagatccgacgctgaccgtacaggcgtataccgttaatcctcaaacagagcgggtgaaaatgtactggcaaaaagccaatggcgaagcgtggggaacgttacatgctctgctggcggatattaatagtcagggtcaggtgcagatggcgatgaacggcggcatctatgatgaaagctatgcgccgctcggtttgtacatcgaaaacggtcagcagaaggtggcgttaaatctcgcttcaggtgaagggaatttctttatccgtcctggcggcgtgttttatgtcgcgggagataaagtcggcatcgttcgtctggatgccttcaaaaccagtaaagagattcagtttgcggtgcagtcagggccaatgttgatggaaaacggtgtaattaatccgcgtattcatcccaacgtcgcctcaagcaaaattcgtaacggtgttgggattaataaacatgggaacgccgtgtttttgttgagccagcaggcaacaaatttttatgattttgcctgttatgccaaagcgaaactgaacgttgagcagctgctttatcttgatggcacgatttcacatatgtatatgaaaggcggggcaatcccgtggcaacgctatccttttgtcaccatgatttccgtcgagcggaaaggttaa

SEQ ID NO: 44217 - protein, 254 aa, Escherichia coli
MAHQLLIGKGMITLNLKRIFLALTLLPLFAVAADDCALSDPTLTVQAYTVNPQTERVKMYWQKANGEAWGTLHALLADINSQGQVQMAMNGGIYDESYAPLGLYIENGQQKVALNLASGEGNFFIRPGGVFYVAGDKVGIVRLDAFKTSKEIQFAVQSGPMLMENGVINPRIHPNVASSKIRNGVGINKHGNAVFLLSQQATNFYDFACYAKAKLNVEQLLYLDGTISHMYMKGGAIPWQRYPFVTMISVERKG

SEQ ID NO: 44218 - DNA, 24 bp, Artificial sequence
  primer
atgcagtcagggccaatgttgatg

SEQ ID NO: 44219 - DNA, 23 bp, Artificial sequence
  primer
ttaacctttccgctcgacggaaa

SEQ ID NO: 44220 - protein, 190 aa, Artificial sequence
  consensus sequence
  Variant (2)..(23): Xaa in position 2 to 23 is any amino acid
  Variant (24)..(25): Xaa in position 24 to 25 is any or no amino acid
  Variant (27)..(27): Xaa in position 27 is any amino acid
  Variant (29)..(29): Xaa in position 29 is any amino acid
  Variant (31)..(35): Xaa in position 31 to 35 is any amino acid
  Variant (37)..(37): Xaa in position 37 is any amino acid
  Variant (39)..(41): Xaa in position 39 to 41 is any amino acid
  Variant (43)..(43): Xaa in position 43 is any amino acid
  Variant (45)..(54): Xaa in position 45 to 54 is any amino acid
  Variant (56)..(56): Xaa in position 56 is any amino acid
  Variant (60)..(62): Xaa in position 60 to 62 is any amino acid
  Variant (64)..(64): Xaa in position 64 is any amino acid
  Variant (67)..(67): Xaa in position 67 is any amino acid
  Variant (68)..(94): Xaa in position 68 to 94 is any or no amino acid
  Variant (101)..(103): Xaa in position 101 to 103 is any amino acid
  Variant (105)..(107): Xaa in position 105 to 107 is any amino acid
  Variant (110)..(115): Xaa in position 110 to 115 is any amino acid
  Variant (117)..(119): Xaa in position 117 to 119 is any amino acid
  Variant (125)..(128): Xaa in position 125 to 128 is any amino acid
  Variant (130)..(131): Xaa in position 130 to 131 is any amino acid
  Variant (132)..(132): Xaa in position 132 is any or no amino acid
  Variant (135)..(136): Xaa in position 135 to 136 is any amino acid
  Variant (138)..(142): Xaa in position 138 to 142 is any amino acid
  Variant (144)..(145): Xaa in position 144 to 145 is any amino acid
  Variant (147)..(153): Xaa in position 147 to 153 is any amino acid
  Variant (155)..(159): Xaa in position 155 to 159 is any amino acid
  Variant (162)..(162): Xaa in position 162 is any amino acid
  Variant (165)..(165): Xaa in position 165 is any amino acid
  Variant (168)..(187): Xaa in position 168 to 187 is any amino acid
  Variant (188)..(189): Xaa in position 188 to 189 is any or no amino acid
GXXXXXXXXXXXXXXXXXXXXXXXXNXGXYXXXXXPXGXXXEXGXXXXXXXXXXGXGNFXXXPXGVXXXXXXXXXXXXXXXXXXXXXXXXXXXXQSGPMLXXXGXXXPRXXXXXXSXXXRNGVGXXXXGXXXVFXXSXXXXXFXXFXXXXXXXLXXXXXLYXDGXISXXXXXXXXXXXXXXXXXXXXXXV

SEQ ID NO: 44221 - protein, 37 aa, Artificial sequence
  protein pattern
  Variant (5)..(5): Xaa in position 5 is Met or Val
  Variant (6)..(6): Xaa in position 6 is any amino acid
  Variant (7)..(7): Xaa in position 7 is Asp or Asn
  Variant (9)..(9): Xaa in position 9 is any amino acid
  Variant (10)..(10): Xaa in position 10 is Ile, Leu or Met
  Variant (11)..(11): Xaa in position 11 is any amino acid
  Variant (14)..(14): Xaa in position 14 is Phe or Ile
  Variant (15)..(16): Xaa in position 15 to 16 is any amino acid
  Variant (17)..(17): Xaa in position 17 is Asp or Asn
  Variant (18)..(18): Xaa in position 18 is Gly, Ser or Val
  Variant (19)..(19): Xaa in position 19 is Ala, Asp or Thr
  Variant (21)..(23): Xaa in position 21 to 23 is any amino acid
  Variant (29)..(29): Xaa in position 29 is any amino acid
  Variant (30)..(30): Xaa in position 30 is Asn, Ser or Thr
  Variant (31)..(32): Xaa in position 31 to 32 is any amino acid
  Variant (34)..(34): Xaa in position 34 is any amino acid
  Variant (35)..(36): Xaa in position 35 to 36 is any or no amino acid
GPMLXXXGXXXPRXXXXXXSXXXRNGVGXXXXGXXXV

SEQ ID NO: 44222 - protein, 33 aa, Artificial sequence
  protein pattern
  Variant (2)..(2): Xaa in position 2 is any amino acid
  Variant (3)..(3): Xaa in position 3 is Glu, Asn, Gln or Thr
  Variant (4)..(4): Xaa in position 4 is any amino acid
  Variant (5)..(5): Xaa in position 5 is Thr or Val
  Variant (6)..(6): Xaa in position 6 is any amino acid
  Variant (8)..(8): Xaa in position 8 is His or Tyr
  Variant (9)..(9): Xaa in position 9 is Asp, Glu or Thr
  Variant (11)..(11): Xaa in position 11 is Ala or Gly
  Variant (12)..(14): Xaa in position 12 to 14 is any amino acid
  Variant (15)..(15): Xaa in position 15 is Lys or Arg
  Variant (16)..(16): Xaa in position 16 is Ala or Asp
  Variant (17)..(17): Xaa in position 17 is any amino acid
  Variant (19)..(20): Xaa in position 19 to 20 is any amino acid
  Variant (21)..(21): Xaa in position 21 is Glu or Pro
  Variant (22)..(22): Xaa in position 22 is Asn or Gln
  Variant (23)..(23): Xaa in position 23 is Ala or Leu
  Variant (26)..(26): Xaa in position 26 is Phe or Leu
  Variant (27)..(27): Xaa in position 27 is Asp or Gly
  Variant (29)..(29): Xaa in position 29 is any amino acid
  Variant (30)..(30): Xaa in position 30 is Ile or Val
  Variant (32)..(32): Xaa in position 32 is any amino acid
  Variant (33)..(33): Xaa in position 33 is Leu, Met or Val
SXXXXXFXXFXXXXXXXLXXXXXLYXXGXXSXX

SEQ ID NO: 44223 - DNA, 1143 bp, Escherichia coli
  CDS (1)..(1143): transl_table=11
atgccgcatttggcactactcatctctaaaggagcaattatggaccgcattattcaatcaccgggtaaatacatccagggcgctgatgtgattaatcgtctgggcgaatacctgaagccgctggcagaacgctggttagtggtgggtgacaaatttgttttaggttttgctcaatccactgtcgagaaaagctttaaagatgctggactggtagtagaaattgcgccgtttggcggtgaatgttcgcaaaatgagatcgaccgtctgcgtggcatcgcggagactgcgcagtgtggcgcaattctcgatatcggtggcggaaaaaccctcgatactgccaaagcactggcacatttcatgggtgttccggtagcgatcgcaccgactatcgcctctaccgatgcaccgtgcagcgcattgtctgttatctacaccgatgagggtgagtttgaccgctatctgctgttgccaaataacccgaatatggtcattgtcgacaccaaaatcgtcgctggcgcacctgcacgtctgttagcggcgggtatcggcgatgcgctggcaacctggtttgaagcgcgtgcctgctctcgtagcggcgcgaccaccatggcgggcggcaagtgtacccaggctgcgctggcactggctgaactgtgctacaacaccctgctggaagaaggcgaaaaagcgatgcttgctgccgaacagcatgtagtgactccggcgctggagcgcgtgattgaagcgaacacctatttgagcggtgttggttttgaaagtggtggtctggctgcggcgcacgcagtgcataacggcctgaccgctatcccggacgcgcatcactattatcacggtgaaaaagtggcattcggtacgctgacgcagctggttctggaaaatgcgccggtggaggaaatcgaaaccgtagctgcccttagccatgcggtaggtttgccaataactctcgctcaactggatattaaagaagatgtcccggcgaaaatgcgaattgtggcagaagcggcatgtgcagaaggtgaaaccattcacaacatgcctggcggcgcgacgccagatcaggtttacgccgctctgctggtagccgaccagtacggtcagcgtttcctgcaagagtgggaataa

SEQ ID NO: 44224 - protein, 380 aa, Escherichia coli
MPHLALLISKGAIMDRIIQSPGKYIQGADVINRLGEYLKPLAERWLVVGDKFVLGFAQSTVEKSFKDAGLVVEIAPFGGECSQNEIDRLRGIAETAQCGAILDIGGGKTLDTAKALAHFMGVPVAIAPTIASTDAPCSALSVIYTDEGEFDRYLLLPNNPNMVIVDTKIVAGAPARLLAAGIGDALATWFEARACSRSGATTMAGGKCTQAALALAELCYNTLLEEGEKAMLAAEQHVVTPALERVIEANTYLSGVGFESGGLAAAHAVHNGLTAIPDAHHYYHGEKVAFGTLTQLVLENAPVEEIETVAALSHAVGLPITLAQLDIKEDVPAKMRIVAEAACAEGETIHNMPGGATPDQVYAALLVADQYGQRFLQEWE

SEQ ID NO: 44225 - DNA, 1095 bp, Thermotoga maritima MSB8
  CDS (1)..(1095): transl_table=11
atgataacaaccaccatatttccaggtagatatgttcagggggcaggtgctatcaacattctagaagaagaactttctcgttttggagaaagggcatttgtggtgatcgatgattttgtggacaaaaacgtgctaggagaaaatttcttcagctctttcacaaaagtcagggtaaacaaacagatctttggtggagagtgttcagacgaagagatagagcgactttcaggtcttgttgaagaagaaacagacgtggtggtgggcataggtggcggaaaaacactcgataccgctaaagcggtcgcctataagttgaaaaagcctgttgtgattgttccaactattgcctctacagatgctccatgcagcgccctttccgtgatttacacaccaaacggggaattcaaaagatacctgtttttgccaaggaatccagatgtcgttctggtagacacggagattgtggcgaaagcccccgcgaggtttcttgttgccggaatgggagatgcccttgccacgtggtttgaggcagaatcttgtaaacagaaatacgctccaaatatgacgggaagacttggttcgatgacagcctacgcgctcgcaagactttgctatgagacacttctagaatacggtgtacttgcgaaaaggtcggtggaggaaaagtctgtcacacctgcccttgaaaaaatcgttgaggcgaacacccttttaagtggtctgggattcgaaagtggaggactggcagctgcacatgctattcacaacggtctcaccgttctggaaaatacccacaagtatttacacggggaaaaagtggccataggagttctcgcatcactgtttttgactgacaaacccagaaagatgatcgaagaggtctactccttctgtgaagaagtgggattacccactactctggcagagataggacttgatggtgtttcggacgaggatctgatgaaagtggctgagaaagcctgtgacaagaatgaaacaatacacaacgaaccccaacctgtgacatcaaaggatgtgtttttcgccctaaaagcagcagacaggtacggaaggatgagaaaaaacctcacttga

SEQ ID NO: 44226 - protein, 364 aa, Thermotoga maritima MSB8
MITTTIFPGRYVQGAGAINILEEELSRFGERAFVVIDDFVDKNVLGENFFSSFTKVRVNKQIFGGECSDEEIERLSGLVEEETDVVVGIGGGKTLDTAKAVAYKLKKPVVIVPTIASTDAPCSALSVIYTPNGEFKRYLFLPRNPDVVLVDTEIVAKAPARFLVAGMGDALATWFEAESCKQKYAPNMTGRLGSMTAYALARLCYETLLEYGVLAKRSVEEKSVTPALEKIVEANTLLSGLGFESGGLAAAHAIHNGLTVLENTHKYLHGEKVAIGVLASLFLTDKPRKMIEEVYSFCEEVGLPTTLAEIGLDGVSDEDLMKVAEKACDKNETIHNEPQPVTSKDVFFALKAADRYGRMRKNLT

SEQ ID NO: 44227 - DNA, 1089 bp, Escherichia coli O157:H7 EDL933
  CDS (1)..(1089): transl_table=11
  misc_feature (1008)..(1008): r is g or a
atgcctcacaatcctatccgcgtggtcgtcggcccggctaactacttttcacatccaggaagtttcaatcacctgcacgattttttcactgatgaacaactttctcgcgcggtgtggatctacggcgtacgcgccattgctgcggcgcaaaccaaacttccgccagcgtttggacttccaggggcaaagcatattttgtttcgtggtcattgcagcgaaagcgatgtacagcaactggcggctgagtccggtgacgatcgcagcgtggtgattggcgtcggcggcggcgcactactcgacaccgcgaaagccctcgcccgccgtctcggtctgccatttgttgccgctccaacgatcgccgccacctgcgccgcctggacaccgctctccgtctggtataacgatgccggacaggcgctgcattatgagattttcgacgacgccaattttatggtgctggtggaaccggagattatcctcaatgcgccgcaacaatatctgctggcggggatcggtgatacgctggcgaaatggtatgaagcggtggtgctggctccgcaaccagaaacgttgccgctaaccgtgcgactggggatcaataatgctcaggccattcgcgacgtcttgttaaacagtagcgaacaggcgcttgccgatcagcaaaatcagcagttaacgcaatcattttgcgatgtggtggatgccattattgctggtggtgggatggtcggtggtctgggcgatcgttttacgcgtgtagcggcggcccatgccgtacataacggtctgactgtcctgccacaaaccgagaagtttctccacggcaccaaagtcgcctacggaattctggtgcaaagcgccttgctgggtcaggatgatgtgctggcgcaattaaccggggcgtatcagcgttttcatctgccgactacgctggcggagctggaagtggatatcaataatcaggcggagatcgataaagtgattgcccacaccttgcgcccggtggartccattcattacctgccagtcacgctgacaccagatacgttgcgtgcagcgttcgaaaaagtggaatcgtttaaagcctga

SEQ ID NO: 44228 - protein, 362 aa, Escherichia coli O157:H7 EDL933
MPHNPIRVVVGPANYFSHPGSFNHLHDFFTDEQLSRAVWIYGVRAIAAAQTKLPPAFGLPGAKHILFRGHCSESDVQQLAAESGDDRSVVIGVGGGALLDTAKALARRLGLPFVAAPTIAATCAAWTPLSVWYNDAGQALHYEIFDDANFMVLVEPEIILNAPQQYLLAGIGDTLAKWYEAVVLAPQPETLPLTVRLGINNAQAIRDVLLNSSEQALADQQNQQLTQSFCDVVDAIIAGGGMVGGLGDRFTRVAAAHAVHNGLTVLPQTEKFLHGTKVAYGILVQSALLGQDDVLAQLTGAYQRFHLPTTLAELEVDINNQAEIDKVIAHTLRPVESIHYLPVTLTPDTLRAAFEKVESFKA

SEQ ID NO: 44229 - DNA, 1143 bp, Escherichia coli O157:H7 EDL933
  CDS (1)..(1143): transl_table=11
atgccgcatttggcactactcatctctaaaggagcaattatggaccgcattattcaatcaccgggtaaatacatccagggcgctgatgtgattaatcgtctgggcgaatacctgaagccgctggcagaacgctggttagtggtgggtgacaaatttgttttaggttttgctcaatccactgtcgagaaaagctttaaagatgctggactggtagtagagattgcgccgtttggcggtgaatgttcgcaaaatgagatcgaccgtctgcgtggcatcgcggagactgcgcagtgtggcgcaattctcggtatcggtggcggaaaaaccctcgatacagccaaagcactggcacatttcatgggtgttccggtcgccattgccccgaccattgcttcaaccgacgcaccttgtagcgctctttccgttatctacactgacgaaggtgaatttgaccgctatctgctgctgccaaataacccgaatatggtgattgtcgatactaaaatcgtcgcgggcgcacctgcgcgtctgttagcggcgggtatcggcgatgcgctggcgacctggtttgaagcgcgtgcctgctctcgtagcggtgcgaccaccatggcgggcggcaagtgcactcaggcggcgctggcgctggctgaactgtgctacaacaccttgctggaagaaggcgaaaaagcgatgctcgccgccgaacagcatgtagtgactccggcactggaacgcgtgattgaagcgaacacttatttaagcggtgttggctttgaaagcggtggtctggcggcagcgcacgcggtgcataatggcctgactgccattcctgatgcccatcactattatcacggtgaaaaagtggcatttggtacactgacgcagctggtactggaaaactcgccggttgaggaaatcgaaaccgtagctgcgcttagccatgcggtaggtttgccaataactctcgctcaactggatattaaagaagatgtcccggcgaaaatgcgaattgtggcagaagcggcatgtgcagaaggtgaaaccatccacaacatgcctggcggcgcgacgccagatcaggtttacgccgctctgctggtagccgaccagtacggtcagcgtttcctgcaagagtgggaataa

SEQ ID NO: 44230 - protein, 380 aa, Escherichia coli O157:H7 EDL933
MPHLALLISKGAIMDRIIQSPGKYIQGADVINRLGEYLKPLAERWLVVGDKFVLGFAQSTVEKSFKDAGLVVEIAPFGGECSQNEIDRLRGIAETAQCGAILGIGGGKTLDTAKALAHFMGVPVAIAPTIASTDAPCSALSVIYTDEGEFDRYLLLPNNPNMVIVDTKIVAGAPARLLAAGIGDALATWFEARACSRSGATTMAGGKCTQAALALAELCYNTLLEEGEKAMLAAEQHVVTPALERVIEANTYLSGVGFESGGLAAAHAVHNGLTAIPDAHHYYHGEKVAFGTLTQLVLENSPVEEIETVAALSHAVGLPITLAQLDIKEDVPAKMRIVAEAACAEGETIHNMPGGATPDQVYAALLVADQYGQRFLQEWE

SEQ ID NO: 44231 - DNA, 1089 bp, Streptococcus pneumoniae R6
  CDS (1)..(1089): transl_table=11
atgagaatttttgctagtccttctagatatattcagggggaaaatgccttgtttgaaaatgccaaatcaattttggatttgggaaattaccctattctattatgcgatcagttggtttatgatattgttggaaaacgatttgaagattatctacataggtatggtttccatattgttctggcgctatttaatggtgaagcttctgacaatgaaatcaatcgagttgttgccttggctgagaaagaaaattgtgatagtattatcggtcttggtgggggaaagacgattgatagcgcaaaagctattgcagatttgattgaaaagcctgttattattgctccaacaattgcatcgaccgacgcacctgtatctgctttatctgttatttatacagatgaaggtgcatttgatcattatctattttattctaaaaatccagatttagttttggttgatacaaaagttatttcacaagcccctaagcgtttattagcgtctggtattgcagatggtttagcaacttgggttgaggcgcgtgcggttatgcaggcaaatggaaaaactatgttgggacaacagcaaacattggctggagttgcaattgcgaagaaatgtgaagaaacgctgtttgcagatggtttacaggctatggcagcttgtgaagctaaagtggtgacaccagcattagaaaatattgttgaagctaatactttattgagtggtctaggttttgaaagtggaggattagctgcggcgcatgcaattcataatggttttactgcattgacaggtgacattcatcatttaacacatggtgaaaaagtagcttatggaactttagtacaactattattggaaaatagacctaaagaagaacttgataagtatattgagttttacaaaaaaattggtatgccaacaactctaaaagaaatgcatttggatcaagttggatatgatgatttaataaaagttggtaaacaagcaactatggagggtgagacaattcatcagatgccgtttaagatttcgccttcagatgttgctcaagctattatcgctgtagatgcctatgtaaattcaaaataa

SEQ ID NO: 44232 - protein, 362 aa, Streptococcus pneumoniae R6
MRIFASPSRYIQGENALFENAKSILDLGNYPILLCDQLVYDIVGKRFEDYLHRYGFHIVLALFNGEASDNEINRVVALAEKENCDSIIGLGGGKTIDSAKAIADLIEKPVIIAPTIASTDAPVSALSVIYTDEGAFDHYLFYSKNPDLVLVDTKVISQAPKRLLASGIADGLATWVEARAVMQANGKTMLGQQQTLAGVAIAKKCEETLFADGLQAMAACEAKVVTPALENIVEANTLLSGLGFESGGLAAAHAIHNGFTALTGDIHHLTHGEKVAYGTLVQLLLENRPKEELDKYIEFYKKIGMPTTLKEMHLDQVGYDDLIKVGKQATMEGETIHQMPFKISPSDVAQAIIAVDAYVNSK

SEQ ID NO: 44233 - DNA, 1095 bp, Sinorhizobium meliloti 1021
  CDS (1)..(1095): transl_table=11
atggcacgggcattcggcggtccgaacaaatacatccagcgtgcgggcgagatcgacaagctggcggcctatctggcgccgctcggcaaacgcgcgctcgtcctgatcgaccgcgtgctgttcgacgcactcagcgaacgcatcggcaaaagctgcggcgactcgctcgatatccgcttcgagcggttcggcggagagtgctgcacctcggagatcgagcgcgtacgcaaggtcgcaatcgagcacggcagcgatattctcgtgggcgtgggtgggggcaagacggccgacaccgccaagatcgtcgcaatcgacactggcgcgcgcatcgtcatcgcaccgacgatcgcctcgaccgacgcgccctgcagcgcgattgccgtgcgctacaccgaacatggggtttacgaggaggcgctccgcctgccccgcaacccggacgccgtcgtcgtcgattccgcgctggtggcagccgcgccggcacgcttcctcgtcgcggggatcggcgatgcgctttcgacctggttcgaggcccgctccaatatcgagtcgcgcaccgacaattatgtggccggcggctttcccgctaccgaagccgggatggcgatcgcccggcattgccaggatgtgctgacacgcgatgccgtcaaggcgaagatcgccgtcgaggccggcctgctgaccccagcggtcgaaaacatcatcgaggcgaacacgctgctgtcgggcctcggtttcgagaattgcggctgctcggccgcccatggcatccatgacggcctgacagtgctggaggaggtgcatgggtatttccacggcgagaaggtcgccttcggcacgctttgcctgctgatgctggagaaccgcgaccgagccgagatcgaggcgatgatacgcttctgccgcagcgtcggactgccgaccaaactggcggacctcggcatcgtcgatgacgtccccgccaagatcggccgcgtggcggaagccgcctgccggcccggcaacatcatctatgccacgccggtcaccattaccgtaccggccgtgcgcgacgcgatcctggcgctcgacgccttttcacgcagcatccactga

SEQ ID NO: 44234 - protein, 364 aa, Sinorhizobium meliloti 1021
MARAFGGPNKYIQRAGEIDKLAAYLAPLGKRALVLIDRVLFDALSERIGKSCGDSLDIRFERFGGECCTSEIERVRKVAIEHGSDILVGVGGGKTADTAKIVAIDTGARIVIAPTIASTDAPCSAIAVRYTEHGVYEEALRLPRNPDAVVVDSALVAAAPARFLVAGIGDALSTWFEARSNIESRTDNYVAGGFPATEAGMAIARHCQDVLTRDAVKAKIAVEAGLLTPAVENIIEANTLLSGLGFENCGCSAAHGIHDGLTVLEEVHGYFHGEKVAFGTLCLLMLENRDRAEIEAMIRFCRSVGLPTKLADLGIVDDVPAKIGRVAEAACRPGNIIYATPVTITVPAVRDAILALDAFSRSIH

SEQ ID NO: 44235 - DNA, 1098 bp, Halobacterium sp. NRC-1
  CDS (1)..(1098): transl_table=11
atgacgagcgtattcaaatcgccatcgacgtacgtacagggacgcaacgtgacgaccgacatcggcacgcacgcggaatcactcggtgacacagcattgctagtcgccgacgagatcgtgatggacatgatcgagagcgacgtgcacgaaagcctcgcggaagccggactcgacggctcatcggtcgtgttcaacggggagtcctcggaggacgagatcgagcggatcgcgtccgttgctgtcgacgagggtgccgacatcgttatcggggccggaggcggcaaggccctggacaccgcgaaagcagtccgcgaggaggtcggcggcgcaatggtgtcgatgccgacgatcgcatcgatggacgcgccgacgagttcgctgtcagtgatctacagcgagcacggcgagttcgaggattactggtactacgagcagcacccggacttggtgatcgttgacaccgaagtggtcgctgcagcgccggctcggttcctgcgctcggggatcgcagacgggcttgcaacgtggttcgaggcggacgcagtcgcacagtccggcggcgacaacgaggtcggtgggaaaccaacccgcgcgggacacaagctcgccgagctgtgctatgagacgctccgtgagcacggtgccggcgcgctggacgccgtcgagcacgatgccgtgaccgagagcgtcgacgccgtgatcgaggcgaacacgctgctcagcgggctggggttcgaaagcggcgggctggcggctgcccactccgtgcacaacggcctcacgcagctcgcggaaacgcacgacgcgacccacggtgaaaaggtgaacatcggtacgatcacgcagctcgtgctggaggggcattccgacgcgaggatcgaggagttcatcgagttctcggtcgaactcgggttgcctgtcaccctcggtgagatcgggatcacgaaccctgaacaggtagacctggacgtggtcgcggaggcggcctgtgacgaagccgagacgatccacgacgagccgtttgacgttacaccagcaatggtgcgtgatgcgttgctgaccgccgacgagatggggcggcgggttcgggatcgatag

SEQ ID NO: 44236 - protein, 365 aa, Halobacterium sp. NRC-1
MTSVFKSPSTYVQGRNVTTDIGTHAESLGDTALLVADEIVMDMIESDVHESLAEAGLDGSSVVFNGESSEDEIERIASVAVDEGADIVIGAGGGKALDTAKAVREEVGGAMVSMPTIASMDAPTSSLSVIYSEHGEFEDYWYYEQHPDLVIVDTEVVAAAPARFLRSGIADGLATWFEADAVAQSGGDNEVGGKPTRAGHKLAELCYETLREHGAGALDAVEHDAVTESVDAVIEANTLLSGLGFESGGLAAAHSVHNGLTQLAETHDATHGEKVNIGTITQLVLEGHSDARIEEFIEFSVELGLPVTLGEIGITNPEQVDLDVVAEAACDEAETIHDEPFDVTPAMVRDALLTADEMGRRVRDR

SEQ ID NO: 44237 - DNA, 1092 bp, Yersinia pestis CO92
  CDS (1)..(1092): transl_table=11
atgagcgcgaacgcaattcgggtgcaggtggggcctgccaactatttttcttttccgggcgctatcgacaaactgagcgagttttatcctcaggcggcactggataaggctttgtggatttatggtgagcgtgcattggccgccgcccaggattacctgcccaaggcgtttcacgggccacaggccgtgcgtgctaaattctcaacgcattgtagtcagtctacggtcgctgatttggtcagcgcggcgggcggtgatcggcaggtcgtaattggtatcgggggcggtgcagtcctggataccgccaaagttgtggcccgtcagttgggggtaccgctggtggctatcccgactatcgctgctacctgtgccgcctggaccccgctttcggtctggtataacgaagccgggcaagcgttgaattttgaaattttcaacgatgccaaccatttggtactggtcgagccacgtatcatgttacacgcgccagtggaatatctgctggcggggatcggcgacacactggcgaaatggtatgaggcagtggtccttagcccgcagccagaaaccctatcgctgaccgtccgcttaggcttacaggccgctctggagattcgcaatgtgttgctcaagcagagcgaagcggcattgcaggcggttgctcagggtgaattgacacaagatttccttgatgtggttgatgccattattgccggcggagggatggtcggcgggttaggggagcgctatacccgagttgctgctgcgcatgcggtacacaatggcctgacgttgctgccacaaacggagcacttcttgcatggcaccaaagtggcatacggcatcttggtacaaacggcattgctgggacaagatgaggtgctgcggtcactgattgttgcttttaatcaattaggtttgccaacccatttggcggcgttagatgttgatattaatgaccgggaggcaatagaccgggttattggccggatcctgaaacccggagagtcaatacattacctgccaatcgccctgaattcagaaaaagtatgggcagcgattgagcaagtggaaatcgcggctcagcactga

SEQ ID NO: 44238 - protein, 363 aa, Yersinia pestis CO92
MSANAIRVQVGPANYFSFPGAIDKLSEFYPQAALDKALWIYGERALAAAQDYLPKAFHGPQAVRAKFSTHCSQSTVADLVSAAGGDRQVVIGIGGGAVLDTAKVVARQLGVPLVAIPTIAATCAAWTPLSVWYNEAGQALNFEIFNDANHLVLVEPRIMLHAPVEYLLAGIGDTLAKWYEAVVLSPQPETLSLTVRLGLQAALEIRNVLLKQSEAALQAVAQGELTQDFLDVVDAIIAGGGMVGGLGERYTRVAAAHAVHNGLTLLPQTEHFLHGTKVAYGILVQTALLGQDEVLRSLIVAFNQLGLPTHLAALDVDINDREAIDRVIGRILKPGESIHYLPIALNSEKVWAAIEQVEIAAQH

SEQ ID NO: 44239 - DNA, 1089 bp, Salmonella typhimurium LT2
  CDS (1)..(1089): transl_table=11
atgaaccacactgagatccgcgtcgttaccggcccggcgaattatttttcccatgcaggaagcctcgaaagactgaccgactttttcacgccggaacagctttcccacgccgtttgggtgtacggcgaacgcgcgattgccgccgcccggccttacctgccggaagcgtttgaacgtgctggcgcaaagcatctgccgtttaccggccattgtagcgaacgccatgttgcccaactggcgcacgcctgcaacgacgatcgtcaggtggtgataggcgtcggcggcggcgcgctgctcgataccgccaaagcgctcgcccgccgtctggcgctgccgtttgtcgctatcccgacaatcgcggcaacctgcgccgcctggacaccgctttccgtctggtataacgacgcgggacaggcgttacagttcgaaatttttgatgatgccaattttctggtgctggtcgaaccgcgcattattctgcaggcgcccgatgactatctgttagctggcattggcgatacgctggcgaaatggtatgaagccgttgtgcttgcgccgcagcctgaaacattgccattgaccgtaaggctgggcattaacagcgcgtgcgctattcgcgatctcctgctggacagcagcgaacaagcattagcggataaacagcagcgtcggctgacccaggcattttgcgacgtggtggatgcgattattgctggcggcggtatggtcggcggcctcggggaacgctatacccgtgtcgccgccgcccatgcggtacacaacggtctgaccgtcctgccgcaaacggaaaaattcctgcacggaacgaaagtggcttatggcattctggtgcaaagcgcgctactgggacaagatgacgtgctggcgcaattgattacagcgtaccggcgatttcatctgccggcccggcttagcgaactggacgtggatattcataacaccgccgagatcgatagggtcatcgcgcataccctgcgcccggtcgaatccatccactatttaccggtgacgttaacgccagacaccctgcgtgcggcgtttgaaaaagttgaatttttcagaatatag

SEQ ID NO: 44240 - protein, 362 aa, Salmonella typhimurium LT2
MNHTEIRVVTGPANYFSHAGSLERLTDFFTPEQLSHAVWVYGERAIAAARPYLPEAFERAGAKHLPFTGHCSERHVAQLAHACNDDRQVVIGVGGGALLDTAKALARRLALPFVAIPTIAATCAAWTPLSVWYNDAGQALQFEIFDDANFLVLVEPRIILQAPDDYLLAGIGDTLAKWYEAVVLAPQPETLPLTVRLGINSACAIRDLLLDSSEQALADKQQRRLTQAFCDVVDAIIAGGGMVGGLGERYTRVAAAHAVHNGLTVLPQTEKFLHGTKVAYGILVQSALLGQDDVLAQLITAYRRFHLPARLSELDVDIHNTAEIDRVIAHTLRPVESIHYLPVTLTPDTLRAAFEKVEFFRI

SEQ ID NO: 44241 - DNA, 1110 bp, Salmonella typhimurium LT2
  CDS (1)..(1110): transl_table=11
atggttactaccgcgatctttccgtcacgatatgttcagggtaaaggagcgttgacaacgcatctcccgcaggaattggccgcactcggtcataaggcgctgattttgcaggatcctgttgttcacaacacctaccgggatacagttgcaacagcactgcacggggtgattgaatttgatatcgaagtgttcagtagcgagtgctgtgatgaggaaattgctcgcatctccgcacgcgcgcaggaaattggcgccgatgtgattgttggtatggggggcgggaaaaccctggatacggcaaaagcaaccggcgccagcctgcggctgcctattgccgtggttcctactctggcctcaacggatgcgccgtgcagttcactggttgttatctatacgccagaagggaaattcaaacgctacctgatgattccacgtaacccgacgcttgtgctggtggacagcagtattattgctgccgcgccggtacgctttttggtttccgggataggcgatgcgctggcaacctggtttgaagcggaagattgccgcatcaaaggggccggcaatatgaccaccaggccaggaccgatgaccgcatttgagctggcgcgcttttgctacaccaccttaatgcgctatggacgcctggcgaaacttgcctgtgaacaacatcaggttactccggcgctcgaacatgttatcgaagcgaatacgctattatccgggcttggttttgaaagcggtgggctggcggcggcgcacgccattcataacggtctgacagtactgcccgccacgcacaaatactggcatggggaaaaggttgcgtttggcacgctggcaatgcttatgctcaccgatagagcgcctgagcttatcgaggaggtttatcaattttgtgaagatataggcttgcccaccacgctggcggatattggtctggctggcgttagcgatgatgaactgctggccgttgccagggcgtcttgtcaaactggggaaacgatacacaacgagccgtttaccattacgccggaggctgtgcaggcggcattgcgggccgccgatgctgttgggcaggcgcggaaaaagatcgatcttgcaggttaa

SEQ ID NO: 44242 - protein, 369 aa, Salmonella typhimurium LT2
MVTTAIFPSRYVQGKGALTTHLPQELAALGHKALILQDPVVHNTYRDTVATALHGVIEFDIEVFSSECCDEEIARISARAQEIGADVIVGMGGGKTLDTAKATGASLRLPIAVVPTLASTDAPCSSLVVIYTPEGKFKRYLMIPRNPTLVLVDSSIIAAAPVRFLVSGIGDALATWFEAEDCRIKGAGNMTTRPGPMTAFELARFCYTTLMRYGRLAKLACEQHQVTPALEHVIEANTLLSGLGFESGGLAAAHAIHNGLTVLPATHKYWHGEKVAFGTLAMLMLTDRAPELIEEVYQFCEDIGLPTTLADIGLAGVSDDELLAVARASCQTGETIHNEPFTITPEAVQAALRAADAVGQARKKIDLAG

SEQ ID NO: 44243 - DNA, 1104 bp, Salmonella typhimurium LT2
  CDS (1)..(1104): transl_table=11
atggatcgcattattcagtcaccaggtaagtatattcagggtgcaaacgtcatcgcgcgtcttggcgattatttaaaaccaatggcgaacaactggctggttgtgggcgataaattcgtgctgggatttgccgaagagacgctgcgcaaaagcctgacggatgccggtttgtcagtagaaatcgccccgtttggcggcgaatgttcgcaaaatgagatcgacaggctgcgcgccgtcgccgaaaaaagtcagtgtggcgccgtactgggtatcggcggcggtaaaacgctggataccgccaaagcgctggcgcactttatgaacgtcccggtcgctatcgcgccgaccatcgcctctaccgacgcaccgtgcagcgcactctcggttatttataccgatgccggtgagtttgaccgttatctgctgctgccgcataacccgaatatggttattgtcgatacgcagatagtggcgggcgcgccggcgcgtctgctggcagccggtatcggcgatgcactggcgacctggtttgaagcgcgcgcctgctcacgcagcggcgccaccacaatggcgggcggcaagtgtacacaggccgcgctggcgctggcggagctatgctataacacgctgatcgaagaaggcgaaaaagccatgttggccgccgaacagcacgtcgtcacgccagcgctggaacgcgtcatcgaagccaacacctacctgagcggggtcggttttgaaagcggcggtctggccgcagcgcacgcgattcataacggtttaacggcgattccggatgcgcaccactattatcacggtgagaaggtcgctttcggtacgctgacgcaactggtgctggaaaacgcgccggtcgaagaaatcgaaaccgttgcggcgctgtgccattccgttggcctgccgattacgctggcgcaactggatattaaacaggatattccggccaagatgcgcaccgtcgcggaagcctcctgcgcagaaggtgaaactattcataacatgcctggcggcgcaacgccggatgaagtgtacgccgcgctgctggtcgccgaccagtacggtcaacgcttcttgcaggaatgggaataa

SEQ ID NO: 44244 - protein, 367 aa, Salmonella typhimurium LT2
MDRIIQSPGKYIQGANVIARLGDYLKPMANNWLVVGDKFVLGFAEETLRKSLTDAGLSVEIAPFGGECSQNEIDRLRAVAEKSQCGAVLGIGGGKTLDTAKALAHFMNVPVAIAPTIASTDAPCSALSVIYTDAGEFDRYLLLPHNPNMVIVDTQIVAGAPARLLAAGIGDALATWFEARACSRSGATTMAGGKCTQAALALAELCYNTLIEEGEKAMLAAEQHVVTPALERVIEANTYLSGVGFESGGLAAAHAIHNGLTAIPDAHHYYHGEKVAFGTLTQLVLENAPVEEIETVAALCHSVGLPITLAQLDIKQDIPAKMRTVAEASCAEGETIHNMPGGATPDEVYAALLVADQYGQRFLQEWE

SEQ ID NO: 44245 - DNA, 1191 bp, Nostoc sp. PCC 7120
  CDS (1)..(1191): transl_table=11
atgcctaatcaattatctaatcaaaccttgtctaatcaaactgctagttcattaatcaccctcgcggttgccccggcaaaagttatccgtggctgtaatatattgcaggtagccgccacagaaattgccaaattgggcagtcgtcctttaattgtggcaggtaatagcaccgttgctatcagccaagagaaactacagccaattttagaagcccagaatctgcacgttgcccaagcctcttatggtgcagattgtgcggaagttagcttaaaagccttgaggaaagcagccaaagaacataaagccgatacgattatcgggattggtgggggcaaagctttagatacagcaaagttagttgcccatcagttagatatacctatagtcacaattcccacatcggcagctacctgtgccgcttggacggcgctatcaaatgtatattctgaggacggggcgtttctttacgatgtggctttatctcgctgtcccgacttgctgatacttgactacgacttgatccaaactgcaccacaacatacactagtggcagggattggggatgcgatcgctaaatggtatgaagcttctgttagtagtgggcatttagaacaaactttaattatctccgcagtccaacaagcgcgagttttacgcgatattttattccaaaagtcggcaattgccttacaacaaccaggtagtgaagcttggcgggaagttgttgatgccacagttttactagctggtgtcatcggtggactcggtggggcgcagtgccgtacagtagccgcccatgcagtccataatggtttaacccacattgccggacacagtagtatccacggtgaaaaagttgcctacggtattttggtacagctgcgtctggaagaaatggtacaaggtaatcaattagcagccgcctcacgacaacaactattaaagttttatgcagagattggactgccacaaaaattaggagacttggggttgggtaatattaccttaggcgagttacaaacagccgccgaaatcgctttaacacctcaatctgacattcatcgtctaccattcaaagttgtgttggaacagttaatggcagcgatggtttctaccactgcaccaacagatagtagagactcagttcatcgtgtctccaccaggggaataagtgacgaggttgaggaatga

SEQ ID NO: 44246 - protein, 396 aa, Nostoc sp. PCC 7120
MPNQLSNQTLSNQTASSLITLAVAPAKVIRGCNILQVAATEIAKLGSRPLIVAGNSTVAISQEKLQPILEAQNLHVAQASYGADCAEVSLKALRKAAKEHKADTIIGIGGGKALDTAKLVAHQLDIPIVTIPTSAATCAAWTALSNVYSEDGAFLYDVALSRCPDLLILDYDLIQTAPQHTLVAGIGDAIAKWYEASVSSGHLEQTLIISAVQQARVLRDILFQKSAIALQQPGSEAWREVVDATVLLAGVIGGLGGAQCRTVAAHAVHNGLTHIAGHSSIHGEKVAYGILVQLRLEEMVQGNQLAAASRQQLLKFYAEIGLPQKLGDLGLGNITLGELQTAAEIALTPQSDIHRLPFKVVLEQLMAAMVSTTAPTDSRDSVHRVSTRGISDEVEE

SEQ ID NO: 44247 - DNA, 1131 bp, Clostridium perfringens str. 13
  CDS (1)..(1131): transl_table=11
atgagaaaggcttttatatgcccaacaaaatatgttcaaggagaaaatgaattacttaatttaggttactttgtagagacttacggaaagtcagcacttttaatagctcacccagaagatataaagagagttaaagataaattagatgcaacagcaaagaaatttaacattgaatttgtagaaggtggatttaaaggtgaatgttcacgtcaagaagttaaaagacttcaagatcttgcaaaggaaatgaaatgtgattgtacagtaggacttggtggaggaaaagctttagacacagctaaatgtgttgctgaaggtgaaaaacttatagtagtaccaacaatagcagctacagatgctccaactagtcactcagcagttttatatacagaagatggatcatttgatgattatgcatactttaaagcaagcccaagtgttgttttagtagacacagaggtaatagcaaaagctccaactcgtttcttagtagcaggtatgggagatgctttatcaacttactttgaagcaagagcaacatcaagttcatttactaaagtcaatgcgggattaccatgtggggtaagagaagaaaaatgtagaccagcaatcggaacaaatgcttcattagcacttgctaagctttgctatgaaacattattagaagacggaaagaaagctaaagatgcttgtgattgtaactgtgttactaaatctttagaaaatatagtagaaacaaacatattattatcaggtttaggatttgagagtggtggattagctgcagctcacgctatacatgatggtttaacaatattagaaggaacacatggatacttccatggagaaaaggttgcttttggaataatagctcaattagttcttgaaaatgcaccaaaagaagaattatatgaagttttagatttctgtttagaaataggtcttccagtatgtcttgaagatataggtgtaacagaagtttcagatgaagaattatttgaagttgcagaaaaagcttgtataccagaagagtcaatttactcaatgccatttggaatagaagtttcagaagtagtatcagcaattaaattagcagataagataggtaaagactacaaaaatagaaaataa

SEQ ID NO: 44248 - protein, 376 aa, Clostridium perfringens str. 13
MRKAFICPTKYVQGENELLNLGYFVETYGKSALLIAHPEDIKRVKDKLDATAKKFNIEFVEGGFKGECSRQEVKRLQDLAKEMKCDCTVGLGGGKALDTAKCVAEGEKLIVVPTIAATDAPTSHSAVLYTEDGSFDDYAYFKASPSVVLVDTEVIAKAPTRFLVAGMGDALSTYFEARATSSSFTKVNAGLPCGVREEKCRPAIGTNASLALAKLCYETLLEDGKKAKDACDCNCVTKSLENIVETNILLSGLGFESGGLAAAHAIHDGLTILEGTHGYFHGEKVAFGIIAQLVLENAPKEELYEVLDFCLEIGLPVCLEDIGVTEVSDEELFEVAEKACIPEESIYSMPFGIEVSEVVSAIKLADKIGKDYKNRK

SEQ ID NO: 44249 - DNA, 1353 bp, Schizosaccharomyces pombe 972h-
  CDS (1)..(1353)
atgattggtcctcgtctttgcgctgcaacccctcgcttccctctcgtttccctcgcccacaggaactctaaagtatttgcgctcgcctcttccaatgccgttgcacaacgttggggcaaacgcttttatgctcctattgaaacggagacgcctcacaaagttggtgtagagtttgaagaatccaaagatcgcattttcacctctcctcaaaagtatgttcagggtcgtcatgccttcactagatcctatatgtatgtcaaaaaatgggccactaaatcagctgtcgtgcttgccgaccagaacgtatggaacatttgtgccaataaaattgtcgattctctttctcaaaacggaatgactgtcaccaaactggtctttggcggcgaggcaagcttggtggaactggataaacttcgcaaacagtgccctgatgatactcaagtcatcattggagttggtggtggtaaaaccatggattccgcaaagtatattgctcattccatgaatcttccatccatcatttgtcctactactgcctcctctgatgccgctacttcctctctttccgtcatttacactcctgacggtcaattccaaaaatacagcttttacccccttaatcccaacctcattttcatcgataccgatgtgattgttcgcgctcccgtccgcttccttattagtggcattggtgatgctttgtccacctgggtggaaactgaatccgttattcgctcaaattccacttcctttgccggaggtgtggcctccattgctggccgttacattgcccgtgcttgcaaagacactcttgaaaagtatgccctgagcgctattctttccaacactcgcggtgtttgtaccgaggcatttgagaacgtggtcgaggccaacacattgatgtctggtctaggctttgaaaacggtggtcttgctgctgctcatgccatccataacggtatgaccgccatccacggtcccgttcatcgtttaatgcatggtgaaaaggttgcttacggtaccttagttcaagttgttttggaggattggccgttggaagacttcaataatcttgcttcttttatggcaaaatgtcatcttcccattacccttgaggaacttggtattcccaacgtaaccgatgaagagttattgatggtaggtagagctactttgcgacctgatgagagtattcacaacatgtcaaagaagttcaatccatctcaaattgctgacgctattaaagccgttgactcctattcacaaaaatggcaagaacaaactggatggaccgagcgttttagattacccccttctcgtcatagtcctcacttgaccgacattcatccatag

SEQ ID NO: 44250 - protein, 450 aa, Schizosaccharomyces pombe 972h-
MIGPRLCAATPRFPLVSLAHRNSKVFALASSNAVAQRWGKRFYAPIETETPHKVGVEFEESKDRIFTSPQKYVQGRHAFTRSYMYVKKWATKSAVVLADQNVWNICANKIVDSLSQNGMTVTKLVFGGEASLVELDKLRKQCPDDTQVIIGVGGGKTMDSAKYIAHSMNLPSIICPTTASSDAATSSLSVIYTPDGQFQKYSFYPLNPNLIFIDTDVIVRAPVRFLISGIGDALSTWVETESVIRSNSTSFAGGVASIAGRYIARACKDTLEKYALSAILSNTRGVCTEAFENVVEANTLMSGLGFENGGLAAAHAIHNGMTAIHGPVHRLMHGEKVAYGTLVQVVLEDWPLEDFNNLASFMAKCHLPITLEELGIPNVTDEELLMVGRATLRPDESIHNMSKKFNPSQIADAIKAVDSYSQKWQEQTGWTERFRLPPSRHSPHLTDIHP

SEQ ID NO: 44251 - DNA, 1155 bp, Yersinia pestis KIM
  CDS (1)..(1155): transl_table=11
atggggaaaaacggggtcacatcgcaagctgtgaagcacactgatttggaaggaataaagggcatgagcgcgaacgcaattcgggtgcaggtggggcctgccaactatttttcttttccgggcgctatcgacaaactgagcgagttttatcctcaggcggcactggataaggctttgtggatttatggtgagcgtgcattggccgccgcccaggattacctgcccaaggcgtttcacgggccacaggccgtgcgtgctaaattctcaacgcattgtagtcagtctacggtcgctgatttggtcagcgcggcgggcggtgatcggcaggtcgtaattggtatcgggggcggtgcagtcctggataccgccaaagttgtggcccgtcagttgggggtaccgctggtggctatcccgactatcgctgctacctgtgccgcctggaccccgctttcggtctggtataacgaagccgggcaagcgttgaattttgaaattttcaacgatgccaaccatttggtactggtcgagccacgtatcatgttacacgcgccagtggaatatctgctggcggggatcggcgacacactggcgaaatggtatgaggcagtggtccttagcccgcagccagaaaccctatcgctgaccgtccgcttaggcttacaggccgctctggagattcgcaatgtgttgctcaagcagagcgaagcggcattgcaggcggttgctcagggtgaattgacacaagatttccttgatgtggttgatgccattattgccggcggagggatggtcggcgggttaggggagcgctatacccgagttgctgctgcgcatgcggtacacaatggcctgacgttgctgccacaaacggagcacttcttgcatggcaccaaagtggcatacggcatcttggtacaaacggcattgctgggacaagatgaggtgctgcggtcactgattgttgcttttaatcaattaggtttgccaacccatttggcggcgttagatgttgatattaatgaccgggaggcaatagaccgggttattggccggatcctgaaacccggagagtcaatacattacctgccaatcgccctgaattcagaaaaagtatgggcagcgattgagcaagtggaaatcgcggctcagcactga

SEQ ID NO: 44252 - protein, 384 aa, Yersinia pestis KIM
MGKNGVTSQAVKHTDLEGIKGMSANAIRVQVGPANYFSFPGAIDKLSEFYPQAALDKALWIYGERALAAAQDYLPKAFHGPQAVRAKFSTHCSQSTVADLVSAAGGDRQVVIGIGGGAVLDTAKVVARQLGVPLVAIPTIAATCAAWTPLSVWYNEAGQALNFEIFNDANHLVLVEPRIMLHAPVEYLLAGIGDTLAKWYEAVVLSPQPETLSLTVRLGLQAALEIRNVLLKQSEAALQAVAQGELTQDFLDVVDAIIAGGGMVGGLGERYTRVAAAHAVHNGLTLLPQTEHFLHGTKVAYGILVQTALLGQDEVLRSLIVAFNQLGLPTHLAALDVDINDREAIDRVIGRILKPGESIHYLPIALNSEKVWAAIEQVEIAAQH

SEQ ID NO: 44253 - DNA, 1149 bp, Thermosynechococcus elongatus BP-1
  CDS (1)..(1149): transl_table=11
gtgagaacttccttcagtttgtttgtacctgtgactgctgctttttcatccctttgcatcgcccctgcccacgtctatcgcggttggtcaattctctcccaagcaggggaagccattgcgcaattggggcatcatccccttttagtggtttcaccacagcggtatcagcagcttgagcaggagtggcaggcgatcgcccgctcccatgaccttagcttcaccgtagggacattccatggtgagtgcagtgagtccacccttgcccaactccgccaagaggcccaaggcagcgatctcatcatcggcattggcggtggcaaagcgctagataccgctaagctcttggggcaccagcttcacttgcccgtggtgaccatccccacctcagcagccacctgtgccgcttggaccgccctcgccaatatctatacagaggccggtgcttttgcctatgatgtggcactccgccagtgtccgaatctgctgttgttggactacgccctgattcaaacagcgccgaagcgaaccctgcttgccggcattggggatgccctggccaagtggtatgaggcgtcggtcagtagtggccaccgccaagaaaccctgattgtcgctgctgtacagcaagctcgtgtattgcgcgatattctcctacagcagtctgccgaagccttagccaatgtgggcagtcccgcctgggaaaatgtggttgatgccagtgtgctgatggcaggaatcatcggtggattggggggggcccaatgccgcacggtagcagcccatgctattcacaacggtctgacccaactgccccaaagtaagggcacactccacggtgaaaaagtggcctacggtattcttgttcaactccgtttggaagagatggtccaaggcagtcaactggccacgagtgctcgccatcagctttgccagttttatgaacaggtgggtctgcccctgagtttagaggatttgggcttgcaagaggctagcttggcgcaactccaacacgctgctacggttgcctgtgggcccaactccgatattcactatctgccctttccggtcacacccgatctggtgctcgaggcaatggtgtccaccgtggtcggctacagggacaaagtcttggatgggagtgctcgctag

SEQ ID NO: 44254 - protein, 382 aa, Thermosynechococcus elongatus BP-1
MRTSFSLFVPVTAAFSSLCIAPAHVYRGWSILSQAGEAIAQLGHHPLLVVSPQRYQQLEQEWQAIARSHDLSFTVGTFHGECSESTLAQLRQEAQGSDLIIGIGGGKALDTAKLLGHQLHLPVVTIPTSAATCAAWTALANIYTEAGAFAYDVALRQCPNLLLLDYALIQTAPKRTLLAGIGDALAKWYEASVSSGHRQETLIVAAVQQARVLRDILLQQSAEALANVGSPAWENVVDASVLMAGIIGGLGGAQCRTVAAHAIHNGLTQLPQSKGTLHGEKVAYGILVQLRLEEMVQGSQLATSARHQLCQFYEQVGLPLSLEDLGLQEASLAQLQHAATVACGPNSDIHYLPFPVTPDLVLEAMVSTVVGYRDKVLDGSAR

SEQ ID NO: 44255 - DNA, 1110 bp, Oceanobacillus iheyensis HTE831
  CDS (1)..(1110): transl_table=11
ttgagtgaacgaatttttataagtccagcaaaatatgtacaaggaaagaatgcaatccaacgaattggcgaatacgttaaagatattggtaatcaagcaattgttattgcagatgaaaatgtatgggaaatagcagcgaatgacgttgtaaagaatttaaaagaagagagtattgaagtagaagaagtagtatttaacggagaagcttccaaagctgagatggagcgaatttctaagattgcagatgaatctaattctactgtagttgtaggggttggtggtggtaaaacactagataccgcaaaagctgtttctgatgaagtaaaaggtcagacggtgattgtaccaacaacagcttcaacagatgctccaactagtgcgctttctgtagtttattccgatgatggtgtgtttgaagggtatcgtttttatgataaaaacccagacttagtaattgtagatacaaaaattgttgcaggagctcctaaacgtttcttagcatcaggaattgctgatgcattagccacttgggtagaagcacggagtgtgattgaaaataaaggtaaaacaatggctggtggaataaccacgatagcaggacaagctattgcagaaaaatgtgaagaaacgctatttaactatgcggaattggcatatgaatcagtgaaagcaaaagcagtaacacctgctctagagaatgttgttgaagcaaatacattattaagtggacttggatttgaaagtggtggactaggtgcagcacatgcgatccataatggttttactgccttagaaggtgaaattcatcacttaactcatggtgagaaagttgcttttggtaccttagttcaattggcattagaggagcgctcaaaagaagaaatcgaacgatatattaaattatatatcgcattagaccttccagtaacattagaagatatcaagctgaaagatgcaactcgtgaagatattatgaaagttgcagaagcagcgactgttgatgaagaaacaattcatgaagcatttaatgttactgcggatgatgttgcagatgctatctatgctgcagatcaatactctagatcgtataaagaaaaacatcagaagtaa

SEQ ID NO: 44256 - protein, 369 aa, Oceanobacillus iheyensis HTE831
MSERIFISPAKYVQGKNAIQRIGEYVKDIGNQAIVIADENVWEIAANDVVKNLKEESIEVEEVVFNGEASKAEMERISKIADESNSTVVVGVGGGKTLDTAKAVSDEVKGQTVIVPTTASTDAPTSALSVVYSDDGVFEGYRFYDKNPDLVIVDTKIVAGAPKRFLASGIADALATWVEARSVIENKGKTMAGGITTIAGQAIAEKCEETLFNYAELAYESVKAKAVTPALENVVEANTLLSGLGFESGGLGAAHAIHNGFTALEGEIHHLTHGEKVAFGTLVQLALEERSKEEIERYIKLYIALDLPVTLEDIKLKDATREDIMKVAEAATVDEETIHEAFNVTADDVADAIYAADQYSRSYKEKHQK

SEQ ID NO: 44257 - DNA, 1134 bp, Oceanobacillus iheyensis HTE831
  CDS (1)..(1134): transl_table=11
atgtccacatcgattgtaaaaggagctccgggtcattatcggattggcgcggatgtcttggaggaaattcctgtactgcttgaagaactgtcagttaatcgtatacaagttatcgcagggaagagatcatggcaggcggcaaagccgtatttgccttttgtattagtgaagcaagtagaagcgaatatcatctttattgacggtcataccacgctagaaaaagcggataaaatagcggatcagcttcaccaacatgcgattgatgccgtaattggtataggtggcgggactgcactggatataacgaaagccgcagctgctaaagcagaggttaaatcggttttaattccgacaattgctgcgacctgtgctgcatggacaccgcttagtgtcttttacgacagtaatggagcatttacacactatacgtattttccattagcgacgacacttgtattagtagagccggcgattattgcgcatgctcctatcgaatacttacgagcggggattggtgatacgctggcaaaattttatgaagccgacgcattaatcgagagtttttacccgaatgaagaagtgcctgttcccgtgaaagtttcccaattctccgctagtatttgtcgagatgtattgctggaagacggaaaagcagcactcgatgccgtccgggataaacaagtgacaccggcattaatccgtgttatcgaggcgattattataacaggcggaatggtaggcggatttggcgataaggcagggcgaattgccggggcacattcactacataatggattaacggaagccagcgaggctcaacacttcttgcacggggagcttgtggcatacggcatccttggtcaattggcattcgaacaaaaagaagaagagcttttgcgattactcgatttttatgatcaatggcagttgccatctagtttacaggagatcggtattgatataactaatactgatctcgtcgaaaggattattcagaaagcaattctgccgcaagagtcgatacattttatgaaccgggaagtgacggcggaatctttagcaagtgcgttacagcaagtagagaaaaataatcaaatctattacaaggaaaaaagaggagagaaaacatcatga

SEQ ID NO: 44258 - protein, 377 aa, Oceanobacillus iheyensis HTE831
MSTSIVKGAPGHYRIGADVLEEIPVLLEELSVNRIQVIAGKRSWQAAKPYLPFVLVKQVEANIIFIDGHTTLEKADKIADQLHQHAIDAVIGIGGGTALDITKAAAAKAEVKSVLIPTIAATCAAWTPLSVFYDSNGAFTHYTYFPLATTLVLVEPAIIAHAPIEYLRAGIGDTLAKFYEADALIESFYPNEEVPVPVKVSQFSASICRDVLLEDGKAALDAVRDKQVTPALIRVIEAIIITGGMVGGFGDKAGRIAGAHSLHNGLTEASEAQHFLHGELVAYGILGQLAFEQKEEELLRLLDFYDQWQLPSSLQEIGIDITNTDLVERIIQKAILPQESIHFMNREVTAESLASALQQVEKNNQIYYKEKRGEKTS

SEQ ID NO: 44259 - DNA, 1095 bp, Streptococcus mutans UA159
  CDS (1)..(1095): transl_table=11
atgatgaaaatttttgccagcccatcacgttatattcagggtgaaaaagctttatttgaaaatgcaaaagctattattaatttgggttctcatcctatccttttaacagacaatgtcgtttatgatattgttggtaaacgtttcgaaacttatcttaaccaagaaggattgatagtagatcgtatagcctttaatggtgaagcttcaataaacgaaattgatcgcgttgttgctatagctaaagaaaagggaaatgatttaattattggtcttggtgggggaaagacgattgacagtgctaaagccattgctgatttattagagatacctgttattattgctcctacagttgcctcgacagatgctccaacatcagccttgtccgtcatttatactgaccaaggtgcttttgaaaaatacattttctattccaaaaatccagatcttgttttagtagatactgaagtcatcagtaaatctccagttattctactggcttcgggaattgcagatggacttgctacttgggtagaagcaagagctgtgcttcaaaaaaatgggcaaacaatgactggtgcagggcaaactttagctagccttgctattgcccaagcctgtgagcgtactttatttgcagatggtctacaagcgctggcagcttgtgaagcaaaagtagtgacaagagcacttgaaaatgttatagaggctaataccttattaagtggtttagggtttgaaagtgcaggtttggccgcagctcacgctattcataacggttttacagccttaacgggagatattcatcatctgacacatggtcaaaaagttacttatggaaccttaacgcaactctttcttgaaaatcgtccaaaagaagaaattgataagtatattcatttttatagagcaattggcatgccaacgactttagaagaaatgcacttgggagatgctgactattctgaacttctaaagattggccaacaagctacaattgaaggcgaaacgattcatcaaatgccatttgaaattaaggcaggtgatgttgccaatgcactcttagcagtagatcagtacactagatcattaaaataa

SEQ ID NO: 44260 - protein, 364 aa, Streptococcus mutans UA159
MMKIFASPSRYIQGEKALFENAKAIINLGSHPILLTDNVVYDIVGKRFETYLNQEGLIVDRIAFNGEASINEIDRVVAIAKEKGNDLIIGLGGGKTIDSAKAIADLLEIPVIIAPTVASTDAPTSALSVIYTDQGAFEKYIFYSKNPDLVLVDTEVISKSPVILLASGIADGLATWVEARAVLQKNGQTMTGAGQTLASLAIAQACERTLFADGLQALAACEAKVVTRALENVIEANTLLSGLGFESAGLAAAHAIHNGFTALTGDIHHLTHGQKVTYGTLTQLFLENRPKEEIDKYIHFYRAIGMPTTLEEMHLGDADYSELLKIGQQATIEGETIHQMPFEIKAGDVANALLAVDQYTRSLK

SEQ ID NO: 44261 - DNA, 1089 bp, Streptococcus agalactiae NEM316
  CDS (1)..(1089): transl_table=11
atgaaagttttcgcaagtccatcgcgctatatacaaggaaaggatgctttattccaaagtattgaacatatcaaatctttaggtcagactccacttatcctttgtgatgatgttgtttataatatcgttggagaaaggtttttatcttatctacaagacgatttgttaccacatcgtgtttcctttaacggagaagcatctgataatgaaatcaatcgtgtcgttgctgttgcgaaagaaaagaatagtgaccttattattggacttggtggtggaaaaactattgactctgcaaaggcaattgcagataaagttaatttaccagtggtcattgcaccaacagtagcttcaacagatgccccaacatcagcgttatcagtaatctatacagatgaaggagcttttgaaaaatatattttttattcaaagaatccagacttagttttagttgatactcaagtaattgcccaagcgccaaaacgtttactagcttctgggatagcagatggcttagctacttgggttgaagcgagagcagtcttacaaaaaaatgggatagcgatggctggcggtagacagactttagcgggcgtggcaattgcccaagcatgtgagcgtactttatttaatgatagtttacaagctttagcggcttgtgatgccaaagtggttacaaaagctttagaaaatgttattgaagctaataccttacttagtggtttaggttttgaaagtgcaggattagctgcagctcatgctattcataatggttttactgccttgagtggagatattcatcacttaacccatggtgaaaaagttgcctatggaacgttgacgcaacttttcctcgaaaatagaccaaaggaagaaattgatcgctacattaatctttaccaagcgattggaatgccaactacacttgcagaactccatttgggtgatgcaacatatgaagaacttttaaaagttggtcagcaagcaacaattgaaggtgaaacaatacatgaaatgccattcaaaattagtgcagaggatgtcgctgcagccctgttaacggttgaccgttatgtttcaaatcatcaataa

SEQ ID NO: 44262 - protein, 362 aa, Streptococcus agalactiae NEM316
MKVFASPSRYIQGKDALFQSIEHIKSLGQTPLILCDDVVYNIVGERFLSYLQDDLLPHRVSFNGEASDNEINRVVAVAKEKNSDLIIGLGGGKTIDSAKAIADKVNLPVVIAPTVASTDAPTSALSVIYTDEGAFEKYIFYSKNPDLVLVDTQVIAQAPKRLLASGIADGLATWVEARAVLQKNGIAMAGGRQTLAGVAIAQACERTLFNDSLQALAACDAKVVTKALENVIEANTLLSGLGFESAGLAAAHAIHNGFTALSGDIHHLTHGEKVAYGTLTQLFLENRPKEEIDRYINLYQAIGMPTTLAELHLGDATYEELLKVGQQATIEGETIHEMPFKISAEDVAAALLTVDRYVSNHQ

SEQ ID NO: 44263 - DNA, 1143 bp, Escherichia coli CFT073
  CDS (1)..(1143): transl_table=11
atgccgcatttggcactactcatctctaaaggagtaattatggaccgcattattcaatcaccaggtaaatacatccagggcgcagatgtaattaatcgtctgggcgagtacctgaagccactggcggaacgctggttagtggtgggtgacaaatttgttttaggttttgctcaatccactgtcgagaaaagctttaaagatgctggactggtagtagaaattgcgccgtttggcggtgaatgttcgcaaaatgagatcgaccgtctgcgtggcatcgcggagactgcgcagtgtggcgcaattctcggtatcggtggcggaaaaaccctcgatactgccaaagcactggcacatttcatgggtgttccggtagcgatcgcaccgactatcgcttctaccgacgcaccgtgcagcgcattgtctgttatctacaccgatgagggtgagtttgaccgctatctgctgttgccaaataacccgaatatggtcattgtcgacaccaaaatcgtcgctggtgcacctgcacgtctgttagcggcgggtatcggcgatgcgctggcaacctggtttgaagcgcgtgcctgttcccgtagcggcgcgaccaccatggcgggtggcaagtgcactcaggcagcgctggcactggctgaactgtgctacaacaccctgctggaagaaggcgaaaaagcgatgcttgccgccgaacagcatgtagtgactccagcgctggagcgcgtgattgaagcgaacacctatttgagtggcgttggttttgaaagcggcgggctggcggcggcacacgcggtacataacggcctgaccgctatcccggacgcgcatcactattatcatggtgaaaaagtggcattcggtacgctgacgcagctggttctggaaaacgcgccggtggaggaaatcgaaaccgtagctgcgcttagccatgcggtaggtttgccaataactctcgctcaactggatattaaagaagatgtcccggcgaaaatgcgaattgtggcagaagcggcatgtgcagaaggtgaaaccatccacaacatgcctggcggcgcgacgccagatcaggtttacgccgcactgctggtagccgaccagtatggtcagcgtttcctgcaagagtgggaataa

SEQ ID NO: 44264 - protein, 380 aa, Escherichia coli CFT073
MPHLALLISKGVIMDRIIQSPGKYIQGADVINRLGEYLKPLAERWLVVGDKFVLGFAQSTVEKSFKDAGLVVEIAPFGGECSQNEIDRLRGIAETAQCGAILGIGGGKTLDTAKALAHFMGVPVAIAPTIASTDAPCSALSVIYTDEGEFDRYLLLPNNPNMVIVDTKIVAGAPARLLAAGIGDALATWFEARACSRSGATTMAGGKCTQAALALAELCYNTLLEEGEKAMLAAEQHVVTPALERVIEANTYLSGVGFESGGLAAAHAVHNGLTAIPDAHHYYHGEKVAFGTLTQLVLENAPVEEIETVAALSHAVGLPITLAQLDIKEDVPAKMRIVAEAACAEGETIHNMPGGATPDQVYAALLVADQYGQRFLQEWE

SEQ ID NO: 44265 - DNA, 1101 bp, Clostridium tetani E88
  CDS (1)..(1101): transl_table=11
atgttaaaagttatgagaacaccttctagatacgtacaaggatcagattctattttagatatttatactcatacttcatttcttggagattcatatttcataatagcagataatatagttatggaaatgacaaaaggtaaaatagaaaaagcttttgaaaacaagaattgtaacattgtatttgaaaactttaatggtcaatgtacaagaaaagaaattaatagattactggataaaataaaagaaaataattgcactataatagttggcgtaggtggtggaagaactctagatactgctaaggctataggacattttggaaacttacctattgttattattccaacagttgcggcaacagatgcaccttgtacagctctttctgttctatacacagaagaaggaaattttgaagaatatcttttttatgaaaaaaatccagacgtagttcttgttgacaccacagtaattgcaaaagcaccagtaaggtttatgatagcaggtatgggcgatgcacttgctacatattttgaagcaagagcttgtttaaattctaattcattaaaccttgtaagtggatcaatttcattggctgcatattcactttcaaaactttgttatgaaacacttttagattatggttataaagctaaattatctgtagaagacaaagttgtaactccatcagtggaaaagataattgaagctacaacttatttaagtggtgtaggagctgaaaatggtggtcttgctgcagcccattcggtatataatgcctttacacttcttgaagaatgcgaaaaatatatgcatggagaaattgttgcctttggtaccttagttcaacttgttcttgaagatagtccaatggaggaaataaatgaggttgcttcattctgcgtaactgttaatcttcctttaactttagctgaaataggaattaatgaaattaacgaagaaaaattaatgaaagttgccaaagctgcctgtgcaccaggggaaactattcataatatgcttggaggtgtaaccccggaacaactatataatgctattttggtagctaataaattagggcttcaatataaaaatttatgttaa

SEQ ID NO: 44266 - protein, 366 aa, Clostridium tetani E88
MLKVMRTPSRYVQGSDSILDIYTHTSFLGDSYFIIADNIVMEMTKGKIEKAFENKNCNIVFENFNGQCTRKEINRLLDKIKENNCTIIVGVGGGRTLDTAKAIGHFGNLPIVIIPTVAATDAPCTALSVLYTEEGNFEEYLFYEKNPDVVLVDTTVIAKAPVRFMIAGMGDALATYFEARACLNSNSLNLVSGSISLAAYSLSKLCYETLLDYGYKAKLSVEDKVVTPSVEKIIEATTYLSGVGAENGGLAAAHSVYNAFTLLEECEKYMHGEIVAFGTLVQLVLEDSPMEEINEVASFCVTVNLPLTLAEIGINEINEEKLMKVAKAACAPGETIHNMLGGVTPEQLYNAILVANKLGLQYKNLC

SEQ ID NO: 44267 - DNA, 1083 bp, Vibrio parahaemolyticus RIMD 2210633
  CDS (1)..(1083): transl_table=11
atggacaaaattattatcagcccaagcaaatacgtccaaggtgaacaagtacttacatctatcgctcactatgtgaaaacattgggtgaacgtccgttagtaattgccgatgagttcgtgactaacctggttggtgatgacgtcaaacaaagttttgctgacgaaaagcttccactcactatgaacatttttggtggcgaatgttcgcgcattgagattgaacgcatcacggacatttgtgccactcaaaaacacgatgtcattgtcggtattggtggcggtaaaacgttagatacagcaaaggccgttgcgttttacaccaaaattcctgtcgtggtggttcctacgattgcctcgactgatgcgccaacctctgctcttgcggtgatatacacaccagaaggtgaatttgcggaatacttgatgatccctaaaaacccagacatggtcatcatggatacatcagtcatcgccaaagcccctgttcgcctactggtatcggggatgggtgacgcgctttccacctactttgaagccagagccaacatgacctctggtaaggcaacaatggctggtggtttagcgacacgttcagcgcaagctcttgcgaaactttgctatgaaaccttgcttgaagatggtttaaaagcaaaagctgcggtagaaaatggtgtgagcaccaaagcggtagaaaatattattgaagccaatacatacctaagcggtatcggttttgaaagcagtggcctggcaggtgctcacgctattcataacggcctaactaagcttgaagagtgtcatcatctctatcatggtgagaaagtcgcgttcggcacacttgttcaattggtgctagaaaacgcagcgatggaagagattaatacggttctcgccttctgccgctctgtaggtctaccaaccaacttatttgatatgggcgttaaagagcttaatcacgctaagttgcgcgaggtcgccgaagcttcaacggccgagggagaaaccatccacaatatgccattcccagtgacggcagaaaatgtctactctgctattctaaccgctcatcaactgggccaataa

SEQ ID NO: 44268 - protein, 360 aa, Vibrio parahaemolyticus RIMD 2210633
MDKIIISPSKYVQGEQVLTSIAHYVKTLGERPLVIADEFVTNLVGDDVKQSFADEKLPLTMNIFGGECSRIEIERITDICATQKHDVIVGIGGGKTLDTAKAVAFYTKIPVVVVPTIASTDAPTSALAVIYTPEGEFAEYLMIPKNPDMVIMDTSVIAKAPVRLLVSGMGDALSTYFEARANMTSGKATMAGGLATRSAQALAKLCYETLLEDGLKAKAAVENGVSTKAVENIIEANTYLSGIGFESSGLAGAHAIHNGLTKLEECHHLYHGEKVAFGTLVQLVLENAAMEEINTVLAFCRSVGLPTNLFDMGVKELNHAKLREVAEASTAEGETIHNMPFPVTAENVYSAILTAHQLGQ

SEQ ID NO: 44269 - DNA, 1089 bp, Streptococcus pyogenes SSI-1
  CDS (1)..(1089): transl_table=11
atgaaagtatttgcaagtccatctcgttacattcaaggtaaaaatgccttgtttaccaatgctaaaaccctaaaacaactaggggatagccccattttactgtgtgatgacgtggtgtatggcatcgtcggagaaagatttgaaagctatttgatagataatggcatgactcctgttcacgtagcctttaatggcgaagcctcagataatgaaatcagccgcgtggttgccattgccaaggaaaatggcaatgatgttattattggacttggtggtggaaaaaccattgacagtgctaaggctatcgctgacttacttgctgttccggtgattattgccccaaccattgcttcaacagatgccccaacctcagccttatcagttatttacaccgatgaaggagcctttgaaaaatacattttctattcaaaaaatccagatcttgttttggttgacacacaagtgatctgtcaggcaccaaaacgcttattggcgtcagggattgcagatgggttagcaacatgggtagaagcgcgtgctgttatgcaaaaaaatggagacaccatggcaggtggcaatcaaaccttggcaggagttgccattgccaaagcctgtgagcagaccttgtttgcagatggcctaaaagcgatggctagctgtgacagacaagtcgtgaccccggccttggaaaatgtcattgaagccaatacacttcttagtgggcttggttttgaaagtgcgggtctggctgctgcacatgccattcacaatggttttacagcactgacaggtgctattcatcaccttactcatggtgaaaaagtcgcctatggcacgttgacccaactcttcttggaaaatcgttcgcgtgaagaaattgaccgctacatcgacttttaccaagccattggcatgccaacaaccctcaaagaaatgcatttagacacggctactcaagaggatttcttaaaaattggccgtcaagcaaccatggcaggcgaaaccatccatcaaatgccatttgttatcagtccagaagatgtagcagcggctttggttgctgttgatgcctatgttacgagtcgatag

SEQ ID NO: 44270 - protein, 362 aa, Streptococcus pyogenes SSI-1
MKVFASPSRYIQGKNALFTNAKTLKQLGDSPILLCDDVVYGIVGERFESYLIDNGMTPVHVAFNGEASDNEISRVVAIAKENGNDVIIGLGGGKTIDSAKAIADLLAVPVIIAPTIASTDAPTSALSVIYTDEGAFEKYIFYSKNPDLVLVDTQVICQAPKRLLASGIADGLATWVEARAVMQKNGDTMAGGNQTLAGVAIAKACEQTLFADGLKAMASCDRQVVTPALENVIEANTLLSGLGFESAGLAAAHAIHNGFTALTGAIHHLTHGEKVAYGTLTQLFLENRSREEIDRYIDFYQAIGMPTTLKEMHLDTATQEDFLKIGRQATMAGETIHQMPFVISPEDVAAALVAVDAYVTSR

SEQ ID NO: 44271 - DNA, 1089 bp, Salmonella enterica subsp. enterica serovar Typhi Ty2
  CDS (1)..(1089): transl_table=11
atgaaccacactgagatccgcgtcgttaccggcccggcgaattatttttcccatgcaggaagcctcgaaagactgaccgactttttcacgccggaacagctttcccacgctgtttgggtgtacggcgaacgcgcgattgccgccgcccggccttacctgccggaagcgtttgaacgtgctggcgcaaaacatctgcagtttaccggccattgtagcgaacgccatgttgcccaactggcgcacgcctgcaacgacgatcgtcaggtggtaataggcgtcggcggcggcgcgctgctcgataccgccaaagcgcacgcccgccgtctggcgctgccgtttgtcgctatcccgacgatcgcggcgacctgcgccgcctggacaccgctttccgtctggtataacgacgcgggacaggcgttacagttcgaaatttttgatgatgccaattttctggtgctggtcgaaccgcgcattattctgcaggcgcccgatgactatctgttagctggcattggcgatacgctggcgaaatggtatgaagccgttgtgcttgcgccgcagcctgaaacgttgccattgaccgtaaggctgggcattaacagcgcgtgcgctattcgcgatctcctactgaccagcagcgaacaagcattagcggataaacagcagcgtcggctgacccaggcattttgcgacgtggtggatgcgattattgctggcggcggtatggtcggcggcctcggggaacgctatacccgtgtcgccgccgcccatgcggtacacaacggtctgaccgtcctgccgcaaacggaaaaattcctgcacggaacgaaagtggcttatggcattctggtgcaaagcgcgctactgggacaagatgacgtgctggcgcaattgattacagcgtaccggcgatttcatctgccgacccggcttagcgaactggacgtggatattcataacaccgcagagatcgatagggtcatcgcgcataccctgcgcccggtcgaatctatccactatttaccggtgacgttaacgccagacaccctgcgtgcggcgtttgaaaaagttgaatttttcagaatatag

SEQ ID NO: 44272 - protein, 362 aa, Salmonella enterica subsp. enterica serovar Typhi Ty2
MNHTEIRVVTGPANYFSHAGSLERLTDFFTPEQLSHAVWVYGERAIAAARPYLPEAFERAGAKHLQFTGHCSERHVAQLAHACNDDRQVVIGVGGGALLDTAKAHARRLALPFVAIPTIAATCAAWTPLSVWYNDAGQALQFEIFDDANFLVLVEPRIILQAPDDYLLAGIGDTLAKWYEAVVLAPQPETLPLTVRLGINSACAIRDLLLTSSEQALADKQQRRLTQAFCDVVDAIIAGGGMVGGLGERYTRVAAAHAVHNGLTVLPQTEKFLHGTKVAYGILVQSALLGQDDVLAQLITAYRRFHLPTRLSELDVDIHNTAEIDRVIAHTLRPVESIHYLPVTLTPDTLRAAFEKVEFFRI

SEQ ID NO: 44273 - DNA, 1104 bp, Salmonella enterica subsp. enterica serovar Typhi Ty2
  CDS (1)..(1104): transl_table=11
atggatcgcattattcagtcaccaggtaagtatattcagggtgcaaacgtcatcgcgcgtcttggcgattatttaaaaccaatggcgaacaactggctggttgtgggcgataaattcgtgctgggatttgccgaagagacgctgcgcaaaagcctgacggatgccggtttgtcagtagaaatcgccccgtttggcggcgaatgttcgcaaaatgagatcgacaggctgcgcgccgtcgccgaaaaaagtcagtgtggcgccgtactgggtatcggcggcggtaaaacgctggataccgccaaagcgctggcgcactttatgaacgtcccggtcgctatcgcgccgaccatcgcctctaccgacgcaccgtgcagcgcactctcggttatttataccgatgccggtgagtttgaccgttatctgctgctgccgcataacccgaatatggtcattgtcgatacgcagatagtggcgggcgcgccggcgcgtctgctggcagccggtatcggcgatgcgctggcgacctggtttgaagcgcgcgcctgctcacgcagcggcgccaccacaatggcgggcggcaagtgtacacaggccgcgctggccctggcggagctatgctataacacgctgatcgaagaaggcgaaaaagccatgttggccgccgaacagcacgtcgtcacgccagcgctggaacgtgtcatcgaagccaacacctacctgagcggggtcggttttgaaagcggcggtctggccgcagcgcacgcgattcataacggtttaacggcgattccggatgcgcaccactattatcacggggagaaggtcgctttcggtacgctgacgcaactggtgctggaaaacgcgtcggtcgaagaaatcgaaaccgttgctgcgctgtgccattccgttggcctgccgattacgctggcgcaactggatattaagcaggatatcccggccaaaatgcgcatcgtcgcggaagcctcctgcgcagaaggtgaaactattcataacatgcctggcggcgcaacgccggatgaagtgtacgccgcgctgctggtcgccgaccagtacggtcaacgcttcttgcaggaatgggaataa

SEQ ID NO: 44274 - protein, 367 aa, Salmonella enterica subsp. enterica serovar Typhi Ty2
MDRIIQSPGKYIQGANVIARLGDYLKPMANNWLVVGDKFVLGFAEETLRKSLTDAGLSVEIAPFGGECSQNEIDRLRAVAEKSQCGAVLGIGGGKTLDTAKALAHFMNVPVAIAPTIASTDAPCSALSVIYTDAGEFDRYLLLPHNPNMVIVDTQIVAGAPARLLAAGIGDALATWFEARACSRSGATTMAGGKCTQAALALAELCYNTLIEEGEKAMLAAEQHVVTPALERVIEANTYLSGVGFESGGLAAAHAIHNGLTAIPDAHHYYHGEKVAFGTLTQLVLENASVEEIETVAALCHSVGLPITLAQLDIKQDIPAKMRIVAEASCAEGETIHNMPGGATPDEVYAALLVADQYGQRFLQEWE

SEQ ID NO: 44275 - DNA, 1140 bp, Enterococcus faecalis V583
  CDS (1)..(1140): transl_table=11
atgagaaaagcattgattttaccaacgaaatatgttcaaggggaagatgaattactaaacttaggttacttcgtttcaacttttggaaaaaaagcgttactaattgcaaatcctgctgacgttgatcgtgtacgtccacaattggaagaaacagcgaaaaagtttgacattaccttcgtagagggtggctttagtggagaagtaacgcgtgaagaaacaaagcgcttgcaaaacgttggacaaaaagaacaagcagactgtatcattggtttaggtggcggtaaagcaatcgatgcttcaaaagtcgtagcagaaggtgaaaacttaattattgtaccaacgattgcggctcaagatgcaccaacttcgcattcagctgtactatatcatgaagatggctcatttgatgattatgcttactttaaacaaagtccaagcgtcgttatggttgatacaaaagtggttgccaaagcgccaactagatttttagttgctggaatgggggatgccttatccacatattttgaagcacgcgcaacacacaattcatattctcgggttaatgctagtttgccaatgggttcaagagaaggcttaacgcctgctgctagcggcacatatgcagctttggccatggcaaaactttgctgggaaaacctccaggaagatgggttaaaagcgaaattagcttgtgatgcaaatgtggttactgaatcattgaataagattatcgaaacaaatatcttactttcaggcttaggttttgaaagtggcggtttagctgcagcgcatgcgattcataacggtatgacagtcttacctggtgcgcacagttatttacatggtgaaaaagtagcttttgcaacgattgcacaacttgtattagaagatgcagcaaaagacgaattagaagctgttttagactttagcgcttctgtaggtttaccattaacgctttcagacattggtgtcgatgaaatcacttatgaagaagcgttggaagtagccaaaattgcttgcattccagaagaatcaattcattcaatgccattcccaattgtcgttgaagaagtagcgaatgcaatcattgttgcagataaagtcggacaagaatataaaacaagacataaattagattaa

SEQ ID NO: 44276 - protein, 379 aa, Enterococcus faecalis V583
MRKALILPTKYVQGEDELLNLGYFVSTFGKKALLIANPADVDRVRPQLEETAKKFDITFVEGGFSGEVTREETKRLQNVGQKEQADCIIGLGGGKAIDASKVVAEGENLIIVPTIAAQDAPTSHSAVLYHEDGSFDDYAYFKQSPSVVMVDTKVVAKAPTRFLVAGMGDALSTYFEARATHNSYSRVNASLPMGSREGLTPAASGTYAALAMAKLCWENLQEDGLKAKLACDANVVTESLNKIIETNILLSGLGFESGGLAAAHAIHNGMTVLPGAHSYLHGEKVAFATIAQLVLEDAAKDELEAVLDFSASVGLPLTLSDIGVDEITYEEALEVAKIACIPEESIHSMPFPIVVEEVANAIIVADKVGQEYKTRHKLD

SEQ ID NO: 44277 - DNA, 1134 bp, Prochlorococcus marinus subsp. marinus str. CCMP1375
  CDS (1)..(1134): transl_table=11
atgcaaaatacaaattttttgcagaatatatctcctgagagagttattagaggtgaaagtgcttgggaagaaggcaagagtctgattcaatcaatatgtaagaagcctctcttcttaggaagaagtcattccacctctaaattaagatcaatgttggagaaagatcttatcaatattggcataaatatagttcacgctgaacttgaatatgattgttgtgatgttgacttaaatcgtatatatcaattatgtaaggattgttcttgtgatggaataattgcttctggtggagggaaagttttagatgcaggaaaattaatcgctaacaatttaaacttaccttgtataacggttccacttagtgcttcaacttgtgcaggctggactgcactagcaaatatttattcaaaaaagggggcatttattaaagatcaaactttaaataactgtcctaaattattaatatttgactattctcttgtaagaaaagcacccaatagacttcttgctagtggtattgctgacgcacttgcaaaatggtatgaggcatctcttagcaatgcaggttctaatgatgctctcgtacagcaagctgttcaaatggcaagagtgttaagagatcaattgttaatagatggctttaatgcattacaaaatccatatagttcttcatggataagagttgcagaaagttgttctcttacagccggactcattggtggagtaggtggtgcaaaatgtagaacagcagccgcgcatgctgttcacaatggtctaacacaattagactttacacaaaaggctcttcacggggaactcgttgggtttggcatattagttcaactaagaattgaggagaagttattaggtaatcagttagcattgcaagcaaagaatcaattaataacattattaaaagaattaaatcttcctactaatcttaaatctctaggaattaatttaacaactaagaaagaactagaaatggcctgtatattttcttgtagagatgactctgatattcataatttaccattcaaagtagataaagaaacacttatggaagcaattttagaaacagatagaatagagattgaaaaaatttctcctagaggaaccattttcaactgctaa

SEQ ID NO: 44278 - protein, 377 aa, Prochlorococcus marinus subsp. marinus str. CCMP1375
MQNTNFLQNISPERVIRGESAWEEGKSLIQSICKKPLFLGRSHSTSKLRSMLEKDLINIGINIVHAELEYDCCDVDLNRIYQLCKDCSCDGIIASGGGKVLDAGKLIANNLNLPCITVPLSASTCAGWTALANIYSKKGAFIKDQTLNNCPKLLIFDYSLVRKAPNRLLASGIADALAKWYEASLSNAGSNDALVQQAVQMARVLRDQLLIDGFNALQNPYSSSWIRVAESCSLTAGLIGGVGGAKCRTAAAHAVHNGLTQLDFTQKALHGELVGFGILVQLRIEEKLLGNQLALQAKNQLITLLKELNLPTNLKSLGINLTTKKELEMACIFSCRDDSDIHNLPFKVDKETLMEAILETDRIEIEKISPRGTIFNC

SEQ ID NO: 44279 - DNA, 1095 bp, Prochlorococcus marinus subsp. pastoris str. CCMP1986
  CDS (1)..(1095): transl_table=11
atgcaattaatatctccagaaaaaatatttaggggaaataatgcttgggaagaatctctgacacaaataaaaaaaatttctaagcgtcccttggttttaggtagaagtttatcaacgaaggaaataaggcatcaaatttataaagacttacaagatcatcatttccatataattaaatcaaacttacaatttgattgttgttatgaagatcttgaaagaatagaaagaatcatacttaaaaataattgcgattcaattattgctataggtggaggcaaagttttagacgcaggaaaatttttagcagactttctatcgattcctgctattactatccctttaagtgcatctacttgtgcaggttggactgcattatcaaatatttattcaaaagatggacaatttatcaaggatattgagttgaaatcttgtcctgaaatattagtacttgatcacggttttattaaaacagcccctaagcggacacttgctagtggaatagctgatgcattagctaaatggtacgaatcttctttgactagctcaaaagtggaagatggactcgttcagcaagcaattcaaatatcaagagtattaagagaccaattacttattaatggagaaagtgcttataagagtcagtcattccataacgttgcttggtgtaatgttgtagagggatgttcacttactgctggattgattggtggaattggtggagaaaaatgtagaactgcagctgctcatgctatacataatgctattactcagataatttcaagtcataagcctttacatggtgaaattgttggagtaggaatcttattgcaactgagattagaagaaactaaaaataacaataaattagctaatcaatctattaaacagttaatggaattaatgagaaaattagatttaccaactactattgccgacttaggaataaatgtttttgaaaataataatttacaaaaaattgctgaatttacctgcagggataaatcagagattcattttttgccttttgaaatcaatcagcaagatataataaaaactattacagaatttgaaaaacaaaaaattaaaatagcataa

SEQ ID NO: 44280 - protein, 364 aa, Prochlorococcus marinus subsp. pastoris str. CCMP1986
MQLISPEKIFRGNNAWEESLTQIKKISKRPLVLGRSLSTKEIRHQIYKDLQDHHFHIIKSNLQFDCCYEDLERIERIILKNNCDSIIAIGGGKVLDAGKFLADFLSIPAITIPLSASTCAGWTALSNIYSKDGQFIKDIELKSCPEILVLDHGFIKTAPKRTLASGIADALAKWYESSLTSSKVEDGLVQQAIQISRVLRDQLLINGESAYKSQSFHNVAWCNVVEGCSLTAGLIGGIGGEKCRTAAAHAIHNAITQIISSHKPLHGEIVGVGILLQLRLEETKNNNKLANQSIKQLMELMRKLDLPTTIADLGINVFENNNLQKIAEFTCRDKSEIHFLPFEINQQDIIKTITEFEKQKIKIA

SEQ ID NO: 44281 - DNA, 1101 bp, Synechococcus sp. WH 8102
  CDS (1)..(1101): transl_table=11
atggttgtgtccatctcctcccacgccatcgccccggcggtggtgctgcggggggagggtgcctgggcagaggcgctgtccaagatcagtgccctttgttcccgccctctcctgttgggccgcagtcaggccacggtgagcctgcggtcagcccttgtttcggatctcgttcacagttgtctgacgccgcaaccagctgagctcagctacgactgttgcgaggaggatctacagcgtctggccgctgaggcagccgactgtgatgccgttctcgccgccggtggtgggaaggttcttgatgctggcaagttgctcgcccatcgccttcagctgccctgcatcacagtgccgttgagtgctgccacctgcgcgggttggacagctctctccaatctttattcgatgcatggagcctttgagggcgatgtggccctgacgcgctgccctgagctgctggtgtttgaccatggcctggttcgccaggctcctgctcgcaccctggccagcggcatcgccgatgccctggcgaagtggtacgaagcttcggtcagcagcggcgacagcagcgatgggctggtgcagcaggcggtgcagatggcccgtgtgctgcgggatcaattgatgattgatggtcccctggccctgcaggatccccacagtgcggcctgggcccgcacggccgaggcctgtgcacttactgccggtgtgatcggcggcttggggggtgcccgctgcagaaccgttgcagctcacgccgtgcacaacggtctcacccaactgcaggcctgccaagacgtgctgcatggcgagaaggtgggcttcgggatcctggtgcagctccgcctggaagaacgtctgggtggcaaccgcctggccggccaggcccaccgccagttgcttcccctgctgcggcagttgcagcttcctgtgagcctgcaggatcttgggctgtccaacgccagtcttagtgatcttcaacaggtctgtgccttcgcctgccgtgaaggatcagacctgcacaaccttccatttgcggtgacaccgggggcgttgcttgaggcattggtgggagccgccgaacccagtcccgtcgcgccttga

SEQ ID NO: 44282 - protein, 366 aa, Synechococcus sp. WH 8102
MVVSISSHAIAPAVVLRGEGAWAEALSKISALCSRPLLLGRSQATVSLRSALVSDLVHSCLTPQPAELSYDCCEEDLQRLAAEAADCDAVLAAGGGKVLDAGKLLAHRLQLPCITVPLSAATCAGWTALSNLYSMHGAFEGDVALTRCPELLVFDHGLVRQAPARTLASGIADALAKWYEASVSSGDSSDGLVQQAVQMARVLRDQLMIDGPLALQDPHSAAWARTAEACALTAGVIGGLGGARCRTVAAHAVHNGLTQLQACQDVLHGEKVGFGILVQLRLEERLGGNRLAGQAHRQLLPLLRQLQLPVSLQDLGLSNASLSDLQQVCAFACREGSDLHNLPFAVTPGALLEALVGAAEPSPVAP

SEQ ID NO: 44283 - DNA, 1077 bp, Gloeobacter violaceus PCC 7421
  CDS (1)..(1077): transl_table=11
gtggccccgcagcaagtacggcgcggtcacggcactatcgaaatcttgggggaatggacccggcggctcggaagccgaccgctgatcgtcggtggccaaaataccctggcgcgctggcgaccgacgctggagaagattttacaggaagcggggcttgaagcagtctttgccgattacggtatcgactgtaccgaagcgaacttggcgcgactggtggacaaggcgtccgggcacgacgtggtgatcggcgtcgggggcggtaaagccctcgacatggccaaactggtcgcggcgcgccgcggcctgccgatgatcgcgctgcccacctcggcggccacctgtgcggcttgggcggctttgtcgaatatttactccgaagcgggccagtggctctacggcgtcgaactcgaccacgcacctgaagggctcatcgtcgattacgacttgattgccaccgccccggtgcgcacgctggtgagcggcatgggggacgccctcgccaagtggtacgaagcgtccatcagctccggcgactcggacgatgtgctggtgattagcgccgtgcagcaggcccgggtgctgcgcgacttgattttgcagttgggagaagcggccgtgggcgaacccggcggccgggcctgggagcagatggtcgatgcaagcatttgcctggcggggatggtggggggccttgggggggcgcgctgccgcaccgtcgccgcccacgccgtccacaacggcctcaccagcctgggtgccacccgccgctcgttgcacggcgaaaaagtcgccctgggtgttctggttcaacttaggctcgaagaaaccgtcggccgccagcgcctggcaagcatcgcccgcgagcagctcgaacagttctaccgccgtgtgggtctgcctttgagccttgaggatctgcacctcgctgcgctggacgacgagcagttgctggcggttgcccggctgtgctgccagccgcaatccgacatccattacttgccttttgccgtcgaacccgagcagttggcgcgggtgctgcgcgagagcgcccggccgcgcgccgctcgtctaagctga

SEQ ID NO: 44284 - protein, 358 aa, Gloeobacter violaceus PCC 7421
MAPQQVRRGHGTIEILGEWTRRLGSRPLIVGGQNTLARWRPTLEKILQEAGLEAVFADYGIDCTEANLARLVDKASGHDVVIGVGGGKALDMAKLVAARRGLPMIALPTSAATCAAWAALSNIYSEAGQWLYGVELDHAPEGLIVDYDLIATAPVRTLVSGMGDALAKWYEASISSGDSDDVLVISAVQQARVLRDLILQLGEAAVGEPGGRAWEQMVDASICLAGMVGGLGGARCRTVAAHAVHNGLTSLGATRRSLHGEKVALGVLVQLRLEETVGRQRLASIAREQLEQFYRRVGLPLSLEDLHLAALDDEQLLAVARLCCQPQSDIHYLPFAVEPEQLARVLRESARPRAARLS

SEQ ID NO: 44285 - DNA, 1101 bp, Photorhabdus luminescens subsp. laumondii TTO1
  CDS (1)..(1101): transl_table=11
atgctgaaaattattcaatccccatccaaatatattcaaggacctgatgccctgctccatattggtcaatataccaaaaccatcgccgatcacgttttggttatcatcggtaattccgcgatgaaattggtgggagatacggttcatagcagcctggaacaatacgaaattactcgtcattttgaagtgtttggcggtgaatgtagtcggaatgagattaaacgcctgtctgacattcttaaaaaacatgaatgccaagccgttattggtatcggtggcggcaaagtacaagatacggcaaaagcggtcgcttacgaatccagattacctgttctgattgcccccactatcgcttccactaatgccccaaccagtgctctctctgttatttacagcgatgatggcaaatatgaagactatctgtttctcccaacaaacccagatattgtcctaatcgataccagcattatcgctaaagccccaacccgttttctgattgccggaattggcgacgcgctggcaacttacttcgaagcccgcatttgtggagccggctataaacctcgaatgacagagggtgggatatcccgtaccgcagtcgccctcgctcatctctgttacgaaactttgttagaagagggctataaagcaaaactggctgttgaaaccgacgtcagtacacctgcggtggaaaatgtcatcgaagctattacttacttaagcggcctaggctttgaaaatacgggtgtagccgccgctcattccgtacacaatggctttaccgtattagaagaatgccaccacatgtaccacggcgaaaaagtcgccttcgggatattagttcaactaatactggaaaatagcccaaatgaagaattagatactttacttgatttctgtgtacagatgggactaccggttactctggatcaacttggcgtgaaggatggtgaaaaactgaaagaaaaagtgatggcagtggcaacagcaagttgtgccgaggacgaaaccattcacaacatgccttttgaagtgacaccggaaaaagtgtacgccgctattatggctgctgaccggatgggacgcgactggttgtattaa

SEQ ID NO: 44286 - protein, 366 aa, Photorhabdus luminescens subsp. laumondii TTO1
MLKIIQSPSKYIQGPDALLHIGQYTKTIADHVLVIIGNSAMKLVGDTVHSSLEQYEITRHFEVFGGECSRNEIKRLSDILKKHECQAVIGIGGGKVQDTAKAVAYESRLPVLIAPTIASTNAPTSALSVIYSDDGKYEDYLFLPTNPDIVLIDTSIIAKAPTRFLIAGIGDALATYFEARICGAGYKPRMTEGGISRTAVALAHLCYETLLEEGYKAKLAVETDVSTPAVENVIEAITYLSGLGFENTGVAAAHSVHNGFTVLEECHHMYHGEKVAFGILVQLILENSPNEELDTLLDFCVQMGLPVTLDQLGVKDGEKLKEKVMAVATASCAEDETIHNMPFEVTPEKVYAAIMAADRMGRDWLY

SEQ ID NO: 44287 - DNA, 1089 bp, Vibrio vulnificus YJ016
  CDS (1)..(1089): transl_table=11
atgttaacaacaactatatttccaggtcgttatgttcaaggtaaagatgctcgaaaacaacttggagtagaactcaatcgttttggaaaaaaaggtctaatgatctgtgactcatttgtttatgatacattattttctgagtttgaaccttatcttgagaccgttgaagttgaagtgatccggtttgctagtgaatgttgtgacgaagaaataacacgtctgacagccatgttgaaaaattttgagggtgaatttgtggttggattaggtggaggaaaaaccattgatacagcaaaagcaacctcgtatgaagcgagagtccctgtggcaattgtgccgactttggcagcgagcgatgcaccatgcagtgcactatccgttatttacactcaagaaggagagtttaagcgttatcttttcctgcctcaaaatccgaatcttgtcttggtcgacacacaaattattgccaaggcacctgttcgattccttatagctgggatcggtgatgcgctagcaacatggtttgaagcagaatcatgccagcaaagttttgcctcgaatatgacaggttatatgggttcattgtcagcatatgcgttagcacgtttgtgttacgacactttgcttgaatacggcgtaatagctaaaacatcgaatgaacaaggtgtggttactccagcgctcgaacgtgttgtggaagcaaatacgttgcttagtggattaggtttcgaaagtggtggtcttgctgcttctcatgcgattcataatggtttaacagtattggagccaacacatgtgtttttgcatggtgaaaaagtcgcatttggtttgctttcttctctattccttactgataaaccagcacagaccatcgcaactgtttatgacttctgcgaaaaagttggcttgccaacgactctgtctcaaatcggtttagaaaatgtatccgatgaagatttattggcagtggctgaagcttcatgtgcagaaggtgagaccatccacaacgaacctcgaactgtaactccagatatggtgtttgcagcaatgaaagcggcaaatgtagaagggttacgtcgcaagagctaa

SEQ ID NO: 44288 - protein, 362 aa, Vibrio vulnificus YJ016
MLTTTIFPGRYVQGKDARKQLGVELNRFGKKGLMICDSFVYDTLFSEFEPYLETVEVEVIRFASECCDEEITRLTAMLKNFEGEFVVGLGGGKTIDTAKATSYEARVPVAIVPTLAASDAPCSALSVIYTQEGEFKRYLFLPQNPNLVLVDTQIIAKAPVRFLIAGIGDALATWFEAESCQQSFASNMTGYMGSLSAYALARLCYDTLLEYGVIAKTSNEQGVVTPALERVVEANTLLSGLGFESGGLAASHAIHNGLTVLEPTHVFLHGEKVAFGLLSSLFLTDKPAQTIATVYDFCEKVGLPTTLSQIGLENVSDEDLLAVAEASCAEGETIHNEPRTVTPDMVFAAMKAANVEGLRRKS

SEQ ID NO: 44289 - DNA, 1095 bp, Prochlorococcus marinus str. MIT 9515
  CDS (1)..(1095): transl_table=11
atgcagtcaatatcaccagaaaaaatatttagggggagtggagcttggataaaagctataccacatattaaaagtatttcaaaacgcccattacttttaggaagaagtttagtaactaataatattaggcagcaaatctataaagatttgcttagcgaaaaccttgatacacatatttctaacctgcaattcgattgttgttatgaagatctcaaaagggtaaaaaacattgcactaaaaaataattgtgattctattattgccataggaggaggtaaagtcttagattccgggaaatttttagcagattctctttccatcccagttattactattcccttaagtgcatctacttgtgcaggctggactgcactatcaaacatttattcaacaactgggcaattcattaaggatattgagttgaaatcatgtcctaaaattttagtatttgatcatgcctttattaaaacagctccaaagaggacactttctagcggaatagctgactctttggccaaatggtatgaatcttctttaactagttcaaaagttaaagatggacttgtccagcaagcaattcaaatatcacgagtattaagagatcagcttcttattgatggagagagtgcttatcagagtcaatctcttcaaaatacttcttggtgcaatgtagttgaaggatgtgcacttactgcgggattgataggaggaataggaggagaaaagtgtagaacggcagctgctcatgctttccataatgctatcactcaaatagtttcaacacaaaagcccttacatggcgaaattgttggagttggaatattattgcaattaagactagaagaaaccaaaaataataataaattagctaaccaatctattaatcaattattggtattaatgaagaaattaaatttaccaactactatcgctcaattaggtataaatgtttttgaaaataataatttacagagaattgccgattttacatgcagggataaatctgagattcattttttaccttttaaaatcagtcaacaagatattattgaagttatttcgaattttgaaaggcaagaaattaagatttcataa

SEQ ID NO: 44290 - protein, 364 aa, Prochlorococcus marinus str. MIT 9515
MQSISPEKIFRGSGAWIKAIPHIKSISKRPLLLGRSLVTNNIRQQIYKDLLSENLDTHISNLQFDCCYEDLKRVKNIALKNNCDSIIAIGGGKVLDSGKFLADSLSIPVITIPLSASTCAGWTALSNIYSTTGQFIKDIELKSCPKILVFDHAFIKTAPKRTLSSGIADSLAKWYESSLTSSKVKDGLVQQAIQISRVLRDQLLIDGESAYQSQSLQNTSWCNVVEGCALTAGLIGGIGGEKCRTAAAHAFHNAITQIVSTQKPLHGEIVGVGILLQLRLEETKNNNKLANQSINQLLVLMKKLNLPTTIAQLGINVFENNNLQRIADFTCRDKSEIHFLPFKISQQDIIEVISNFERQEIKIS

SEQ ID NO: 44291 - DNA, 1080 bp, Synechococcus sp. WH 7803
  CDS (1)..(1080): transl_table=11
atggcgccggtccgcgtgattcgcggctccggtgcctggcaagacgcccttccccagatccgtgcgctctgctccagcccgctctttctgggtcgaagttcagccacgcagcctctgcgcaacacgctgatctccagcctcacgtcggctggaatgaaggtcgcgccagcgctcctgaggcatgactgctgcaacgaagacttaagtcgtcttcaatcggaatggtcggttcaccgcagtgatggggtgatcgccgctggtggaggaaaagttttggatgccggcaagctccttgccgaccgtctcgatctgccctgcatcaccgttccactgagtgcctcaacctgtgctggctggaccgcactctccaatctctacagcccagacggtgcatttttcggcgatcaggccttgaaatactgtccggacctgctggtgttcgaccacgatctcctgcgtcaggcacctccccgcacccttgccagtggcatcgctgatgcgctggccaagtggtacgaagcctccgtgagcagtggtgccagccaggatggactcatcctgcaagcggttcagatggcgcgcgttctgcgcgatcagcttctgatcgacagcgtggatgccatgcagaatccaggcggtgacgcttggattcgcgtgattgaagcctgtgggctcacagcaggcgtgattggaggcctgggtggggcacgctgccgcacggttgctgcccatgctgtgcacaacgggctcacccaacttcaggcctgccacggatccctgcacggcgaaaaagtgggcttcggagtgctggttcaacttcgcctcgaggaacgcttgggcggcaatcgcctggcagaacaggcccaccgtcagttgctgcctctgctcaagcaactcggactcccggtcagcctcgacgatctcggactctccaaggccagcttgagtgaccttcaacaggtttgcgatttcgcctgccgtgaaggctccgaccttcaccatctccccttctctgtgacaccgggagctcttctggaagcgctggtcggagcctcagaacccagcgttcgacgcccttga

SEQ ID NO: 44292 - protein, 359 aa, Synechococcus sp. WH 7803
MAPVRVIRGSGAWQDALPQIRALCSSPLFLGRSSATQPLRNTLISSLTSAGMKVAPALLRHDCCNEDLSRLQSEWSVHRSDGVIAAGGGKVLDAGKLLADRLDLPCITVPLSASTCAGWTALSNLYSPDGAFFGDQALKYCPDLLVFDHDLLRQAPPRTLASGIADALAKWYEASVSSGASQDGLILQAVQMARVLRDQLLIDSVDAMQNPGGDAWIRVIEACGLTAGVIGGLGGARCRTVAAHAVHNGLTQLQACHGSLHGEKVGFGVLVQLRLEERLGGNRLAEQAHRQLLPLLKQLGLPVSLDDLGLSKASLSDLQQVCDFACREGSDLHHLPFSVTPGALLEALVGASEPSVRRP

SEQ ID NO: 44293 - DNA, 1098 bp, Erwinia carotovora subsp. atroseptica SCRI1043
  CDS (1)..(1098): transl_table=11
atgagtcatttcattttctcttcacctagaaaatatgttcagggtcgcggcgtgctggatgaactgggtgaacaactcaagcctctgggaacgaaagcgtttctgatggcagatggcattgtttgggacatcatcggccagcgcgtagatgcgtccctcaaacaggtgagcatcggctaccattacgagcgttttaacggtgaggcgtccagcaacgaaatcacccgtcttgctaagctagcacgcgacgcgggcaccaacattgtcgttgggttaggcggcggtaaaacgctggatacggcgaaagcggttgctgatgagctgaaacacaatgtcgcgattgtcccaaccgtggcctcaacggatgcaccgtgcagcgcgctgtccgtcatctacaccgacgagggcgtgttcgagtcctaccgcttttacgacaagaatcccgatctggtattggtcgataccgccgtgtgtgcgcaggctccagcacgcctgtttgcctccggcattgccgatggtctggcaacctttgtcgaagcacaggcggttctgcgctctcacgcactttctatgctgggcggtaaacctacgctagcgggcatggcgattgccgaaacctgcgaaaaaacgctgctagcctacggttatagtgcttacaaagcggtggaaaaaggtgtggtaacacccgcagtggaatccgtagttgaagccaacacgctactttccggcttgggctttgagaatggcggattggcgggcgctcacgccatccacaacgggtttaccgcgatcaaaggcgacatccaccacctcacgcatggggaaaaagtcgcctacggcacgctgacacatatggtgctggagcaacgtcctgacgaggaaatcgcacgctacattcgcttctaccgcgcgattaacatgccgacgctgctaaaagatctgcatctggaaaatgagccgtttgagaatttgatcaaagtgggtgaactggcgtgcagcgacgccgatacgctgaaaaatctggacagcggattaacggctgaagacgtcgctcacgcgattattgctgtcgacgcgttcagtaaaaccatcagctaa

SEQ ID NO: 44294 - protein, 365 aa, Erwinia carotovora subsp. atroseptica SCRI1043
MSHFIFSSPRKYVQGRGVLDELGEQLKPLGTKAFLMADGIVWDIIGQRVDASLKQVSIGYHYERFNGEASSNEITRLAKLARDAGTNIVVGLGGGKTLDTAKAVADELKHNVAIVPTVASTDAPCSALSVIYTDEGVFESYRFYDKNPDLVLVDTAVCAQAPARLFASGIADGLATFVEAQAVLRSHALSMLGGKPTLAGMAIAETCEKTLLAYGYSAYKAVEKGVVTPAVESVVEANTLLSGLGFENGGLAGAHAIHNGFTAIKGDIHHLTHGEKVAYGTLTHMVLEQRPDEEIARYIRFYRAINMPTLLKDLHLENEPFENLIKVGELACSDADTLKNLDSGLTAEDVAHAIIAVDAFSKTIS

SEQ ID NO: 44295 - DNA, 1104 bp, Erwinia carotovora subsp. atroseptica SCRI1043
  CDS (1)..(1104): transl_table=11
atgattgcaatacaagcgccacaaacctatctaaatcgtgatggcgtcattcgttctgtcggcgaatatgctgccccttacgccagcacaatactgattattaccagtccgcaggcatggaaaacgacggcggatgccgtcgaacacagcctcaatgagcacggcttacgctatcaggtcgaatttttgccgggcgattgcaccaaacccgcgatcgagacgctaaccgcacaggcgcgcacattcagtgcagaactgattttaggcattggcggtgggcgtgtgctggatgtcgccaaagccgtcggcgatattctggggcagatccccgtcatcgccgtacccaccattgccgctacctgcgccgcttggtcaccgatcagcgttatttacaatgagagtggtgcgcacaacggcccctttccactgacgcgtttaccagtgtgggtgctggtagacagtgaaatcatcgcccacagcccttcacgttacctcaaggctggtatcgtggatgcactggcaaagtggtacgagtttcaaccgtatctgcgccacggtgatgatgggctggcgttagcgctcaaagcacaagcggcaaagctagccgtagaaacgtttaatacgtacggcgagcaggccatcgcggataatgaacaagggttggtcacccctgccctgcgccgtgtgatcgatgccgttatcgcactggctggcgtcgcgaatagcatgaaagatgaggtgccacgcatcggcgtcgcgcatgcgattcacaacagcatgactcgcctgccggaactgcatgactggctgcacggagagaaagtgggttttggtctggctgcccaggcttttctggaacacgataacgacgctgaccgcgaagaactgttcacccagttgcgccgctacggtagtccgatcacgctaagcgcccttggtctgaacgaacgtccattgctggttgaaagcatcgcgcagaacgtgaaaatcgcccctaaaattgctgcccgtttgccgttcgcaacggatgccgaacgaattcaacaagcgctatggcacacgcaaacactggaaggccatgtggtagacagccacgcggcatga

SEQ ID NO: 44296 - protein, 367 aa, Erwinia carotovora subsp. atroseptica SCRI1043
MIAIQAPQTYLNRDGVIRSVGEYAAPYASTILIITSPQAWKTTADAVEHSLNEHGLRYQVEFLPGDCTKPAIETLTAQARTFSAELILGIGGGRVLDVAKAVGDILGQIPVIAVPTIAATCAAWSPISVIYNESGAHNGPFPLTRLPVWVLVDSEIIAHSPSRYLKAGIVDALAKWYEFQPYLRHGDDGLALALKAQAAKLAVETFNTYGEQAIADNEQGLVTPALRRVIDAVIALAGVANSMKDEVPRIGVAHAIHNSMTRLPELHDWLHGEKVGFGLAAQAFLEHDNDADREELFTQLRRYGSPITLSALGLNERPLLVESIAQNVKIAPKIAARLPFATDAERIQQALWHTQTLEGHVVDSHAA

SEQ ID NO: 44297 - DNA, 1101 bp, Symbiobacterium thermophilum IAM 14863
  CDS (1)..(1101): transl_table=11
ttgagcaaggtgatcgttgcacccggcaagtacatccaaggcccgggggagttggaccggctggccgaacacaccggccagctcggggcgcacgccttcgtcatcgccgacgagtttgtcatgaatctgaccggtgaccgcgtgaccgccagctatgccaaggcaggggccgcggtgacgatggaacgcttccagggggagatcacccaggccgagatcgagcggctgacggcgcgctgcaaggagtctcaggccgacgtggtggtgggcatcggcggcgggaaaacgttggattccgccaaggcagtcgcctactactgcggcaatctgcccgcagtcgtcgtgccgaccgtggcctccacggacgcgccgtgcagcgccctgtcggtgatctacaaggaggacggctcgttcgaacggtatctgttcctgccgtcgaacccggctgtcgtcgtcgtcgatacggcgatcatcgccaacgcgcccgtccgactcctggtcgcgggcatgggcgacgcgctcgccacctactttgaggcgcgcgcggcccagcgggcccacaagctgaacatcgtcggaggacacggcacgcaggcggccatggcgctggcccggctctgctacgacaccctgcttcaggagggcatcaaggccaaggctgcggccgaggcgcacgtgatcaccgaggccctggagcggatcgtcgaggccaacacctacctcagcgggctgggttttgaaagctgcgggctggcggccgcccacgcgatccacaacggcctgtccgccctggaggagacccacggcgcctaccacggcgagaaggtggccttcggcaccctcgcgcagctcgtcctcgagaacgcgcccctggacgagatcgaggaggtcatcgagttctgcctgaacgtgggcctgccggtgacgctcgcagatctgggggtgcacacggtccgggaggagcagatccgccgggtggctgagctgtcctgcgccgaaggggaaaccatcttcaacatgccgttcgaggtgacgccggagaaggtgtacgccgccatcctgacggctgaccggctgggtcacctgtacaagggcggttga

SEQ ID NO: 44298 - protein, 366 aa, Symbiobacterium thermophilum IAM 14863
MSKVIVAPGKYIQGPGELDRLAEHTGQLGAHAFVIADEFVMNLTGDRVTASYAKAGAAVTMERFQGEITQAEIERLTARCKESQADVVVGIGGGKTLDSAKAVAYYCGNLPAVVVPTVASTDAPCSALSVIYKEDGSFERYLFLPSNPAVVVVDTAIIANAPVRLLVAGMGDALATYFEARAAQRAHKLNIVGGHGTQAAMALARLCYDTLLQEGIKAKAAAEAHVITEALERIVEANTYLSGLGFESCGLAAAHAIHNGLSALEETHGAYHGEKVAFGTLAQLVLENAPLDEIEEVIEFCLNVGLPVTLADLGVHTVREEQIRRVAELSCAEGETIFNMPFEVTPEKVYAAILTADRLGHLYKGG

SEQ ID NO: 44299 - DNA, 1104 bp, Bacillus licheniformis ATCC 14580
  CDS (1)..(1104): transl_table=11
atgtcaaaatcagtaaaatcagtcacatcacctaaaaaatttattacaggaaaacgactgctggagaacttgaacgactacattgaagattttggcgacaacgcatatatcatttgcgatgaattcattttggaacgcgctcaaaaagaagcggggaattcgattcagaaagccggcaatcaagccgtttttgaaaaattcaattacgaatgcacacaggaagaaatcgatcgcaaccgggagcttgcacgcaatgcaggcgctaatatcatcgttgggatcggaggcggtaaaacgcttgataccgcaaaagccaccgcttattacgagaagctgccggttgtgattttcccgacaattgcttctacggatgctccatgtacggcccttgccgtcatttataaacacgacggatcgtttgaccgctatctgtttttgccgacgaacccagatgtcgttcttgcggactctgagattttggcatccgcgccgccgcgctttttcgcagccggtatcggtgacgccttggcgacgtattttgaagcgcgtgcctgctttaaagcaaacggcgataacctcgtgctgatgaagccttcaacaactggattgggacttgcccgtctttgctatgatacgctgttggaaaacggtgtgaaagcgatgcaggcggttaagcacggcgtttccacacgagcggtcgaagatacaatcgaggcgaccatctatttaagcggcgtcggtgccgaatcaggcggtcttgccgccgcacacgcgatccacaacggaatgacagccgttccttctctgcacagggctcagcacggcgaaaaagtcacgttcggccttttggcgcagcttgttcttgaaaacgcgccggccgaagaattggagaccgttattgactttatcaaaggcgtcggtcttccgttgacattaaaagacctcggagtcgacgaatttgtcgaagaagaatggcgccaagtcgctcaaagcgcttgcgcggaaggcgacacaatgggcaacatgccgttcccagtcacccctgacgacgtctacaatgcgatcgtcgccgccaacgcgattgcagaatcttatcacgattaa

SEQ ID NO: 44300 - protein, 367 aa, Bacillus licheniformis ATCC 14580
MSKSVKSVTSPKKFITGKRLLENLNDYIEDFGDNAYIICDEFILERAQKEAGNSIQKAGNQAVFEKFNYECTQEEIDRNRELARNAGANIIVGIGGGKTLDTAKATAYYEKLPVVIFPTIASTDAPCTALAVIYKHDGSFDRYLFLPTNPDVVLADSEILASAPPRFFAAGIGDALATYFEARACFKANGDNLVLMKPSTTGLGLARLCYDTLLENGVKAMQAVKHGVSTRAVEDTIEATIYLSGVGAESGGLAAAHAIHNGMTAVPSLHRAQHGEKVTFGLLAQLVLENAPAEELETVIDFIKGVGLPLTLKDLGVDEFVEEEWRQVAQSACAEGDTMGNMPFPVTPDDVYNAIVAANAIAESYHD

SEQ ID NO: 44301 - DNA, 1197 bp, Synechococcus elongatus PCC 6301
  CDS (1)..(1197): transl_table=11
atggaagtttcgacgggctaccttccgcaggcagtcttcgcccctgccgatcaaggtcatcctgccccgcgtgtctttatctcgccccagcgctacatccaagggcgaggtgttttgcggagtgttggccgctacctctccctattgcaggcaaaacgagcaggcctgctgatgtcgcaacgcagcagtcgaaatgaaggagatttattactagccggactgcgatcggctggtgttgatgctgtcgtcagcacctttcagggcgaatgtacaaccgatgaaatcaccgctcacaccaccgctttttccaaagagcgaatcgactgcgtgattgctgcgggaggtgggaaatgtatcgataccggtaaagcgatcgcgtttcggttggggattcctgtcgttgtcgtcccgacccttgcctccaacgatgccccctgttctgcgctctctgtcctctactcccctgagggaatttctcaaggcgtcgagttctatcccaatagcccagccatcgtggttgtcgataccgacatcattgccgcagcgcccgaacgctaccttgtggctgggatgggtgacgcgatggcgacttggtatgaggcgtctgtctgtcttcgtaatccggcggctgtcacaaccgtgggcgctcgtcccaccttggctgcatgtgcgatcggtgaagtctgtgcccataccctctttcaagaaggctgtgctgccgctgcggctgttgcctccaaaacggtcaacgacgccttggagtcagtggtagaagcaaataccttacttagcgggctgggctttgaaagtggtgggttggccggcgctcatgctgtcgcccaaagctacacagcgattccccatgtgcgtgccaactaccttcacggcgaaatggtagcgatggggactcttgctcaactgatgatggaatcgcgccccaaggaagcaacacgagttgccgagttttttgctgctgttgggctgccgattcatcttggtcaactctcgctaagcagtagcgacacccaagctttagagatcgttagtgaagcttcattaggcttcccttttgtcggtaatatgccaatgaaaataacaccagaatttgtgaaatctgcaattcttgatgctcatcacctaggactcagtatacccgagcagatcggagacagtgcttatcgacatctacagggctaa

SEQ ID NO: 44302 - protein, 398 aa, Synechococcus elongatus PCC 6301
MEVSTGYLPQAVFAPADQGHPAPRVFISPQRYIQGRGVLRSVGRYLSLLQAKRAGLLMSQRSSRNEGDLLLAGLRSAGVDAVVSTFQGECTTDEITAHTTAFSKERIDCVIAAGGGKCIDTGKAIAFRLGIPVVVVPTLASNDAPCSALSVLYSPEGISQGVEFYPNSPAIVVVDTDIIAAAPERYLVAGMGDAMATWYEASVCLRNPAAVTTVGARPTLAACAIGEVCAHTLFQEGCAAAAAVASKTVNDALESVVEANTLLSGLGFESGGLAGAHAVAQSYTAIPHVRANYLHGEMVAMGTLAQLMMESRPKEATRVAEFFAAVGLPIHLGQLSLSSSDTQALEIVSEASLGFPFVGNMPMKITPEFVKSAILDAHHLGLSIPEQIGDSAYRHLQG

SEQ ID NO: 44303 - DNA, 1107 bp, Bacillus clausii KSM-K16
  CDS (1)..(1107): transl_table=11
atggacgagaaaatttttattagtccaagcaagtatgtgcaaggcagaggggttctcgacaagacaggggaatacgtgaaagacttaggcaaaaaggcgctgcttatagctgatgaatttgtctgggggatagctgcaaaccgagtggcggacagcttgaaagaagttgggcttgacgtggtggaagtcacatttgaaggtgaatcgtcagaagcggaaattaagcggattgtaaaaaaggccgaaagcggaggcgctgatattatcgttggaatcggcggcggaaaaacattggacacagctaaaggggttcgagatcgcttgaaaggtgccgcctgtgccattgttccgaccacggcttccaccgatgcgccgacaagcgctttgtcggtcatctattcagaggacggtgtgtttgaacgctattccttttatagcaagaacccagatatgatccttgtcgattcgacagtcattgctagtgctccgccgaaatttttagcagcaggcattgctgatgctcttgctacttgggtcgaggctcgagcttcttttgaagggcgtggcactacaatggcaggaggaaaagcaaccatcgctgggttagcgattgctgagaagtgtgagcaagttttatttgattacgggttgcttgcttatgaagccaataaacggggagttgtttcccacgcccttgaacaagtcatagaagccaatacactgttaagtggcctcgggtttgaaagtgggggtctcgcattggcgcatgctgtccataatggttttaccgtgcttgatggcgatatccatcatctaagccacggggaaaaggtctcgtttggcatattgacacaactagcgtgggaagaccgcaatcaattcgagattaaccgttacattcaattactgtcaaaacttggtttgcctgtgacatttaaagacctccatattgaagaaataagccgcgatgagttattaaaagtcgcacaaacagctttgcaagaaggcgaaagcagccataacttggcaagcgttccttctgccgatgacctcgttgatgccatggttgctgcagaccagtattccatcgcctatctcggaaaataa

SEQ ID NO: 44304 - protein, 368 aa, Bacillus clausii KSM-K16
MDEKIFISPSKYVQGRGVLDKTGEYVKDLGKKALLIADEFVWGIAANRVADSLKEVGLDVVEVTFEGESSEAEIKRIVKKAESGGADIIVGIGGGKTLDTAKGVRDRLKGAACAIVPTTASTDAPTSALSVIYSEDGVFERYSFYSKNPDMILVDSTVIASAPPKFLAAGIADALATWVEARASFEGRGTTMAGGKATIAGLAIAEKCEQVLFDYGLLAYEANKRGVVSHALEQVIEANTLLSGLGFESGGLALAHAVHNGFTVLDGDIHHLSHGEKVSFGILTQLAWEDRNQFEINRYIQLLSKLGLPVTFKDLHIEEISRDELLKVAQTALQEGESSHNLASVPSADDLVDAMVAADQYSIAYLGK

SEQ ID NO: 44305 - DNA, 1095 bp, Bacillus clausii KSM-K16
  CDS (1)..(1095): transl_table=11
atggagtcgcttgttgttcgcggagcaccacatgaatatgtattggaagaagggatactgtcttccttagaaactaaactaaaagcgagaggatttcaccatgttttagtggtccacggcgatgcctcttggaaagcggcagaacgattttggccggaatttacagctgttgaggcaacttactggcaatacaatggaatttgttcacaaaatcaaatggaccaactggcagctgttgtgcaaagcggcgagtacgatgcgattgtcggcgtggggggcggcaaactccttgacctagtcaaaggaggggcttaccaaacgaaacggccttatgtgctcgtgccgacgctagcctcaaattgtgccccttggacgccgcttgcggccgtttatacagatgaggggacctatacacactacgacgtttacccagaaaatgcgtcgttgctattacttgaaccgcgcttgcttttgactgcgccaaaagagctgtttgtcgctggcataggcgatacgcttgcaaaatggtacgaagcggatgtccagcttggttcgatggatgaaaagtccccagcattagaggtggcttattatacggctaaactatgtcgtgacattttgttggaaaaaagcgatgaagctttgcgcgcttttgacataggcgaagtgagcactgctttttgtaaagttgcagaaacgattattatgctaggtggcatggttggaggatttggggaccaatatggacggattgcaggagcccattcgatccataacggcttgacggttttagcggaaacacatggtattctccacggcgacaaagtggcatacggcattctcgtccaattggcgttagaagagaaatggcacgaaatcgaagcattgcggctattttatgaaaaagttggccttccatattcattaactcagttaggcatttccctccaagctgatttgcgttcagttgctgaaaaagcgacagtcgcagaagaatccattcatgtaatgccgtttccagtatcagcggatgctgtggtctctgccataaaaaaattggaagaaaaaaacgaagggctgcaagcaggagtgtaa

SEQ ID NO: 44306 - protein, 364 aa, Bacillus clausii KSM-K16
MESLVVRGAPHEYVLEEGILSSLETKLKARGFHHVLVVHGDASWKAAERFWPEFTAVEATYWQYNGICSQNQMDQLAAVVQSGEYDAIVGVGGGKLLDLVKGGAYQTKRPYVLVPTLASNCAPWTPLAAVYTDEGTYTHYDVYPENASLLLLEPRLLLTAPKELFVAGIGDTLAKWYEADVQLGSMDEKSPALEVAYYTAKLCRDILLEKSDEALRAFDIGEVSTAFCKVAETIIMLGGMVGGFGDQYGRIAGAHSIHNGLTVLAETHGILHGDKVAYGILVQLALEEKWHEIEALRLFYEKVGLPYSLTQLGISLQADLRSVAEKATVAEESIHVMPFPVSADAVVSAIKKLEEKNEGLQAGV

SEQ ID NO: 44307 - DNA, 1104 bp, Staphylococcus epidermidis RP62A
  CDS (1)..(1104): transl_table=11
atgtctaaatttatttatcaatcaccaggaagatatgtacaagggaaaggtattgttagctctatcgctgaagaaacagaacgtcttggtagtcacgcgttgattattgcagatgaagtggtttggaatatcactgaagaaaaaataaaagaaagtttctcagcaaataacaacgttgattttgaatatgaagtatttaaaggagaatcttctgaagaagaaattcaacgtatagttaaacaatataaagaaaaaaacattgacgttgttattggtttaggcggaggtaaagcgttagatacaggtaaagctgtagcatttgaacttaaagcaagcgtcatcgattttgcgtctacagcatcaatggatgcaccaacagcagcagtatctgttatttataacgaagatggatcatttagtggttatgaattctaccctaaaaaccctgatacagttatcgtagattctgaaattgttgcacaagcacctgtacgtttatttgcatcaggtatgagtgatggtttagcaacattaatcgaagttgaatctacacttcgtagacaagggcaaaacatgttccatggcaaacctacattagcaagtttagcaatcgctcaaaaatgtgaagaggttatttttgaatatggttacagtgcttatacttctgtagaaaaacatatcgtgacaccacaagtagatgctgtgattgaagccaatacattactttcaggtttaggatttgaaaacggcggattagcaggtgcacacgcaattcataatggattcacagctttagaaggagatatccaccacttaactcatggtgaaaaagtggcatacggtattttagtacaattagtacttgaaaatgcgccaactgaaaaattcatgaaatacaaaacattcttcgataatatcaatatgccaacaacattagaaggtcttcacattgaaaacacaagttatgaagaattagttcaagtaggtgaacgtgcattaacaccaaatgatacgtttgctaacttaagtgataaaatcactgctgatgaaatcgcagacgcaattttaactgttaatgatttatctaaaagtcagttcaactaa

SEQ ID NO: 44308 - protein, 367 aa, Staphylococcus epidermidis RP62A
MSKFIYQSPGRYVQGKGIVSSIAEETERLGSHALIIADEVVWNITEEKIKESFSANNNVDFEYEVFKGESSEEEIQRIVKQYKEKNIDVVIGLGGGKALDTGKAVAFELKASVIDFASTASMDAPTAAVSVIYNEDGSFSGYEFYPKNPDTVIVDSEIVAQAPVRLFASGMSDGLATLIEVESTLRRQGQNMFHGKPTLASLAIAQKCEEVIFEYGYSAYTSVEKHIVTPQVDAVIEANTLLSGLGFENGGLAGAHAIHNGFTALEGDIHHLTHGEKVAYGILVQLVLENAPTEKFMKYKTFFDNINMPTTLEGLHIENTSYEELVQVGERALTPNDTFANLSDKITADEIADAILTVNDLSKSQFN

SEQ ID NO: 44309 - DNA, 1188 bp, Thermobifida fusca YX
  CDS (1)..(1188): transl_table=11
atggcgaagacaaccacgatgccgacgacgcggtcgctgctcgccccggggcggtatgtgcaggggcggggggttctcgcggatctcggcacctatgtcgcagcgatcgggtccgtgccgctgatcctggctgatcccgtggtccggcagttgacggaggccacggtgaccgagtcgttccggcaggcggggctcgcggtgcggttcgaagagttcggcgggatccccaccgccgctgaggcgcggcgggtcgccgacgtgctctctgaccgcggctgcgacgtgatcatcggtctcggcggcggttcgacgatcgacactgccaaggctgccggggacaacgcggggatccggtgggtgagcgtgccgacggtggcgtccacggacgcccccacttcggcgctgtcggtcgtctacagcgaggaaggcgtcttcgaaacctaccggttctactcgcgcaaccccgaccttgtcctcgtggatacgcagctcgtcgccaacgctccggcacggttcctggtctcgggtatcggggatgcgctcgccacgtggatcgaagcgcgcgccgtgcagcgggcgaacggccccacgctcgccgggggaatggcgacgcacaccgggatcgcgttggccaaactgtcgtgggacctgttgtgggagaacgcgctgccagcggtcgaggcggtgcggagcaacctggtcacccccgccgtggaggcggtggtggaggcgaacacgctgctgtccggtctcgggttcgagtcgggaggcttggcggcggcgcactcggtccacgacgggttgacggtcgtgccccacacccaccacctcatgcacggcgagaaggtgaacatcgggtcgatcacccagctcatcttggaggcggcggcagccgaggagatccgcgagttcatcgagttcaccgcgcggctcggactgccgaccacgttgacggaggcaggcctgggccacgtggacgacgaagtgctccgcatggtggtggaggcggcgctcgccccggaggagacgatccacaacctgccgttctcggtttcggagaacgacctgttggacgcgttgaagatggtggaagagctggggcggtcggtccgtgccgaggctggactgcccgagcctcgcgccccgcaggaggagcgtccgccggtgccggccgcccgcatggcgtag

SEQ ID NO: 44310 - protein, 395 aa, Thermobifida fusca YX
MAKTTTMPTTRSLLAPGRYVQGRGVLADLGTYVAAIGSVPLILADPVVRQLTEATVTESFRQAGLAVRFEEFGGIPTAAEARRVADVLSDRGCDVIIGLGGGSTIDTAKAAGDNAGIRWVSVPTVASTDAPTSALSVVYSEEGVFETYRFYSRNPDLVLVDTQLVANAPARFLVSGIGDALATWIEARAVQRANGPTLAGGMATHTGIALAKLSWDLLWENALPAVEAVRSNLVTPAVEAVVEANTLLSGLGFESGGLAAAHSVHDGLTVVPHTHHLMHGEKVNIGSITQLILEAAAAEEIREFIEFTARLGLPTTLTEAGLGHVDDEVLRMVVEAALAPEETIHNLPFSVSENDLLDALKMVEELGRSVRAEAGLPEPRAPQEERPPVPAARMA

SEQ ID NO: 44311 - DNA, 1098 bp, Ralstonia eutropha JMP134
  CDS (1)..(1098): transl_table=11
atggtgcgtacgatgggttttccggggcaatatctgcaagggcctggcgccctgcggcaactgcccccgctactgcagcgcatgggctggcggcgcccgttggcgatctgcgacgccatcgttgcggagaaggtctggcccgccgtggcgcaggcactgtgcgaagccggagtcgcggcaaggcaactggcctttcccggggaatgcacgcgggcggtgatcgccgggatggtggatcaggcgtcgcagggcagccatgacgtggtcattggcctgggcggcggcaaggcactcgacaccgccaagggcgtggcgcgcgcgcttgacgttcccattgtcatttctccgaccattgcgtcgaacgatgcgccgacgagccgcgtgattgtcctgtacgacgatgcacaccggctggaaggcgccgaattcctgaagaccaatcccgcagcggtgatcgtcgacacgcaggtcatcgcgcaggcgccggtgcgcttcttcgccgccggcatcggcgacgccatcagcaagaaattcgaggctgcgcaatgcagggcgacgggacgcaacaacgcattcggaacgccgccgctggatacggcattgctgctcgctggcgctacctatgaaacactggtcaaacacggacctgccgcctgcgaagctatccggcgccaggagcccaatgaagccgtggaacgtgtggtcgaggcgaccgtgctgctcagtggcctgggcttcgaaggcggaggactggcgcttgcccatgcgctgacgcgcggcttcagcgcggtccccggcatggcgcaggcgctgcatggcgaacaggtcgcctttggtgcgctggtccaactggtggccgagcagcgagaccaggaggagatcgcagaacttgtcgatctgctctgcgcggtcggcctgcctgtcacgctgcaacagctaggggtggcgcccgagaaccatcacgacagcattgccaccatcgtccaggccacgttggcgggacagacgagcaacgtcatcagcccttctctcaaccctcagcaactggctgcggcgctcgcgcatgccgacagtatcggcacgctggccctcggctga

SEQ ID NO: 44312 - protein, 365 aa, Ralstonia eutropha JMP134
MVRTMGFPGQYLQGPGALRQLPPLLQRMGWRRPLAICDAIVAEKVWPAVAQALCEAGVAARQLAFPGECTRAVIAGMVDQASQGSHDVVIGLGGGKALDTAKGVARALDVPIVISPTIASNDAPTSRVIVLYDDAHRLEGAEFLKTNPAAVIVDTQVIAQAPVRFFAAGIGDAISKKFEAAQCRATGRNNAFGTPPLDTALLLAGATYETLVKHGPAACEAIRRQEPNEAVERVVEATVLLSGLGFEGGGLALAHALTRGFSAVPGMAQALHGEQVAFGALVQLVAEQRDQEEIAELVDLLCAVGLPVTLQQLGVAPENHHDSIATIVQATLAGQTSNVISPSLNPQQLAAALAHADSIGTLALG

SEQ ID NO: 44313 - DNA, 1191 bp, Anabaena variabilis ATCC 29413
  CDS (1)..(1191): transl_table=11
atgcctaatcaattatctaatcaaaccttgtctactcaaactgctagttcattaatcaccctcgcggttgccccggcaaaagtaatccgtggctctaatatattgcaggtagccgccacagaaattgccaagttgggcagtcgtcctttaattgtggcaggtaatagcaccgttgctatcagccaagagagtctgcaaccaattttagaagcccagaatctgcacgttgcccaagcctcctacggtgcagattgcgcggaagctagcttaaaagccttgaggaaagcagccaaagaacataaagccgatgccattatcggcattggtgggggtaaagctttagatacagctaagttagttgcccatcagttagatttacctgtagccacaattcccacctcagcagctacctgtgccgcttggacggcgctatccaatgtatattctgaagacggggcgtttctttacgatgtggctttatctcgctgtcccgatttactaatacttgactacgacttgattcaaacagcaccacaacatacactagtggcagggattggggatgcgatcgctaaatggtacgaagcttccgttagtagtggtcatctagaacaaactttaattatctccgcagtccaacaagcgcgagttttacgtgatattttattccaaaagtcggcaattgccttacaacaaccaggcagtgaagcttggcgggaagttgttgatgccacagttttactagctggtgtcatcggtggactaggtggggcccagtgtcgtacagtcgctgcccatgcagtccataatggtttaactcacattgccggacacagtagcatccacggtgaaaaagtcgcctatggaattttggtgcaactgcgtctggaagaaatggtgcaaggcaatcaactagccaccgcctcacgacagcaactattaaagttttatgcagagattggcctgccacaaaaattaggagacttggggttgggtaatattaccttaggcgagttgcaaacagccgccgaaatcgctttaacacctcaatctgacattcatcgcctaccattcaaagttgcgttggaacagttaatggcagcgatggtttctaccactgcaccaacagatagtagagactcagttcatcgtgtctccaccaggggaataagtgacgaggttgaggaatga

SEQ ID NO: 44314 - protein, 396 aa, Anabaena variabilis ATCC 29413
MPNQLSNQTLSTQTASSLITLAVAPAKVIRGSNILQVAATEIAKLGSRPLIVAGNSTVAISQESLQPILEAQNLHVAQASYGADCAEASLKALRKAAKEHKADAIIGIGGGKALDTAKLVAHQLDLPVATIPTSAATCAAWTALSNVYSEDGAFLYDVALSRCPDLLILDYDLIQTAPQHTLVAGIGDAIAKWYEASVSSGHLEQTLIISAVQQARVLRDILFQKSAIALQQPGSEAWREVVDATVLLAGVIGGLGGAQCRTVAAHAVHNGLTHIAGHSSIHGEKVAYGILVQLRLEEMVQGNQLATASRQQLLKFYAEIGLPQKLGDLGLGNITLGELQTAAEIALTPQSDIHRLPFKVALEQLMAAMVSTTAPTDSRDSVHRVSTRGISDEVEE

SEQ ID NO: 44315 - DNA, 1101 bp, Synechococcus sp. CC9605
  CDS (1)..(1101): transl_table=11
atggttcgatccatctcgtcccattccattgcccccgccagcgtcttgcggggggatggagtctgggatgaggccttgcctcagatcaaatccctctgttcacgtccgttggtgctcggtcgcagtgcttccactgcggatcagcgtcagcttttggtgtcggatctccaggcccaggggctcaatccccttcaggctcagctccagttcgattgctgtgagcaggatctgcagagagtggctgcggaagccaaggtctgtgacgccgttctggctgcaggcggtggaaaagtgctggacgccggcaagctgctggcccatcgcctctctcttccctgcgtcaccgttccgctgagtgcctccacctgtgctggctggacggctctctccaacatctattcccctcagggtgcttttgaaggggatgtggccctggatcgttgcccagatctacttgtctttgaccatggcctggtgcgccaggcgcctccgcgcaccttggccagtggcgtcgctgacgccctggccaagtggtacgaagcctcagtgagcagcggcgacagcagcgatggtctggtgcagcaggccgtgcagatggcacgggtgctgcgggatcaactgctgctcgacagcccagctgcgctgcgggacccagacagtgccgcctgggtgcgcaccgctgaagcctgtgcccttaccgccggggtgatggggggactcggcggcgcccgttgccgcactgttgcggcccacgccgttcacaacggcctcacccagcttgaggcttgccaccacgttctccatggcgagaaggtgggtttcggcatccttgtgcagctccgcctggaggagcgtctgggtggtaaccggcttgcaggccatgcgcaccgccagctgttgccgctgcttcggcagctcggcttgcccgtcagtcttgatgatctgggtttggcacaggccagcctcagtcagttgcaggaggtgtgtcgcttcgcctgccgcgagggttccgatctgcatcatttgcccttcgctgtgacgcctggtgctttgctggaggcccttgtgggtgctgcggaactaagccccagcagcctttga

SEQ ID NO: 44316 - protein, 366 aa, Synechococcus sp. CC9605
MVRSISSHSIAPASVLRGDGVWDEALPQIKSLCSRPLVLGRSASTADQRQLLVSDLQAQGLNPLQAQLQFDCCEQDLQRVAAEAKVCDAVLAAGGGKVLDAGKLLAHRLSLPCVTVPLSASTCAGWTALSNIYSPQGAFEGDVALDRCPDLLVFDHGLVRQAPPRTLASGVADALAKWYEASVSSGDSSDGLVQQAVQMARVLRDQLLLDSPAALRDPDSAAWVRTAEACALTAGVMGGLGGARCRTVAAHAVHNGLTQLEACHHVLHGEKVGFGILVQLRLEERLGGNRLAGHAHRQLLPLLRQLGLPVSLDDLGLAQASLSQLQEVCRFACREGSDLHHLPFAVTPGALLEALVGAAELSPSSL

SEQ ID NO: 44317 - DNA, 1080 bp, Synechococcus elongatus PCC 7942
  CDS (1)..(1080): transl_table=11
gtgttacgaggctggggcgcactctcagaggcaggatctgcgatcgcccgcgttggtcagcgtccccttgtggtgggtggcgatcgcgccagagcactcgtccaagacagtttgacggcgatcgcttcagaacaatccctgaccctaggttggggcagcagcttgccggactgtagtgaagcggttttggcacggctccagcaagcagcaaccgagcatcaagctgattgcattctaggtgtgggcggcggtaaggcgctcgatacggccaaactgctggggcatcaactgtcgctgccggtgatcaccgtgccgacgagtgcggcgacctgtgcggcttggacagcattggcgaatgtctataccgatgccggggcttggctctacgatgtcggtctcgatcgctgtcctgagttgctgattctcgactttgaactgattgcccaagcgcccccccgcaccctagcggcgggaattggggatgcgatcgccaagtggtacgaagcttccgtcagcagtggtcatcgccaagaaactttggtcgttgcggcggttcagcaagctcgtgtcctgcgtgatctgctcttccagaaatcggctgccgcgatcgcggaacctggcggtgagcaatggtacgaagtggtggaagccaccgttttacttgcaggcgtgattggggggttaggtggggcgcaatgccgcacggtggctgcccatgctgtccacaatggcttgacccatctgcccgcttgtcatgattggctgcacggcgagaaggttgccttcggtattttggtgcagttgcgtttagaagaactgcaaggcaccaacccgctggcagcaaccgcacggcaacaactgctgagcttctatgccgatctggggctgccgcgccaatggtctgacatgggcttagcgtccgtcagcttagcggatttgcagcaagcggcaattctggcctgtgcgcccgagtcggacattcaccacctgccttttgcggtggatcctgatcagcttttggcggcgatggtttccacgactaccccgatcgcccgcagcaacagtgtggtggctgaatga

SEQ ID NO: 44318 - protein, 359 aa, Synechococcus elongatus PCC 7942
MLRGWGALSEAGSAIARVGQRPLVVGGDRARALVQDSLTAIASEQSLTLGWGSSLPDCSEAVLARLQQAATEHQADCILGVGGGKALDTAKLLGHQLSLPVITVPTSAATCAAWTALANVYTDAGAWLYDVGLDRCPELLILDFELIAQAPPRTLAAGIGDAIAKWYEASVSSGHRQETLVVAAVQQARVLRDLLFQKSAAAIAEPGGEQWYEVVEATVLLAGVIGGLGGAQCRTVAAHAVHNGLTHLPACHDWLHGEKVAFGILVQLRLEELQGTNPLAATARQQLLSFYADLGLPRQWSDMGLASVSLADLQQAAILACAPESDIHHLPFAVDPDQLLAAMVSTTTPIARSNSVVAE

SEQ ID NO: 44319 - DNA, 1092 bp, Moorella thermoacetica ATCC 39073
  CDS (1)..(1092): transl_table=11
ttgctggaacgaattatcgcccccgggagctacctccggggtccggctgtcattgaaaaagccggccaggctctggcaaggctgggcgccagggcctgcctggccggaggccaccgggccctggcggcggcagccccggccctgcaggaggccctatcttcagccggggtagaaccggcggggcaggtctggtacgggggagaatgttgcccggaaaatattgccagggtagcgacaactgttaaggaaacaggagccgatttcttgataggggttggcggcggcaaggccctggataccgccaagggagccgcctggcaggcaggggtgcccctggtgacggtgccgaccatcgctgctacctgcgccgcctttacctccattgccatcatctatgatcgggagggccacttcttggctatatcccacgaggcggcgaatccgtctctggtcctggtagacagccggatcatcgctgccgcccctggccgttacctggctgccggcatgggggacaccattgccaagtatatcgaactgcgtgccaccagcacggcagccgcccggcatctagccctggaaggcgccctggagttggctcgcctatgctatgacagcatcctggccgccgggccaggtgccagggcagcggtagatgaccgggcagtcaccccggatctggagaaggtcattgacgccgtgattcttatcagcgggttggtcagcggcctgggaggcgatgacgggcggactgccggcgcccacggcgtttatgaaggcttaaccgcttcccccctgacccgttcttactgccatggagaactggtagccttcggcaacctggtccagctggtcctggaagggagagagaggggggaaatcaggggagtggctgattttaaccgccgggtcggcctgccggtaaccctggaaggtgtggggctatccccggaggacgggccttccctggacctggtcagccgggcggcggcagagagcccggatatggccaacatgcccttcccggtgacggccaccatgatccgggaagccctgctggcagccgaccgcctcggccgggagacagcttag

SEQ ID NO: 44320 - protein, 363 aa, Moorella thermoacetica ATCC 39073
MLERIIAPGSYLRGPAVIEKAGQALARLGARACLAGGHRALAAAAPALQEALSSAGVEPAGQVWYGGECCPENIARVATTVKETGADFLIGVGGGKALDTAKGAAWQAGVPLVTVPTIAATCAAFTSIAIIYDREGHFLAISHEAANPSLVLVDSRIIAAAPGRYLAAGMGDTIAKYIELRATSTAAARHLALEGALELARLCYDSILAAGPGARAAVDDRAVTPDLEKVIDAVILISGLVSGLGGDDGRTAGAHGVYEGLTASPLTRSYCHGELVAFGNLVQLVLEGRERGEIRGVADFNRRVGLPVTLEGVGLSPEDGPSLDLVSRAAAESPDMANMPFPVTATMIREALLAADRLGRETA

SEQ ID NO: 44321 - DNA, 1131 bp, Clostridium perfringens ATCC 13124
  CDS (1)..(1131): transl_table=11
atgagaaaggcttttatatgcccaacaaaatatgttcaaggagaaaatgaattacttaatttaggttactttgtagagacttacggaaagtcagcacttttaatagctcatccagaagatataaagagagttaaagataaattagatgcaacagcaaagaaatttaacattgaatttgtagaaggcggatttaaaggtgaatgttcacgtcaagaagttaaaagacttcaagatcttgcaaaggaaatgaaatgtgattgtacagtaggtcttggtggaggaaaagctttagacacagctaaatgtgttgctgaaggtgaaaaacttatagtagtaccaacaatagcagctacagatgctccaactagtcactcagcagttttatatacagaagatggatcatttgatgattatgcatactttaaagcaagcccaagtgttgttttagtagacacagaggtaatagcaaaagctccaactcgtttcttagtagcaggtatgggagatgctttatcaacttactttgaagcaagagcaacatcaagttcatttactaaagtcaatgcgggattaccatgtggggtaagagaagaaaaatgtagaccagcaattggaacaaatgcttcattagcacttgctaagctttgctatgaaacattattagaagacggaaagaaagctaaagatgcttgtgattgtaactgtgttactaaatctttagaaaatatagtagaaacaaacatattattatcaggtttaggatttgagagtggtggattagctgcagctcatgctatacatgatggtttaacaatattagaaggaacacatggatatttccatggagaaaaggttgcttttggaacaatagctcaattagttcttgaaaatgcaccaaaagaagaattatatgaagttttagatttctgtttagaaataggtcttccagtatgtcttgaagatataggtgtaacagaagtttcagatgaagaattatttgaagttgcagaaaaagcttgtataccagaagagtcaatttactcaatgccatttggaatagaagtttcagaagtagtatcagcaattaaattagcagataagataggtaaagactacaaaaatagaaaataa

SEQ ID NO: 44322 - protein, 376 aa, Clostridium perfringens ATCC 13124
MRKAFICPTKYVQGENELLNLGYFVETYGKSALLIAHPEDIKRVKDKLDATAKKFNIEFVEGGFKGECSRQEVKRLQDLAKEMKCDCTVGLGGGKALDTAKCVAEGEKLIVVPTIAATDAPTSHSAVLYTEDGSFDDYAYFKASPSVVLVDTEVIAKAPTRFLVAGMGDALSTYFEARATSSSFTKVNAGLPCGVREEKCRPAIGTNASLALAKLCYETLLEDGKKAKDACDCNCVTKSLENIVETNILLSGLGFESGGLAAAHAIHDGLTILEGTHGYFHGEKVAFGTIAQLVLENAPKEELYEVLDFCLEIGLPVCLEDIGVTEVSDEELFEVAEKACIPEESIYSMPFGIEVSEVVSAIKLADKIGKDYKNRK

SEQ ID NO: 44323 - DNA, 1134 bp, Trichodesmium erythraeum IMS101
  CDS (1)..(1134): transl_table=11
atgattaaatctactcatatctcccagacagctacaaccttactatctctaaacatagcccctactcaaattattcgaggtaaaaatgctctggcccaatcaggagaggcgatcgctcgtattggccatcatcccctaatcgttgggagtcctcgctctttgaacatcatcctgccccacctccaacccttattacaaatccataatttaaaattcacccaagctaactatggttcagactgtagtgaaactagtttagccaatctttctcaagctgtagccacacaaaaaccagacctaataattggtattggtggtggtaaagctcttgacacagcaaaactcctagcttataaatgtcatttgcccataattaccattcccacctcagcagctacttgcgcagcttggacagcattatcaaatatctactcagaccaaggggccttcttatacgatataagtttagctaaatgtccagaattgctaattctagattatggaattattaaaactggcccttcacggactttagtggctggtattggagatgcgatcgccaaatggtatgaagcttcagtctctagtggccattcagagtcaacaatgattatttctgctgtccaacaagccagagtactaagggatatcctttttcaaaaatcaacttttgccctagaacaaccaggaggagaaacctggcaagaggttgtagatgcaacagtattattagcaggtttaattggaagtattggtggtgcacaatgtcggactgtggcagcccatgctattcataatggcctcactcatttatctgctagccatgaaaaattacatggagaaaaagtcgcttatggtatattggttcagctaaggttagaagaaatgctacaaagcaatcaactagctgcaactgctagacaacaactgttaaaattctataatcagattggtttaccaaaaagcttaaatgacttaggcttaaaagaaattactttatctgaattacgccatgttgctgaagttgcttgtcatccaaattctgacattcatcggttaccatttagaataattccagagcaattagtagcagcaatggtttctacaacagtcccattagagctagagaaataa

SEQ ID NO: 44324 - protein, 377 aa, Trichodesmium erythraeum IMS101
MIKSTHISQTATTLLSLNIAPTQIIRGKNALAQSGEAIARIGHHPLIVGSPRSLNIILPHLQPLLQIHNLKFTQANYGSDCSETSLANLSQAVATQKPDLIIGIGGGKALDTAKLLAYKCHLPIITIPTSAATCAAWTALSNIYSDQGAFLYDISLAKCPELLILDYGIIKTGPSRTLVAGIGDAIAKWYEASVSSGHSESTMIISAVQQARVLRDILFQKSTFALEQPGGETWQEVVDATVLLAGLIGSIGGAQCRTVAAHAIHNGLTHLSASHEKLHGEKVAYGILVQLRLEEMLQSNQLAATARQQLLKFYNQIGLPKSLNDLGLKEITLSELRHVAEVACHPNSDIHRLPFRIIPEQLVAAMVSTTVPLELEK

SEQ ID NO: 44325 - DNA, 1137 bp, Synechococcus sp. CC9311
  CDS (1)..(1137): transl_table=11
atggcctacccactggaacaaggctgcattcatcagcgtccgctagccgtgctggcgtcccctggtcgctacgtgcaaggtccaggggcaacgcatgaactcggtcgagagttaaaacgattggggctggccgattctgtgttgttcattgctggcggtacagcacagcgctgcctagcccgcatctggcaagcagagctcccgccccttggcctcacccctgtgattgaaacctttggaggggaatccagcgaagcggaaattgatcgtcttgttgaacttgccaaaacccatacgttcacagcagttgtgggcgccggtggtggcaaagcatccgacaccgcgcgcgccgtcgcgaacgagctggaacttcccgtggtgatcacccccaccctggcaagcacagattccccttgcagtgcactttcagtgctgtacacggagcaaggggagatgctgagttatcgcttctatacccgccatcctgcgttggtgctcgtcgacaccacagtgatcgcgcaggctcctaaacgacagctcgtggccggccttggcgatgcacttgccacctggtttgaagccagaacggtgcgccagagccacgtgaacaatcagttagggggcaagcccacgacatcgggaacagccctggcaaagctttgccacgagatcctgctaaccgacggtcctgccgcttgtgccgcagtggatgcaggtgttgcgaccccagcactggaacgcatcgttgaagccaacaacctgctttcaggtcttggctttgaaaacggcggacttgctgctgcgcatgcggttgccaacggcttcagcatgattgccggcagtcaccgcatgctccatggagagaaggtggccatgggcctccacacccagttggttctcgaaggacaacctcaatccgaaatttgcgaaatttttgagtactgcagaagcgtggggcttcccaccaccttggcccaattgggagtcaacgccgatagcgacaaagacattcaaaccattgctgaacgtgcagtgatgcctggagaaaccatccacaacgaaccctttgaagtcagcgccgctgccgtggactgcgctctcaaagccgccgatcaacaagggcgcgcctatgcctaa

SEQ ID NO: 44326 - protein, 378 aa, Synechococcus sp. CC9311
MAYPLEQGCIHQRPLAVLASPGRYVQGPGATHELGRELKRLGLADSVLFIAGGTAQRCLARIWQAELPPLGLTPVIETFGGESSEAEIDRLVELAKTHTFTAVVGAGGGKASDTARAVANELELPVVITPTLASTDSPCSALSVLYTEQGEMLSYRFYTRHPALVLVDTTVIAQAPKRQLVAGLGDALATWFEARTVRQSHVNNQLGGKPTTSGTALAKLCHEILLTDGPAACAAVDAGVATPALERIVEANNLLSGLGFENGGLAAAHAVANGFSMIAGSHRMLHGEKVAMGLHTQLVLEGQPQSEICEIFEYCRSVGLPTTLAQLGVNADSDKDIQTIAERAVMPGETIHNEPFEVSAAAVDCALKAADQQGRAYA

SEQ ID NO: 44327 - DNA, 1191 bp, Nostoc punctiforme PCC 73102
  CDS (1)..(1191): transl_table=11
atgtctaatcaactttctactcaaccttctttgtctactcaaacctctagctcattatttacgctcacagttgccccggcaaaagtcatccgtggttctggggtattgcaagcagccgcagcagagatcgcctgtttgggaagtcgtcccttaattgtggcaggtgaatcgactctcgctatcagccgaaagaatttgcaaccagttttagaaacgcaacagttacatcctgttcaagcttcttatggtgcagattgctgcgaagctagcctgaaatctttacagaagaaggcaaaagaacataaagctgatgtgattattggtgttggtggcggcaaagccttagatacagcaaaattactcgcgcagcagttacagttgccagtggtgacaattccgacatcaggggctacctgtgcagcttggagtgccttgtcgaatgtttattcggaaaatggggcatttctctacgatgtggggctgtctcgttgtcccgatttactgatactcgattatgacttgattcaaactgcaccacaacggactttagtagctggaattggtgatgcgatcgctaagtggtatgaagcctctgttagcagtgggcatttgcaagacactttaattattgctgcggtgcaacaagcaagagttttgcgagatatcctcttgcaaaagtcagccgccgccttgaaggaaccaggtagcgaagtttggcgagaagtcgtagacgcaagtgttttattagctggggtagttggaggacttggaggggcccagtgtcgcacagttgctgcccatgccgtgcataatggtttaactcatatttcaggacatggcagtattcatggcgaaaaggttgcttttggaattttggtgcaactgcgtttagaagaaatgctacaaggcaatcaactagcagcatcagcacgacaacagttgttaaagttctacacagaaattggactaccccaaaaattaagtgatttgggattgggcaatattacattaggtgagttacaaacagccgccgaaattgctctagttcctaattctgacatccatcgactaccgtttaaagtcgcgccagaacagttgatggcagcaatggtttccaccactgcacctatagatagtaaagacatgaatcgagtttcgcccaagggaatcagtgacgaggttgaagaatga

SEQ ID NO: 44328 - protein, 396 aa, Nostoc punctiforme PCC 73102
MSNQLSTQPSLSTQTSSSLFTLTVAPAKVIRGSGVLQAAAAEIACLGSRPLIVAGESTLAISRKNLQPVLETQQLHPVQASYGADCCEASLKSLQKKAKEHKADVIIGVGGGKALDTAKLLAQQLQLPVVTIPTSGATCAAWSALSNVYSENGAFLYDVGLSRCPDLLILDYDLIQTAPQRTLVAGIGDAIAKWYEASVSSGHLQDTLIIAAVQQARVLRDILLQKSAAALKEPGSEVWREVVDASVLLAGVVGGLGGAQCRTVAAHAVHNGLTHISGHGSIHGEKVAFGILVQLRLEEMLQGNQLAASARQQLLKFYTEIGLPQKLSDLGLGNITLGELQTAAEIALVPNSDIHRLPFKVAPEQLMAAMVSTTAPIDSKDMNRVSPKGISDEVEE

SEQ ID NO: 44329 - DNA, 1107 bp, Listeria monocytogenes str. 4b H7858
  CDS (1)..(1107): transl_table=11
ttgttgaataaagaattgattgttcgcggagctccgcaagaatatttatgccaagtaggcgcgtgggatacattacctactcacctagaacgccgcggtttgaaaaatgtattagtagttcgtggaaatgcttcttgggaagtcgctaaaaagaaattccctgttttatcaactgttacatctacttttgaagtatataatggtggttctacctacgaggagcgcgatcgtctggtggcaatcatggaaacaaataagatggatgcgattatcgcagtaggtggcggaaaaatagctgacgtatgtaaagcgacagcagcagttctacgtttaccagtcattatcttaccgacacttgcatcaacttgtgccgcttatacaccacttagtgtgatgtacgacgaagagggcgctatgattcgttacgatgtgtttgcgagtagtaatgcgctgttattaattgatccggaaatgattttagactcaccgaaagagttactagttgctggaattggcgatacgttagccaaatggtacgaagcagacgtgattattaattccttaccaactaaatcagtcgaaattgaaatcgcgcattttgctgccaaaatgtgccgtgataacttgttgcaatatagcgaagaagcacttgctgccatggacaaacaagtattgaatgaagcgtttgttaaaattattgagacgaatattttagttggtggaatggtcggtggttttggcgatgattatggacgttgtgcaggagcgcattcgattcatgacgcgctaacgatggttccagaaacacatcacttattgcatggtaataaagtagcttatggtattttagttcaattagtaatagaaaatagatgggatgaaatcgagcgtttgttgccattttattctgagcttggtcttccgatgagtttatatgatatgggacttgcgacacttgcggaagaaacgcttgtggccgtatctaaacgtgcaacggagccacatgaaacaatccatatgatgcccggtgaaatgacagctgatgtagtattaaatgcgatgaaacagttagaagatagtatggcaatgaaacgagtggctaagtaa

SEQ ID NO: 44330 - protein, 368 aa, Listeria monocytogenes str. 4b H7858
MLNKELIVRGAPQEYLCQVGAWDTLPTHLERRGLKNVLVVRGNASWEVAKKKFPVLSTVTSTFEVYNGGSTYEERDRLVAIMETNKMDAIIAVGGGKIADVCKATAAVLRLPVIILPTLASTCAAYTPLSVMYDEEGAMIRYDVFASSNALLLIDPEMILDSPKELLVAGIGDTLAKWYEADVIINSLPTKSVEIEIAHFAAKMCRDNLLQYSEEALAAMDKQVLNEAFVKIIETNILVGGMVGGFGDDYGRCAGAHSIHDALTMVPETHHLLHGNKVAYGILVQLVIENRWDEIERLLPFYSELGLPMSLYDMGLATLAEETLVAVSKRATEPHETIHMMPGEMTADVVLNAMKQLEDSMAMKRVAK

SEQ ID NO: 44331 - DNA, 1122 bp, Crocosphaera watsonii WH 8501
  CDS (1)..(1122): transl_table=11
atgccaacaaaaaccactaaaattactccagttaccaccaagcttaattccttatttgtttccccaactcaggtaattcaaggtgaggggattatatcccaagcaggaaaaggtatctctcgtttgggtaagcgtcctttactggtggggggtaagcaaacccttgagctaatctcagcacatttaaagcccattttcaaacaatttaagttaacagcagcgtttgatagctacgcccctgactgttcggaaacttccctaaaaaacttgaccgaagctacccaaaatcatcaagctgatttgattattggtgttggtggaggaaaagctcttgatacggctaaattactcgcttatcagcaacaattacccattgttaccattcccacctctggggcaacttgcgccgcttggacagccctttctaacgtctattctaaccagggggcatttcaatacgatgtgccattatcccgttgtcctgatttactaattttggactataacctaattaaagcagccccgaaaaggactttagtggccggtattggtgatgcgatcgccaaatggtatgaagcttctgttagtagcggccagtctgaggccaccctcaccattgctgcggtacaacaagcgagggtattacgggacattctcttacaaaagtcggttaaggctttggataagataggaggagaagactggcgagaagtggtcaacgctacggtactgttagctggtgttattggtgggttaggaggggcaaactgtcgcactgtggcagcccatgctgtccataacggcctaacccatattcccgcagcacatcacgccttacacggggaaaaggtggcttatgggatcttagttcaattacgtctagaagagatgatacaggggaataaattagcggccacatctcgacaacaattgttaaaattttatgaagaaattggcttacccagaagtttagaagatttaggtttatctcaagtaactttagaagaattacgtcaggcggccatagtcacttgtcatcctaattctgatattcatcgtttaccgtttaaggtatccccagaacaattattatcggcaatggtatctactgtaggggcataa

SEQ ID NO: 44332 - protein, 373 aa, Crocosphaera watsonii WH 8501
MPTKTTKITPVTTKLNSLFVSPTQVIQGEGIISQAGKGISRLGKRPLLVGGKQTLELISAHLKPIFKQFKLTAAFDSYAPDCSETSLKNLTEATQNHQADLIIGVGGGKALDTAKLLAYQQQLPIVTIPTSGATCAAWTALSNVYSNQGAFQYDVPLSRCPDLLILDYNLIKAAPKRTLVAGIGDAIAKWYEASVSSGQSEATLTIAAVQQARVLRDILLQKSVKALDKIGGEDWREVVNATVLLAGVIGGLGGANCRTVAAHAVHNGLTHIPAAHHALHGEKVAYGILVQLRLEEMIQGNKLAATSRQQLLKFYEEIGLPRSLEDLGLSQVTLEELRQAAIVTCHPNSDIHRLPFKVSPEQLLSAMVSTVGA

SEQ ID NO: 44333 - DNA, 1026 bp, Exiguobacterium sibiricum 255-15
  CDS (1)..(1026): transl_table=11
atgattcgtcaagccgttttacaatacatacacgaagaacaagccgtcgatcggctttcagaattgttacgggggagaaaagcggtgctgattcacggtgaacaggcattaaaatcgtccgaacagtatttgccggaattgccgaagctgctgttttccggacattgtacagatcagcaggtaatagagcttacagaacaatgtgccgcgtacgaaatgatcatcgctcttggcggcgggtccgtcattgatacggccaaacaagtggccgtcaaacgaaattacccgttgattgtcattccgacgatcgtctcgaactgtgccccgtggacaccccttagtgtcatgtatgatgaacggggtcggtaccttcgttttgacacgattcctgtcgtcattgaagcattattgctcgactatcggattttagcagccagtccatatgattattttgttgccggactggtcgatacattagcgaaatggtacgaagcccgggcgctgagcggatcgacttctgaccatcctgtcgtcgaatcggccttacggatggcagaacactgtaaacgattaattttgcagacaccgatcagtccaaaacaatttcaggagtattcgtccccgattcaacatctggtggagacggtcattccgcttgccggaagtgtcggtggattcggtgacgaagcaacacgtggggcgattggtcacggtgttcataatgcgttatctccgttcccgtcgacgaaccggattttacacggaagtaaagtcggttacggcttattgattcaagagttgttgttagatgaaacggtgttctataacgagttgctacagtatttgatggaaaacaaacaaccgacgacgagtacagcgcttggattgacggaagcggagcgagccgacttggcgcaacgaattggtcgagaaccactctgtcaattgattgagacggattggtcgaaagcgaccgttctttcgactttaatgaaaaatgaccgggaagccgttctcataccttga

SEQ ID NO: 44334 - protein, 341 aa, Exiguobacterium sibiricum 255-15
MIRQAVLQYIHEEQAVDRLSELLRGRKAVLIHGEQALKSSEQYLPELPKLLFSGHCTDQQVIELTEQCAAYEMIIALGGGSVIDTAKQVAVKRNYPLIVIPTIVSNCAPWTPLSVMYDERGRYLRFDTIPVVIEALLLDYRILAASPYDYFVAGLVDTLAKWYEARALSGSTSDHPVVESALRMAEHCKRLILQTPISPKQFQEYSSPIQHLVETVIPLAGSVGGFGDEATRGAIGHGVHNALSPFPSTNRILHGSKVGYGLLIQELLLDETVFYNELLQYLMENKQPTTSTALGLTEAERADLAQRIGREPLCQLIETDWSKATVLSTLMKNDREAVLIP

SEQ ID NO: 44335 - DNA, 1110 bp, Exiguobacterium sibiricum 255-15
  CDS (1)..(1110): transl_table=11
atgtcagaacgtgttttcattagtccggcgaagtatgtccaagggaaaaatgtcattgatcggctcggtacatatgtgagtccgattggagacgtggccctagtgatcgccgatgatgtcgtttggaaaatcgtcgaggaacgtgtccatgcttcattttcagcagaaggaatcaaaattgaaaaagcagatttcagcggtgaagcctcaaaacatgaagtcgaacggattgccgcacaagccaaggatgccggcgtgaaattcgtcatgggggtcgggggcgggaagacgcttgatacggcaaaagccgtttcggacgagttccatctgccggtcgtcatcgtaccgacgatcgcttcgaccgatgcgccgacaagtgcactgtccgtcatctattcggatgagggaatctttgagagttaccgtttttataacaaaaatccggatcttgtcttggtcgatacaaaattgatttctgaagcgccggcccgtttctttgcttcggggattgccgatgcactggcgacatgggtcgaggtccggagtgtcattgcctttggaggcacgacgatggccggtggacggccgacgattgcggcggaagcgattgcgaaacgctgtgaagaagtgttgttcgagcacggacgtctcgcctatgagtcggttcaagcaaaggtcgtcacaccggcgcttgaagctgtcgttgaagccaatacgttgttgagtggtcttgggtttgaaagcggtggactggcggcagcacatgccatccataacggattcacggcgcttgaaggagacattcaccatttgacacacggggaaaaagtcgcgttcgggacgctcgtccagttggcgctcgaagaacacccgcaggaagaaatcgaacggtacatttcgttctatatggatcttggactgccggtcacactggaagacgtcaaactaaaagatgcttcacgcgaagacatcttaaaggtcggtcacgcagcgacggcagaaggggagacaattcacagcggctttgatgtaacggcggatgaagtggcggatgccatcattgccgctgaccgctattcaaaagcttatcaggcgaaattgaagaactga

SEQ ID NO: 44336 - protein, 369 aa, Exiguobacterium sibiricum 255-15
MSERVFISPAKYVQGKNVIDRLGTYVSPIGDVALVIADDVVWKIVEERVHASFSAEGIKIEKADFSGEASKHEVERIAAQAKDAGVKFVMGVGGGKTLDTAKAVSDEFHLPVVIVPTIASTDAPTSALSVIYSDEGIFESYRFYNKNPDLVLVDTKLISEAPARFFASGIADALATWVEVRSVIAFGGTTMAGGRPTIAAEAIAKRCEEVLFEHGRLAYESVQAKVVTPALEAVVEANTLLSGLGFESGGLAAAHAIHNGFTALEGDIHHLTHGEKVAFGTLVQLALEEHPQEEIERYISFYMDLGLPVTLEDVKLKDASREDILKVGHAATAEGETIHSGFDVTADEVADAIIAADRYSKAYQAKLKN

SEQ ID NO: 44337 - DNA, 1188 bp, Synechococcus sp. WH 5701
  CDS (1)..(1188): transl_table=11
gtgccagcgtctgacgcctcgatggtgacagccctcagtcagcatgcgatcgcccccgcccgactggtgcgggggccttcggcatggtcggcttcgctcgacgccctgccctccctctgccgccgcccgctgctgctgggccgcagccaggccaccgcacatctgcgcgatcaggcctgctccgatctgctgcggttgggcctggagcccctgtccgccacccttcagttcgactgctgcgaggacgacctccggcgcctggcggcagaagcccagaccggccgctgcgacggggtgatcgccatgggaggcggcaaggtgctggacgcaggcaagctgctggcccatcgcctcggtctggcctgcatcaccgtgcccaccagcgccgccacctgcgccggatggaccgccctggccaatctctattccgtcgaaggggccttccgctccgatgtggcgctggatcgctgccccgacctgctgatcttcgatcacaatctggtcctgcaggctcccacgcgcaccctggccagcgggatcgccgatgccattgccaagtggtatgaggcctcggtgagcagtggctcgagcggcgatggtctggtgcaacaggcggtgcagcaggcccgtgtcctgcgcgatcagttgctgctggagggtgaggcagccatggccgagcccggtggcgaagcctgggtacgggtggcggaggcctccgcgctcacggccggactgatcggcggtctcggtggcgcccgctgccgcaccgtggctgcccacgcggtccacaacggtctcacccagttgcccgcctgtcatcaccttcttcacggtgaaaaggtgggcttcggcgttctcacccagctgcgtcttgaagagttgctcggtggccaccgcctggccagccaggcccgccgccagctgatccccttcttcagggccctggatctgccgctgaccctcgagggtctcggcctcgccgaagccagcctcaacgacctcaacgccgtctgcgccttcgctgttcttcccggctctgatctgcaccatctgcccttccccgtgaacgccaacgacctgctgaccgccatggtgagcaccacggcggagtcgcacccagctgagagtgctccaagtgctccagccccctgcgccgagggcagcctctgccctgagagcagcccttga

SEQ ID NO: 44338 - protein, 395 aa, Synechococcus sp. WH 5701
MPASDASMVTALSQHAIAPARLVRGPSAWSASLDALPSLCRRPLLLGRSQATAHLRDQACSDLLRLGLEPLSATLQFDCCEDDLRRLAAEAQTGRCDGVIAMGGGKVLDAGKLLAHRLGLACITVPTSAATCAGWTALANLYSVEGAFRSDVALDRCPDLLIFDHNLVLQAPTRTLASGIADAIAKWYEASVSSGSSGDGLVQQAVQQARVLRDQLLLEGEAAMAEPGGEAWVRVAEASALTAGLIGGLGGARCRTVAAHAVHNGLTQLPACHHLLHGEKVGFGVLTQLRLEELLGGHRLASQARRQLIPFFRALDLPLTLEGLGLAEASLNDLNAVCAFAVLPGSDLHHLPFPVNANDLLTAMVSTTAESHPAESAPSAPAPCAEGSLCPESSP

SEQ ID NO: 44339 - DNA, 1122 bp, Synechococcus sp. WH 7805
  CDS (1)..(1122): transl_table=11
atgtcctcaacagacagcaactgtttgatctctcaacactgcattgcaccggacctcgtgattcgcggctccggtgcatggcaaagcgctctgaccaagatccgtgcgctcagctccagaccactgttcttgggtcgaagcgcagcaacccaaccactgcgcaacggactgattaccagcctggtatccgcaggccttgacgtcacgcctgcatgcctgaatcacgactgctgcgaagaggatttaagtcgtctcgaagcggctttcacagttcaccgcggtgatgccgtcattgccgcaggcgggggcaaggtgttggatgctggcaagctcttggccgatcgtcttgatctgccgtgcatcacagtgccactgagtgcgtcaacttgtgccggctggaccgcgctttccaatctgtacacccctgaaggagcctttcttggcgatcaggccttgaaacgctgtcctgatcttctggtgttcgaccacgatcttcttcgccaggcaccaccccgcactctcgccagtggcatcgctgatgcccttgccaagtggtatgaagcctcagtgagcagcggcgccagccacgatggactgattcagcaagctgtccagatggcgcgggtgctgcgggatcagctcttgattgacagtgtggatgccatgcagtcccccgggggagacgcctgggtgcgagtgattgaagcctgcgggctgacagccggcctcatcggaggactagggggagctcgctgccgcacggttgcagcccatgctgttcataacgggctcacccaactccaggcttgtcacggatccctccacggcgaaaaagtgggcttcggagtgttggttcagttgcgactcgaagaacgtttgggtggcaatcgcttggcagaacaagcccatcgccaattgttacccctgctcatccaactcggactaccggtgagcctcgacgatctcggtctttccaatgccagtttgagtgaccttcaacaggtgtgcgagtttgcctgccgtgaaggatccgaccttcaccatcttcccttctccgtgacgcctggagcgcttctggaagctcttgtgggagcagccgaacccgccgttcgacgcccttga

SEQ ID NO: 44340 - protein, 373 aa, Synechococcus sp. WH 7805
MSSTDSNCLISQHCIAPDLVIRGSGAWQSALTKIRALSSRPLFLGRSAATQPLRNGLITSLVSAGLDVTPACLNHDCCEEDLSRLEAAFTVHRGDAVIAAGGGKVLDAGKLLADRLDLPCITVPLSASTCAGWTALSNLYTPEGAFLGDQALKRCPDLLVFDHDLLRQAPPRTLASGIADALAKWYEASVSSGASHDGLIQQAVQMARVLRDQLLIDSVDAMQSPGGDAWVRVIEACGLTAGLIGGLGGARCRTVAAHAVHNGLTQLQACHGSLHGEKVGFGVLVQLRLEERLGGNRLAEQAHRQLLPLLIQLGLPVSLDDLGLSNASLSDLQQVCEFACREGSDLHHLPFSVTPGALLEALVGAAEPAVRRP

SEQ ID NO: 44341 - DNA, 1098 bp, Photobacterium sp. SKA34
  CDS (1)..(1098): transl_table=11
atgatccctcgcagcatcacatcgccaaaaaaattcattattggtcaagatttactttctcaacttgatgcttttataaaagactttggcaataatgccttattgatttgtgatgatttcattttagatcgcgttcaacaagaagcggtgccttgtttagaactcgcggggatcaagacatattgcgagaaattccagtatgaatgtagtgataacgaaattgaacgtttacgtaagatagtaacagcacaaaatgcaaatgttgttgttggtattggtggtggtaaaaccatggatgtggcaaaggctgttgcgcattatagcaatgcatctgtggtgatcttcccaacaattgcgtcaagtgatgcaccttgtaccgcggtatctgttatctataaagagagcggtgaatttgatcgttacttgttattaccgcaaaaccctgatgtggtattagcagatactcgtattattgctcaagccccggaaaaatattttgccgcaggcattggtgatgcgctagcgaccttttttgaaacgcgtgcttgttgttatgccgcaggacttaatctggtacaaaaacgtgtgtcacgtaccggacttggtatggctcttatgtgttatgagctgattgtcgataatgttgaaatggcgatggaagccgtccgtcgtcaggaagttacaccggcattagaagagatggtagaagccattgtgtatttaagtggtgtggcggcagaatctggcggcattgcgtgtgcacatgcgatctgtaatggcatgtcgtcacttgagaaatttaaacatattcaacatggtgaaaaagtaacatttggcttattagtacaattggtattagaaaaagccgatattgaagaaatcgagaatgttatttacgtgatcaaaatggcagggttaccactgacattagctgattttggtattaatgaatgggttgaagatgattggcgtcagattgttgatattgcctgttctccaagtaattcaatgagtaatatgcctgttactgtgagtgcggagcaagtgtaccaagcggttattgcagccaatgaattagcacaacgttatcacgattaa

SEQ ID NO: 44342 - protein, 365 aa, Photobacterium sp. SKA34
MIPRSITSPKKFIIGQDLLSQLDAFIKDFGNNALLICDDFILDRVQQEAVPCLELAGIKTYCEKFQYECSDNEIERLRKIVTAQNANVVVGIGGGKTMDVAKAVAHYSNASVVIFPTIASSDAPCTAVSVIYKESGEFDRYLLLPQNPDVVLADTRIIAQAPEKYFAAGIGDALATFFETRACCYAAGLNLVQKRVSRTGLGMALMCYELIVDNVEMAMEAVRRQEVTPALEEMVEAIVYLSGVAAESGGIACAHAICNGMSSLEKFKHIQHGEKVTFGLLVQLVLEKADIEEIENVIYVIKMAGLPLTLADFGINEWVEDDWRQIVDIACSPSNSMSNMPVTVSAEQVYQAVIAANELAQRYHD

SEQ ID NO: 44343 - DNA, 1083 bp, Vibrio sp. Ex25
  CDS (1)..(1083): transl_table=11
atggacaaaattattatcagcccaagcaaatacgtccaaggtgaacaagtacttacatctatcgctcactatgtgaaaacattgggtgaacgtccgttagtcattgccgatgagttcgtgactaacctggttggtgatgacgtcaaacaaagctttgctgacgaaaagcttccactcactatgaacatttttggtggcgaatgttcgcgcgttgagatcgaacgcatcacggacatttgtgcgactcaaaaacatgatgtcattgtcggtattggtggcggtaaaacgttagatacagcaaaggccgttgcgttttacaccaaaattcctgtcgtggtggttcctacaattgcctcgactgatgcgccaacctctgctcttgcggtgatatacacaccagaaggtgaatttgcggaatacttgatgatccctaaaaacccagacatggtcatcatggatacgtctgtcatcgcaaaagccccagttcgcctactggtatcggggatgggcgatgcgctctccacctactttgaagctcgtgccaacatgacctctggtaaggcaacaatggccggtggtttagcgacacgttcagcgcaagctcttgcaaaactttgctatgaaaccttgcttgaagatggtgtaaaagcaaaagctgcggtagaaaatggtgtgagcaccaaagcggtagaaaacattattgaagccaatacataccttagcggtatcggttttgaaagcagtggtctagcgggtgctcacgctattcataacggcctaaccaagctcgaagagtgtcatcatctctatcatggtgagaaagtcgcgttcggcacacttgttcaactggtgctagaaaacgcagcgatggaagagattaatacggttctcgccttctgccgatcggtaggtctaccaaccaacttgtttgatatgggcgttaaagagcttaatcacgataaattgcgcgaggtcgccgaagcttcaacggccgagggagaaaccatccacaatatgccattcccagtgacggcagaaaatgtctactctgctattctaaccgctcatcaactgggccaataa

SEQ ID NO: 44344 - protein, 360 aa, Vibrio sp. Ex25
MDKIIISPSKYVQGEQVLTSIAHYVKTLGERPLVIADEFVTNLVGDDVKQSFADEKLPLTMNIFGGECSRVEIERITDICATQKHDVIVGIGGGKTLDTAKAVAFYTKIPVVVVPTIASTDAPTSALAVIYTPEGEFAEYLMIPKNPDMVIMDTSVIAKAPVRLLVSGMGDALSTYFEARANMTSGKATMAGGLATRSAQALAKLCYETLLEDGVKAKAAVENGVSTKAVENIIEANTYLSGIGFESSGLAGAHAIHNGLTKLEECHHLYHGEKVAFGTLVQLVLENAAMEEINTVLAFCRSVGLPTNLFDMGVKELNHDKLREVAEASTAEGETIHNMPFPVTAENVYSAILTAHQLGQ

SEQ ID NO: 44345 - DNA, 1098 bp, Klebsiella pneumoniae
  CDS (1)..(1098): transl_table=11
atgctaaaagttattcaatctccagccaaatatcttcagggtcctgatgctgctgtcctgttcggtcaatatgccaaaaacctggcggagagcttcttcgtcatcgctgacgacttcgtgatgaagctggcgggggagaaagtggtgaatggcctgcagagtcacgatattcgctgccatgcggaacggtttaacggcgaatgcagccatgcggaaattaaccgcctgatggcgattttgcaaaaacagggctgcggcggcgtggttggcatcggcggcggtaaaaccctcgataccgcgaaggcgatcggttactaccagaagctgccggtggtggtgatcccgtctatcgcttcgaccgatgcgccgaccagcgcgctgtcggtgatctacaccgaagcgggcgagtttgaagagtatctgatctatccgaaaaacccggatatggtggtgatggacacggcgattatcgccaaagcgccggtacgcctgctggtctccggcatgggcgatgcgctctccacctggtttgaggccaaagcctgctacgatgcgcgcgccaccagcatggccggggggcagtccaccgaggcggcgctgagcctggcccgcctgtgctatgatacgctgctggcggagggcgaaaaggcccgtctggcggcgcaggccggggtggtgaccgaagcgctggagcgcatcatcgaagcgaacacctacctcagcggcattggctttgaaagcagcggcctggccgccgcccacgcgatccacaacggtttcaccattctggaagagtgccatcacctgtatcacggcgagaaagtggccttcggcaccctggcgcagctggtgctgcagaacagcccgatggacgagattgaaaccgtgctgggcttctgccagcgcgtcggcctgccggtgaccctcgcgcagatgggcgtcaaagaggggatcgacgcgaaaatcgccgcggtggcgaaagccacctgcgcggaaggggaaaccatccacaatatgccgtttgcggtgaccccggagagcgtgcacgccgctatcctcaccgccgatctgttaggccagcagtggctggcgcgttaa

SEQ ID NO: 44346 - protein, 365 aa, Klebsiella pneumoniae
MLKVIQSPAKYLQGPDAAVLFGQYAKNLAESFFVIADDFVMKLAGEKVVNGLQSHDIRCHAERFNGECSHAEINRLMAILQKQGCGGVVGIGGGKTLDTAKAIGYYQKLPVVVIPSIASTDAPTSALSVIYTEAGEFEEYLIYPKNPDMVVMDTAIIAKAPVRLLVSGMGDALSTWFEAKACYDARATSMAGGQSTEAALSLARLCYDTLLAEGEKARLAAQAGVVTEALERIIEANTYLSGIGFESSGLAAAHAIHNGFTILEECHHLYHGEKVAFGTLAQLVLQNSPMDEIETVLGFCQRVGLPVTLAQMGVKEGIDAKIAAVAKATCAEGETIHNMPFAVTPESVHAAILTADLLGQQWLAR

SEQ ID NO: 44347 - DNA, 1098 bp, Escherichia blattae
  CDS (1)..(1098): transl_table=11
atgctacaagttattcagtctccggcaaaatatcttcagggccctgatgctgcggcccagtttggtcagtatgccaaaaacctggcggacagcttttttgtgattgccgatgatttcgtgatgaaactggccggtgacaaggtgctgaacggcctgcatgagaacggggtaacctgccacgccgagcgctttaacggcgaatgcagccatgcagagatcaaccgcctgggggcgattctcaaacaaaaaggctgcaaaggggttgtcggggttggcggcgggaaaaccctcgataccgctaaagccattggctactaccagaagctgccggtggtgatcattccgaccatcgcctctaccgatgcgcccaccagcgccctgtctgttatctataccgaatccggcgagtttgaagagtatctggtctacccgaaaaaccccgatatggtggtgatggatacggcgattatcgccaaagcgccggtgcgtttactggtttccggcatgggggatgcgctctccacctggtttgaggcgaaagcctgctacgacgcccgcgctgtcagcatggccggtggtcagtctaccgccgctgccctgagcctggcccgcctgtgctacgacacgctgctggccgaaggggaaaaagcccgcctggccgctgaggcaggcgttgtgaccgtggcgctggagcgcattgtggaagccaacacctacctgagcggtattggttttgaaagcagcggcctggccggtgcccacgccatccataacggctttaccattctggaagagtgccaccacctctaccacggggagaaagtggccttcggtacgctggcacaactggtgctgcaaaacagcccgatggaagagattgaaaccgtgctcggtttctgccagaaagtgggcctgccggtgaccctggcccagatgggtgtcaaagacggtattgaagagaaaattcttgctgtggcaaaagccacttgcgccgaaggggaaaccatccacaatatgccgttcccggtaacaccggaaagtgtatatggcgccattctgaccgctgatcgcctcggcgcccagtgggcggcgaagtaa

SEQ ID NO: 44348 - protein, 365 aa, Escherichia blattae
MLQVIQSPAKYLQGPDAAAQFGQYAKNLADSFFVIADDFVMKLAGDKVLNGLHENGVTCHAERFNGECSHAEINRLGAILKQKGCKGVVGVGGGKTLDTAKAIGYYQKLPVVIIPTIASTDAPTSALSVIYTESGEFEEYLVYPKNPDMVVMDTAIIAKAPVRLLVSGMGDALSTWFEAKACYDARAVSMAGGQSTAAALSLARLCYDTLLAEGEKARLAAEAGVVTVALERIVEANTYLSGIGFESSGLAGAHAIHNGFTILEECHHLYHGEKVAFGTLAQLVLQNSPMEEIETVLGFCQKVGLPVTLAQMGVKDGIEEKILAVAKATCAEGETIHNMPFPVTPESVYGAILTADRLGAQWAAK

SEQ ID NO: 44349 - DNA, 1083 bp, Escherichia coli
  CDS (1)..(1083): transl_table=11
atggataagattattataagtccggctaaatatatccagggaaatggttctctggataatattgctacatatgcggcgagtttgggaacagaaccattaattattgcagatgaatttgtgaccggtctggttggtgacagagtaagccagagctttgcaagagaaaacattattgcggattttgatgttttttgcggtgaatgctcgcaaaatgaaatttctcgaattcgtaagaaatttaatcagcgtaaatataatgtcgttattggtattggcggcggtaaaacgttggatacggcaaaagccgtagcgtattaccaaaaaattccggtagtggtggtgccgacaattgcttccacagatgcgccaaccagttctctggcagtaatttacaccccggaaggccagtttagcgaatatctgtttttcccgaaaaacccggatatggtgattatggatactggcgtcatttcagccgcgccagtgcgtctgctggtggccggtatgggagatgcattgtcaacctggtttgaggcgagagccaatcaggcgtcaggaaaagccacaatggcaggtggggcgtcgacactggcggcactggctattgcccgactctgttataccacgctactggaagatggctataaggcaaaagtcgcggttgaacaaggtgttagcaccaaagcggtagagaatattatcgaagctaatacctatcttagcggcattggatttgaaagtagcggcctggcggcagctcatgccattcataacggcatgacgcaactggaggaatgccatcattgctaccacggtgaaaaagtggcatttggcgtcctggtacagctcgtactggaaaacgcaccacaggaggaaattgaaaccgtactcaatttctgccatagcgttggcttgccgacaaatcttcatatgttaggcgtgaaggaaattaataaagataaattacgggcagtggctaaagccgcgactgctgaaggggaaactatccataatatgccattcgtagtaacagcgcaggacgttctttgtgcaattttaactgcacatcatttgggactttaa

SEQ ID NO: 44350 - protein, 360 aa, Escherichia coli
MDKIIISPAKYIQGNGSLDNIATYAASLGTEPLIIADEFVTGLVGDRVSQSFARENIIADFDVFCGECSQNEISRIRKKFNQRKYNVVIGIGGGKTLDTAKAVAYYQKIPVVVVPTIASTDAPTSSLAVIYTPEGQFSEYLFFPKNPDMVIMDTGVISAAPVRLLVAGMGDALSTWFEARANQASGKATMAGGASTLAALAIARLCYTTLLEDGYKAKVAVEQGVSTKAVENIIEANTYLSGIGFESSGLAAAHAIHNGMTQLEECHHCYHGEKVAFGVLVQLVLENAPQEEIETVLNFCHSVGLPTNLHMLGVKEINKDKLRAVAKAATAEGETIHNMPFVVTAQDVLCAILTAHHLGL

SEQ ID NO: 44351 - DNA, 1143 bp, Clostridium butyricum
  CDS (1)..(1143): transl_table=11
atgagaaaagcatttatttgcccaactaaatatgtacaaggcgaagatgatattttaaacttgggatactttgttagaagttttggagaatcagctttattaatagcacacaaagatgatgttacacgtgtaaaggacaaattaaataaaacttgtgaaaagtttaaaattagttttgtagaaagtggatttaagggtgaatgttctagagaagaggtatgtagattacaacaaattgctagtgaaaataaatgttcatgcataattggtcttggtgggggtaaggctattgatactgctaaatgtgttgctgaaggagaagctttaattatagttccaacaatagcggctacagatgcaccaacaagccattcagctgtactttatacaaatgaaggcgcatttgatgattatgcttatttcaaacaaagtccaagtgtagttttaattgatactacagtaattgcaaatgcaccaactcgtttcttggtttcaggaatgggagatgcactatcaacatactttgaagcaagagcaacttcaaattcatattctaatgtaaatgcaggattaccttgtggatttagagaaggtgtttgcaatgaagctaaaggaactaatacagcattagctcttgcaaaattatgctatgaaactcttataaatgatggagcaaaggcaaaagtggcttcagactgcaatatagttacaccagcattagaaaatattatagaagcaaatattcttttatctggtattggatttgaaagtggtggactagctggagcacatgcaattcatgatggattgactatattagaaggaactcataaatatttccatggtgaaaaagttgcatttggaacaatagcacaattagtattagaaaattcaccaaaagaagaattaaatcaagtattagacttctgtttagaagttggattacctgtttgtttagcagatattggagtggagagtattaatgaaaatgaacttatggaagtagctaaaaaagcatgttataaggaagaatcgattcattctatgcctttcccaataagcgctgaagatgtagctgcatcaattattgcagctgataagataggtagagagtacaagctaaaaaaaggagggtgcaaataa

SEQ ID NO: 44352 - protein, 380 aa, Clostridium butyricum
MRKAFICPTKYVQGEDDILNLGYFVRSFGESALLIAHKDDVTRVKDKLNKTCEKFKISFVESGFKGECSREEVCRLQQIASENKCSCIIGLGGGKAIDTAKCVAEGEALIIVPTIAATDAPTSHSAVLYTNEGAFDDYAYFKQSPSVVLIDTTVIANAPTRFLVSGMGDALSTYFEARATSNSYSNVNAGLPCGFREGVCNEAKGTNTALALAKLCYETLINDGAKAKVASDCNIVTPALENIIEANILLSGIGFESGGLAGAHAIHDGLTILEGTHKYFHGEKVAFGTIAQLVLENSPKEELNQVLDFCLEVGLPVCLADIGVESINENELMEVAKKACYKEESIHSMPFPISAEDVAASIIAADKIGREYKLKKGGCK

SEQ ID NO: 44353 - DNA, 1059 bp, Clostridium beijerinckii
  CDS (1)..(1059): transl_table=11
atgattgcaccaagtaaatacattcaaggtaatggagaattaaaaaatattgcggaatacgtatctgtacttggtgaaaaagcattatgcttgattagtgaaagtggcttaaaaagggtaaaagatactatagacaaaagttttgagactaaaaatataggcgtaaaatatgatttatttaacggagaatgctctataactgaagtaaatcgtattatcaaaatttgtgatgaaaatcaattaactgttctcattggtattggcggtggaaaaattattgatactattaaagctgttggatactatgcaaatcttcctgttgtgattgtacctaccatagctgctacagatgctccatgcagtgctttgtcagttttatacactgatgatggcgtctttgataaatacttattcttaaagcaaaatcctaatatagttttggttgatactggtattattgcaaaagctccagttcgtcttttagtatctggtatgggtgatgccttagcgacatattttgaagcaagagcttgtgaaaaatccaatgctggaacatgtagcatttttggtactactactattacagctcaagcattagctagactatgctatgatacattaattactgaaggatataaggcaaaacttgctgtagaagaaggagtttgtacaaaatcagtagaaaaaatagttgaagctaatactcttcttagtggtcttggatttgaaagcggtggtattgcagcgcgtcacgctatccataatggtttaactgtattgccagcttgtcatcatatgtaccatggagaaaaagttgcatttggtacattagctcaattagttcttgaaaatgctccaatggatgaaattgaagaagtattagatttcagtactagagtcggtcttcctgttactttaaaacaattaggtatcaatgaaataaagccagaagaaattattgaagttgcaaaggctgctacttcaaaagaagatactgcacataatatgccatttgaagttacccctgaagatgtctgcgactgctattttaacagctaa

SEQ ID NO: 44354 - protein, 352 aa, Clostridium beijerinckii
MIAPSKYIQGNGELKNIAEYVSVLGEKALCLISESGLKRVKDTIDKSFETKNIGVKYDLFNGECSITEVNRIIKICDENQLTVLIGIGGGKIIDTIKAVGYYANLPVVIVPTIAATDAPCSALSVLYTDDGVFDKYLFLKQNPNIVLVDTGIIAKAPVRLLVSGMGDALATYFEARACEKSNAGTCSIFGTTTITAQALARLCYDTLITEGYKAKLAVEEGVCTKSVEKIVEANTLLSGLGFESGGIAARHAIHNGLTVLPACHHMYHGEKVAFGTLAQLVLENAPMDEIEEVLDFSTRVGLPVTLKQLGINEIKPEEIIEVAKAATSKEDTAHNMPFEVTPEDVCDCYFNS

SEQ ID NO: 44355 - DNA, 1113 bp, Bacillus stearothermophilus
  CDS (1)..(1113): transl_table=11
atggcggcagaaagagtatttatcagccctgcaaaatatgttcaaggtaaaaatgtcattacaaaaatcgcgaattatcttgaaggaattggaaacaagacagtcgtgatagctgatgaaatagtttggaaaatagctgggcatacaatagtaaacgaattaaaaaaaggaaatattgcagccgaagaagtagtttttagcggagaagcttcaagaaacgaggtagaaagaatcgcgaatattgcaagaaaagcagaagctgctattgtaatcggcgttggtggaggaaaaacgttagataccgcaaaagcggtagcggatgaattagatgcttatatagtgattgtgccgacagctgcttcaactgatgcgccaactagtgctctttctgttatatattctgatgacggcgtatttgaaagctaccgtttttataaaaagaatccagatcttgtacttgtcgatacgaaaattatcgccaatgctccgccacgtttacttgcctctggaatcgctgatgcacttgcaacttgggtggaagcacgcagtgttataaaatccggaggaaaaacgatggcgggcggtatccctacaattgcagctgaagcaattgcagaaaaatgtgaacaaactttattcaagtacgggaagcttgcctatgaatcagtaaaagcaaaagtcgtcacccctgcgttagaagcggtcgtcgaagcaaacacgctccttagcggactaggttttgaaagcggcggtttggcagcggctcatgctattcataacggatttaccgcgttagaaggcgaaatacatcatttgacacacggagagaaagtggcatttggtactcttgtccagctcgctctcgaagaacattcacaacaagaaattgaacgctatattgagctttatttgagccttgatttgccagtcacgttggaggacattaaattaaaagatgcttcacgcgaagatatactaaaagtcgctaaagcagcaaccgcagaaggggaaacaatccataatgcattcaatgtgacagctgatgatgtagcagatgcgatttttgctgctgatcaatatgcgaaagcatataaagaaaaacaccgcaaataa

SEQ ID NO: 44356 - protein, 370 aa, Bacillus stearothermophilus
MAAERVFISPAKYVQGKNVITKIANYLEGIGNKTVVIADEIVWKIAGHTIVNELKKGNIAAEEVVFSGEASRNEVERIANIARKAEAAIVIGVGGGKTLDTAKAVADELDAYIVIVPTAASTDAPTSALSVIYSDDGVFESYRFYKKNPDLVLVDTKIIANAPPRLLASGIADALATWVEARSVIKSGGKTMAGGIPTIAAEAIAEKCEQTLFKYGKLAYESVKAKVVTPALEAVVEANTLLSGLGFESGGLAAAHAIHNGFTALEGEIHHLTHGEKVAFGTLVQLALEEHSQQEIERYIELYLSLDLPVTLEDIKLKDASREDILKVAKAATAEGETIHNAFNVTADDVADAIFAADQYAKAYKEKHRK

SEQ ID NO: 44357 - DNA, 1098 bp, Citrobacter freundii
  CDS (1)..(1098): transl_table=11
atgctaaaagttattcaatctccagccaaatatctccagggccctgacgcttccaccttatttggtcaatacgctaaaaatctggcggacagctttttcgtgattgcggatgacttcgtgatgaagctggcgggagagaaggttctcaatggcctgcacagccacgacattagctgccacgcggaacgcttcaacggtgaatgcagccatattgaaattaatcgcctgattgccattctgaaacagcacggttgccgcggcgtggttgggattggcggcgggaaaacgttggataccgccaaagcgattggttactaccagaagctaccggtggtggtgatcccgactatcgcctctaccgatgcgccaaccagcgcgctgtccgttatctataccgaagccggtgagtttgaagagtatctgatctacccgaaaaacccggatatggtggtgatggacaccgcaatcattgccaaagcgccggtacgcctgctggtggccgggatgggcgatgcgctctcaacctggtttgaagcgaaagcctgttatgacgccagagcgaccagcatggcgggcggacagtccaccgtagcggcgctgagcctggcgcgcctatgctatgataccctgctggcggaaggcgaaaaggcacgctttgccgcgcaggctggcgtggtgactgatgcgctggagcgtattgtcgaagcgaacacttacctcagcggcatcggctttgaaagcagcggtcttgcaggggcgcatgctatccacaacggttttacgattctggaagagtgtcaccatttgtaccacggtgaaaaagtcgcctttggtacgctggcgcagctggtgctgcaaaacagcccgatggaagagatcgaaaccgtgctgaatttctgtcagaaagtaggcctgccggtaacgttagcggaaatgggcgtgaaagacgacattgacggcaagatcatggccgtggccaaagcgacctgcgcagaaggtgaaaccatccacaatatgccgttctcggtgacgcctgaaagcgtacatgccgcgatactgacggcagacctgctgggacagcagtggctggcgcgttaa

SEQ ID NO: 44358 - protein, 365 aa, Citrobacter freundii
MLKVIQSPAKYLQGPDASTLFGQYAKNLADSFFVIADDFVMKLAGEKVLNGLHSHDISCHAERFNGECSHIEINRLIAILKQHGCRGVVGIGGGKTLDTAKAIGYYQKLPVVVIPTIASTDAPTSALSVIYTEAGEFEEYLIYPKNPDMVVMDTAIIAKAPVRLLVAGMGDALSTWFEAKACYDARATSMAGGQSTVAALSLARLCYDTLLAEGEKARFAAQAGVVTDALERIVEANTYLSGIGFESSGLAGAHAIHNGFTILEECHHLYHGEKVAFGTLAQLVLQNSPMEEIETVLNFCQKVGLPVTLAEMGVKDDIDGKIMAVAKATCAEGETIHNMPFSVTPESVHAAILTADLLGQQWLAR

SEQ ID NO: 44359 - DNA, 1143 bp, Escherichia coli O6
  CDS (40)..(1143): transl_table=11
atgccgcatttggcactactcatctctaaaggagcaattatggaccgcattattcaatcaccgggtaaatacatccagggcgctgatgtgattaatcgtctgggcgaatacctgaagccgctggcagaacgctggttagtggtgggtgacaaatttgttttaggttttgctcaatccactgtcgagaaaagctttaaagatgctggactggtagtagaaattgcgccgtttggcggtgaatgttcgcaaaatgagatcgaccgtctgcgtggcatcgcggagactgcgcagtgtggcgcaattctcggtatcggtggcggaaaaaccctcgatactgccaaagcactggcacatttcatgggtgttccggtagcgatcgcaccgactatcgcctctaccgatgcaccgtgcagcgcattgtctgttatctacaccgatgagggtgagtttgaccgctatctgctgttgccaaataacccgaatatggtcattgtcgacaccaaaatcgtcgctggcgcacctgcacgtctgttagcggcgggtatcggcgatgcgctggcaacctggtttgaagcgcgtgcctgctctcgtagcggcgcgaccaccatggcgggcggcaagtgcacccaggctgcgctggcactggctgaactgtgctacaacaccctgctggaagaaggcgaaaaagcgatgcttgctgccgaacagcatgtagtgactccggcgctggagcgcgtgattgaagcgaacacctatttgagcggtgttggttttgaaagtggtggtctggctgcggcgcacgcagtgcataacggcctgaccgctatcccggacgcgcatcactattatcacggtgaaaaagtggcattcggtacgctgacgcagctggttctggaaaatgcgccggtggaggaaatcgaaaccgtagctgcccttagccatgcggtaggtttgccaataactctcgctcaactggatattaaagaagatgtcccggcgaaaatgcgaattgtggcagaagcggcatgtgcagaaggtgaaaccattcacaacatgcctggcggcgcgacgccagatcaggtttacgccgctctgctggtagccgaccagtacggtcagcgtttcctgcaagagtgggaataa

SEQ ID NO: 44360 - protein, 367 aa, Escherichia coli O6
MDRIIQSPGKYIQGADVINRLGEYLKPLAERWLVVGDKFVLGFAQSTVEKSFKDAGLVVEIAPFGGECSQNEIDRLRGIAETAQCGAILGIGGGKTLDTAKALAHFMGVPVAIAPTIASTDAPCSALSVIYTDEGEFDRYLLLPNNPNMVIVDTKIVAGAPARLLAAGIGDALATWFEARACSRSGATTMAGGKCTQAALALAELCYNTLLEEGEKAMLAAEQHVVTPALERVIEANTYLSGVGFESGGLAAAHAVHNGLTAIPDAHHYYHGEKVAFGTLTQLVLENAPVEEIETVAALSHAVGLPITLAQLDIKEDVPAKMRIVAEAACAEGETIHNMPGGATPDQVYAALLVADQYGQRFLQEWE

SEQ ID NO: 44361 - DNA, 1098 bp, Pseudomonas putida
  CDS (1)..(1098): transl_table=11
atggaccgcgccattcaatcacccggcaaatatgtacaaggggccgatgcgctgcaacggctgggggactacctcaagccgctggcggacagctggctggtgattgccgacaagttcgtgctgggctttgccgaagacaccatccgccaaagcctcagcaaggccgggctggccatggacatcgtcgccttcaacggcgaatgctcgcagggcgaggtcgatcgcctgtgccaactggccacgcaaaacgggcgcagcgccatcgtcggcattggtggcggcaagacgctggacaccgccaaggccgtggcctttttccagaaagtgcccgtggccgtggcccccaccatcgcctccaccgacgcgccctgcagcgcgctgtcggtgctctataccgatgaaggtgagttcgaccgctatctgatgctgcccaccaaccccgccctggtggtggtggacaccgccatcgtcgcccgtgcaccggcgcggctgttggcggccggcattggtgatgccctggccacctggttcgaggcgcgtgccgcatcgcgcagcagcgctgccaccatggccggcggcccggccacgcagaccgcactgaacctggccaggttctgctacgacaccctgctggaagagggtgaaaaagccatgttggccgtgcaggcccaggtggtgacgccggcgctggagcgcatcgtcgaggccaacacctatctgagcggggtcgggtttgaaagcggtggcgtggccgccgcccacgcggtgcacaacggcctgaccgccgtggccgaaacccaccacttctaccacggcgaaaaagtggcgtttggcgtgctggtgcaactggcgctggaaaacgcctccaacgcggaaatgcaggaagtgatgtcgctgtgccacgccgtgggcctgcccatcacgctggcgcagctggacattaccgaagacatccccaccaagatgcgcgccgtggccgagctggcctgcgccccaggcgagaccatccacaacatgcccggcggcgtgacggtggagcaggtctatggcgcgctgctggtggcggaccagctggggcagcattttctggagttttga

SEQ ID NO: 44362 - protein, 365 aa, Pseudomonas putida
MDRAIQSPGKYVQGADALQRLGDYLKPLADSWLVIADKFVLGFAEDTIRQSLSKAGLAMDIVAFNGECSQGEVDRLCQLATQNGRSAIVGIGGGKTLDTAKAVAFFQKVPVAVAPTIASTDAPCSALSVLYTDEGEFDRYLMLPTNPALVVVDTAIVARAPARLLAAGIGDALATWFEARAASRSSAATMAGGPATQTALNLARFCYDTLLEEGEKAMLAVQAQVVTPALERIVEANTYLSGVGFESGGVAAAHAVHNGLTAVAETHHFYHGEKVAFGVLVQLALENASNAEMQEVMSLCHAVGLPITLAQLDITEDIPTKMRAVAELACAPGETIHNMPGGVTVEQVYGALLVADQLGQHFLEF

SEQ ID NO: 44363 - DNA, 1089 bp, Escherichia coli
  CDS (1)..(1089): transl_table=11
atgcctcacaatcctatccgcgtggtcgtcggcccggctaactacttttcacatccaggaagtttcaatcacctgcacgattttttcactgatgaacaactttctcgcgcggtgtggatctacggcaaacgcgccattgctgcggcgcaaaccaaacttccgccagcgtttggactgccaggggcaaagcatattttgtttcgcggtcattgcagcgaaagcgatgtacaacaactggcggctgagtccggtgacgaccgcagcgtggtgattggcgtcggtggcggtgcactgctcgacaccgcgaaagccctcgcccgccgtctcggtctgccgtttgttgccgttccgacgatcgccgccacctgcgccgcctggacaccgctctccgtctggtataatgatgccggacaggcgctgcattatgagattttcgacgacgccaattttatggtgctggtggaaccggagattatcctcaatgcaccgcaacaatatctgctggcggggatcggtgacacgctggcgaaatggtatgaagcggtggtgctggctccgcaaccagaaacgttgccgctaaccgtgcgactggggatcaataatgcgcaagccattcgcgacgtcttgttaaacagtagcgaacaggcgctgagcgatcagcaaaatcaacagttaacgcaatcattttgcgatgtggtggatgctattattgctggtggtgggatggttggtggtctgggcgatcgttttacgcgtgtggcggcagctcatgccgtgcataacggtctgaccgtgctgccgcaaaccgagaagtttctccacggcaccaaagtcgcctacggaattctggtgcaaagcgccttgctgggtcaggatgatgtgctggcgcaattaactggagcgtatcagcgttttcatctgccgactacactggcggagctggaagtggatatcaataatcaggcggagatcgacaaagtgattgcccacaccctgcgtccggtggagtccattcattacctgccagtcacgctgacaccagatacgttgcgtgcagcgttcaaaaaagtggaatcgtttaaagcctga

SEQ ID NO: 44364 - protein, 362 aa, Escherichia coli
MPHNPIRVVVGPANYFSHPGSFNHLHDFFTDEQLSRAVWIYGKRAIAAAQTKLPPAFGLPGAKHILFRGHCSESDVQQLAAESGDDRSVVIGVGGGALLDTAKALARRLGLPFVAVPTIAATCAAWTPLSVWYNDAGQALHYEIFDDANFMVLVEPEIILNAPQQYLLAGIGDTLAKWYEAVVLAPQPETLPLTVRLGINNAQAIRDVLLNSSEQALSDQQNQQLTQSFCDVVDAIIAGGGMVGGLGDRFTRVAAAHAVHNGLTVLPQTEKFLHGTKVAYGILVQSALLGQDDVLAQLTGAYQRFHLPTTLAELEVDINNQAEIDKVIAHTLRPVESIHYLPVTLTPDTLRAAFKKVESFKA

SEQ ID NO: 44365 - DNA, 23 bp, Artificial sequence
  primer
atgccgcatttggcactactcat

SEQ ID NO: 44366 - DNA, 23 bp, Artificial sequence
  primer
ttattcccactcttgcaggaaac

SEQ ID NO: 44367 - protein, 373 aa, Artificial sequence
  consensus sequence
  Variant (2)..(6): Xaa in position 2 to 6 is any amino acid
  Variant (8)..(70): Xaa in position 8 to 70 is any amino acid
  Variant (71)..(84): Xaa in position 71 to 84 is any or no amino acid
  Variant (86)..(86): Xaa in position 86 is any amino acid
  Variant (91)..(92): Xaa in position 91 to 92 is any amino acid
  Variant (94)..(95): Xaa in position 94 to 95 is any amino acid
  Variant (97)..(107): Xaa in position 97 to 107 is any amino acid
  Variant (108)..(110): Xaa in position 108 to 110 is any or no amino acid
  Variant (113)..(113): Xaa in position 113 is any amino acid
  Variant (115)..(115): Xaa in position 115 is any amino acid
  Variant (117)..(117): Xaa in position 117 is any amino acid
  Variant (119)..(122): Xaa in position 119 to 122 is any amino acid
  Variant (124)..(126): Xaa in position 124 to 126 is any amino acid
  Variant (128)..(130): Xaa in position 128 to 130 is any amino acid
  Variant (132)..(142): Xaa in position 132 to 142 is any amino acid
  Variant (144)..(148): Xaa in position 144 to 148 is any amino acid
  Variant (150)..(155): Xaa in position 150 to 155 is any amino acid
  Variant (158)..(160): Xaa in position 158 to 160 is any amino acid
  Variant (162)..(163): Xaa in position 162 to 163 is any amino acid
  Variant (165)..(166): Xaa in position 165 to 166 is any amino acid
  Variant (168)..(168): Xaa in position 168 is any amino acid
  Variant (171)..(173): Xaa in position 171 to 173 is any amino acid
  Variant (176)..(193): Xaa in position 176 to 193 is any amino acid
  Variant (194)..(210): Xaa in position 194 to 210 is any or no amino acid
  Variant (212)..(217): Xaa in position 212 to 217 is any amino acid
  Variant (219)..(222): Xaa in position 219 to 222 is any amino acid
  Variant (223)..(224): Xaa in position 223 to 224 is any or no amino acid
  Variant (226)..(239): Xaa in position 226 to 239 is any amino acid
  Variant (240)..(243): Xaa in position 240 to 243 is any or no amino acid
  Variant (245)..(249): Xaa in position 245 to 249 is any amino acid
  Variant (250)..(253): Xaa in position 250 to 253 is any or no amino acid
  Variant (255)..(255): Xaa in position 255 is any amino acid
  Variant (257)..(264): Xaa in position 257 to 264 is any amino acid
  Variant (268)..(268): Xaa in position 268 is any amino acid
  Variant (272)..(272): Xaa in position 272 is any amino acid
  Variant (274)..(281): Xaa in position 274 to 281 is any amino acid
  Variant (282)..(283): Xaa in position 282 to 283 is any or no amino acid
  Variant (289)..(290): Xaa in position 289 to 290 is any amino acid
  Variant (292)..(292): Xaa in position 292 is any amino acid
  Variant (294)..(294): Xaa in position 294 is any amino acid
  Variant (297)..(297): Xaa in position 297 is any amino acid
  Variant (300)..(316): Xaa in position 300 to 316 is any amino acid
  Variant (317)..(323): Xaa in position 317 to 323 is any or no amino acid
  Variant (326)..(327): Xaa in position 326 to 327 is any amino acid
  Variant (329)..(351): Xaa in position 329 to 351 is any amino acid
  Variant (352)..(358): Xaa in position 352 to 358 is any or no amino acid
  Variant (360)..(361): Xaa in position 360 to 361 is any amino acid
  Variant (363)..(371): Xaa in position 363 to 371 is any amino acid
  Variant (372)..(372): Xaa in position 372 is any or no amino acid
PXXXXXGXXXXXXXXXXXXXXXXXXXXXXXXXXXXXXXXXXXXXXXXXXXXXXXXXXXXXXXXXXXXXXXXXXXXXXXXXXXXXGXGGGKXXDXXKXXXXXXXXXXXXXXPTXAXTXAXXXXLXXXYXXXGXXXXXXXXXXXPXXXXXDXXXXXXAPXXXLXXGXXDXLAXXXEAXXXXXXXXXXXXXXXXXXXXXXXXXXXXXXXXXXXAXXXXXXLXXXXXXAXXXXXXXXXXXXXXXXXXAXXXXXXXXXGXGXXXXXXXXAHAXHNGXTXXXXXXXXXXHGEKVXXGXLXQLXLEXXXXXXXXXXXXXXXXXXXXXXXXLPXXLXXXXXXXXXXXXXXXXXXXXXXXXXXXXXXHXXPXXXXXXXXXXA

SEQ ID NO: 44368 - protein, 27 aa, Artificial sequence
  protein pattern
  Variant (2)..(6): Xaa in position 2 to 6 is any amino acid
  Variant (7)..(7): Xaa in position 7 is any or no amino acid
  Variant (9)..(9): Xaa in position 9 is any or no amino acid
  Variant (11)..(11): Xaa in position 11 is any amino acid
  Variant (12)..(12): Xaa in position 12 is His, Lys or Arg
  Variant (13)..(13): Xaa in position 13 is any amino acid
  Variant (14)..(14): Xaa in position 14 is Phe or Leu
  Variant (15)..(15): Xaa in position 15 is any amino acid
  Variant (16)..(16): Xaa in position 16 is Ala or Ser
  Variant (18)..(18): Xaa in position 18 is Ile, Leu, Met or Val
  Variant (19)..(19): Xaa in position 19 is Ala, Gly or Ser
  Variant (21)..(21): Xaa in position 21 is Ala, Gly, Ser or Thr
  Variant (22)..(22): Xaa in position 22 is Ile, Leu or Met
  Variant (23)..(23): Xaa in position 23 is Ala or Ser
  Variant (24)..(26): Xaa in position 24 to 26 is any amino acid
DXXXXXXAXPXXXXXXGXXDXXXXXXE

SEQ ID NO: 44369 - protein, 18 aa, Artificial sequence
  protein pattern
  Variant (2)..(2): Xaa in position 2 is Ala or Ser
  Variant (3)..(3): Xaa in position 3 is Asn, Ser or Thr
  Variant (4)..(4): Xaa in position 4 is Cys, Asp or Asn
  Variant (5)..(5): Xaa in position 5 is Ala or Ser
  Variant (6)..(6): Xaa in position 6 is Ala, Gly or Pro
  Variant (7)..(7): Xaa in position 7 is any amino acid
  Variant (8)..(8): Xaa in position 8 is Ala, Ser or Thr
  Variant (9)..(9): Xaa in position 9 is Ala, Pro or Ser
  Variant (11)..(11): Xaa in position 11 is Ala, Ser or Val
  Variant (12)..(12): Xaa in position 12 is Ala, Asn or Val
  Variant (13)..(13): Xaa in position 13 is any amino acid
  Variant (15)..(17): Xaa in position 15 to 17 is any amino acid
AXXXXXXXXLXXXYXXXG

SEQ ID NO: 44370 - protein, 33 aa, Artificial sequence
  protein pattern
  Variant (2)..(10): Xaa in position 2 to 10 is any amino acid
  Variant (11)..(13): Xaa in position 11 to 13 is any or no amino acid
  Variant (15)..(15): Xaa in position 15 is Phe, Ile, Leu or Val
  Variant (17)..(19): Xaa in position 17 to 19 is any amino acid
  Variant (20)..(20): Xaa in position 20 is Ala, Cys, Gly, Ser or Thr
  Variant (21)..(22): Xaa in position 21 to 22 is any amino acid
  Variant (23)..(23): Xaa in position 23 is Ala, Gly, Ser or Val
  Variant (24)..(24): Xaa in position 24 is Ala, Gly or Leu
  Variant (27)..(27): Xaa in position 27 is Ala, Gly or Ser
  Variant (28)..(28): Xaa in position 28 is Ile, Leu or Val
  Variant (29)..(29): Xaa in position 29 is any amino acid
  Variant (30)..(30): Xaa in position 30 is Asp, Glu, Asn or Arg
  Variant (32)..(32): Xaa in position 32 is Phe, Leu or Met
  Variant (33)..(33): Xaa in position 33 is Ser or Thr
AXXXXXXXXXXXXGXGXXXXXXXXAHXXXXGXX

SEQ ID NO: 44371 - protein, 16 aa, Artificial sequence
  protein pattern
  Variant (4)..(4): Xaa in position 4 is any amino acid
  Variant (6)..(6): Xaa in position 6 is Ala, Gly, Asn, Ser or Thr
  Variant (7)..(7): Xaa in position 7 is any amino acid
  Variant (9)..(9): Xaa in position 9 is any amino acid
  Variant (10)..(12): Xaa in position 10 to 12 is any or no amino acid
  Variant (14)..(14): Xaa in position 14 is any amino acid
  Variant (15)..(15): Xaa in position 15 is any or no amino acid
HGEXVXXGXXXXLXXL

SEQ ID NO: 44372 - DNA, 540 bp, Escherichia coli
  CDS (1)..(540): transl_table=11
atgaaacaggaagtggaaaagtggcgaccttttggacatccggatggtgatattcgtgatttatcatttcttgatgctcatcaggctgtctacgttcagcatcatgagggcaaagagcctttagagtatcgcttttgggttacctactctcttcactgcttcacaaaagattatgaacatcagacgaacgaagaaaaacaatcgttaatgtaccacgcgcctaaagaatctcgtcccttctgccagcaccgttataacttagcgcgcacacacttaaaaagaactattttggcgctgccagaaagcaacgttattcatgccgggtatggtagctatgccgtgattgaggtggacttagacggaggagataaggcattttactttgttgcgttcagggctttcagggaaaagaaaaaactccgtttgcatgtaactagcgcttatcccatttctgaaaaacagaaaggtaaatcagtgaaatttttcaccattgcctacaacttattgagaaataagcagcttcctcagccctcaaaataa

SEQ ID NO: 44373 - protein, 179 aa, Escherichia coli
MKQEVEKWRPFGHPDGDIRDLSFLDAHQAVYVQHHEGKEPLEYRFWVTYSLHCFTKDYEHQTNEEKQSLMYHAPKESRPFCQHRYNLARTHLKRTILALPESNVIHAGYGSYAVIEVDLDGGDKAFYFVAFRAFREKKKLRLHVTSAYPISEKQKGKSVKFFTIAYNLLRNKQLPQPSK

SEQ ID NO: 44374 - DNA, 444 bp, Escherichia coli O157:H7 EDL933
  CDS (1)..(444): transl_table=11
atgaaacaggaagtggagaagtggcgaccttttaaacatccggatggcgacgttcgtgatttatcgtttcttgatgctcatcaggttatctacgttcagcatcatgaggacaaggagcctttagagtatcgcttttgggttacctactctcttcactgcttcacaaaagattatgaacatcagacgaacgaagaaaaactatcgttaatgtaccacgcgcctaaagaatctcgtcccttctgccagcaccgttataacttagcgcgcacacacttaaaaagaactattttggcgctgccagaaagcaacgttattcatgccgggtatggtagctatgccgtgattgaggtggacttagacggaggagataaggcattttactttgttgtgttcagggctttcagtgaaatttttcaccattgcctaaaacttattgagaaataa

SEQ ID NO: 44375 - protein, 147 aa, Escherichia coli O157:H7 EDL933
MKQEVEKWRPFKHPDGDVRDLSFLDAHQVIYVQHHEDKEPLEYRFWVTYSLHCFTKDYEHQTNEEKLSLMYHAPKESRPFCQHRYNLARTHLKRTILALPESNVIHAGYGSYAVIEVDLDGGDKAFYFVVFRAFSEIFHHCLKLIEK

SEQ ID NO: 44376 - DNA, 24 bp, Artificial sequence
  primer
atgaaacaggaagtggaaaagtgg

SEQ ID NO: 44377 - DNA, 22 bp, Artificial sequence
  primer
ttattttgagggctgaggaagc

SEQ ID NO: 44378 - DNA, 444 bp, Escherichia coli
  CDS (1)..(444): transl_table=11
atggttattagtattcgccgctcacggcatgaggaaggggaggaactcgttgcgatttggtgtcgttctgtcgatgccactcacgattttctatcagcagagtatcggaccgagctggaggacctagttcgttccttcctgccggaagcgccgttgtgggtcgcggttaatgagcgggatcagccggttggatttatgttgctaagtgggcagcatatggatgcgctgtttatcgatcctgatgtgcgcggctgcggcgtaggtcgggtgctggtggagcatgcgctctcgatggcaccggaactgacaaccaacgttaatgagcaaaatgagcaggcggttgggttctataagaaggtgggttttaaggttacgggacgctctgaggtggacgatttggggaaaccgtatccgttgctgaatctggcgtatgtgggggcgtaa

SEQ ID NO: 44379 - protein, 147 aa, Escherichia coli
MVISIRRSRHEEGEELVAIWCRSVDATHDFLSAEYRTELEDLVRSFLPEAPLWVAVNERDQPVGFMLLSGQHMDALFIDPDVRGCGVGRVLVEHALSMAPELTTNVNEQNEQAVGFYKKVGFKVTGRSEVDDLGKPYPLLNLAYVGA

SEQ ID NO: 44380 - DNA, 432 bp, Pseudomonas aeruginosa PAO1
  CDS (1)..(432): transl_table=11
atgcacattcgcaagcgcgtcgacgccgacaacacggcattggtcgacctgtgggaacgttccgtccgcgcgacccacgactttctcagtgaagcggacatcgtcgagctttacccacaggtccgcgacctgtacctgccggccgtcgaggtctgggtgctggtcgacgacgacggcgtggcccagggcttcatcggcctgaaccaggcgcatgtcgagatgctcttcgtcgaacccgggctgcgcggccggggtatcggccgacgcctgctcgatcatgcgcgggcgacctggccgcgcctgagcgtcgatgtcaacgagcagaacccgcaggcctgcggcttctatcgacactatgggttccgccagaccggccgctccgcgaccgactcggcggggcggccgttcccgctgctgcacatgagcctgtag

SEQ ID NO: 44381 - protein, 143 aa, Pseudomonas aeruginosa PAO1
MHIRKRVDADNTALVDLWERSVRATHDFLSEADIVELYPQVRDLYLPAVEVWVLVDDDGVAQGFIGLNQAHVEMLFVEPGLRGRGIGRRLLDHARATWPRLSVDVNEQNPQACGFYRHYGFRQTGRSATDSAGRPFPLLHMSL

SEQ ID NO: 44382 - DNA, 444 bp, Lactococcus lactis subsp. lactis Il1403
  CDS (1)..(444): transl_table=11
atgaaagaaataaataaagatatgagaaataaagaactcatagaagaattgataagtttatgggaaaattcagttaaagaaacacattcttttctgtcagttaaagaaattgaagatataaaacaatatgtcccgcaagcccttaaagctatcgaacatttaattgtggaatttgacgataatgaaaaaccaattgcttttatgggaattgttggtgagaaacttgaaatgttgtttattagccctaatcgcatgaaaaaaggactcggtagaaagttgcttgaagaagcaataaaaaactattcggtaaatgaacttgtagtgaatgagcaaaatccgcaagccaaaggattttatgagcatttgggctttaaagtttataaaagaaatccaattgacgaacaaggaaatcaatatccaattctttttatgcatttgggttaa

SEQ ID NO: 44383 - protein, 147 aa, Lactococcus lactis subsp. lactis Il1403
MKEINKDMRNKELIEELISLWENSVKETHSFLSVKEIEDIKQYVPQALKAIEHLIVEFDDNEKPIAFMGIVGEKLEMLFISPNRMKKGLGRKLLEEAIKNYSVNELVVNEQNPQAKGFYEHLGFKVYKRNPIDEQGNQYPILFMHLG

SEQ ID NO: 44384 - DNA, 444 bp, Escherichia coli O157:H7 EDL933
  CDS (1)..(444): transl_table=11
atggttattagtattcgccgctcacggcatgaggaaggggaggaactcgttgcgatttggtgtcgatctgtcgatgccacccacgattttttatcagcagagtatcgggccgagctggaagagctggttcgttcctttctgccggaagcaccgttgtgggtcgcggttaatgaacgggatcagccggttgggtttatgttgttaagtgggcagcatatggatgcgctgtttatcgatcctgatgtgcgcggctgcggcgtgggccggatgctggtgaagcatgcgctctcaatggccccggaactgacaaccaatgttaatgagcaaaatgagcaggcggttgggttctataagaaggtgggttttaaggttacgggacgctctgaggtggacgatttggggaaaccgtatccgttgctggatctggcgtatgtgggggaataa

SEQ ID NO: 44385 - protein, 147 aa, Escherichia coli O157:H7 EDL933
MVISIRRSRHEEGEELVAIWCRSVDATHDFLSAEYRAELEELVRSFLPEAPLWVAVNERDQPVGFMLLSGQHMDALFIDPDVRGCGVGRMLVKHALSMAPELTTNVNEQNEQAVGFYKKVGFKVTGRSEVDDLGKPYPLLDLAYVGE

SEQ ID NO: 44386 - DNA, 462 bp, Agrobacterium tumefaciens str. C58
  CDS (1)..(462): transl_table=11
ttgctaagggtgggcatgataacatttcgtgcctccaacagccgcgacacggcccgcatcctcgacatatggagcagggccgtcgatgccacccatggcttcctccttccggcggatcgcgccgcgatcggtgaggaagtcagagctttcctgccgcaggtaccgctgatgctcgccgtcgatgctgcagatcatgccctcggcttcatgtttctgcatgaagggcatatggaggcgcttttcatcgatccggaccaccacggcaaaggcatcggcaaggcactggtggaaagcgcgcttgcgcttcatcccgcgctgaccaccgatgtcaacgagcagaatggcgaagcgcggggcttttatcgccgactgggcttcgagccgacggggcgctccgacctcgacggacaggggcgcccctatccgctcgtccatcttcgatttcgcgcaacgcaaaaatag

SEQ ID NO: 44387 - protein, 153 aa, Agrobacterium tumefaciens str. C58
MLRVGMITFRASNSRDTARILDIWSRAVDATHGFLLPADRAAIGEEVRAFLPQVPLMLAVDAADHALGFMFLHEGHMEALFIDPDHHGKGIGKALVESALALHPALTTDVNEQNGEARGFYRRLGFEPTGRSDLDGQGRPYPLVHLRFRATQK

SEQ ID NO: 44388 - DNA, 438 bp, Caulobacter crescentus CB15
  CDS (1)..(438): transl_table=11
atgatcaggctccgcccctcccgccccgatgacggtccacgggtcctggagatctgggcagccgccgttgacgctacgcacgacttcctctccgccgaggatcgcaccgctatcggccgcgaggtcgaggcgttcctgccctatgcgcccctgaccgtggccgtcgatcgccgggatcggccggtcggcttcatgctgatccaagacggccgcctggaggcgctgttcgtggatcccgagcaccacgacgctgggatcggccgcatgctgatcgagtacgccctggcggtgcatccgctgctggacctggacgtcaacgaacagaacgcccaggcgctcggcttctaccggcatatgggtttcgaccccatcggctggtcagccaccgacggccagggccggccctatccgctggtccatatgcggttcggcgactga

SEQ ID NO: 44389 - protein, 145 aa, Caulobacter crescentus CB15
MIRLRPSRPDDGPRVLEIWAAAVDATHDFLSAEDRTAIGREVEAFLPYAPLTVAVDRRDRPVGFMLIQDGRLEALFVDPEHHDAGIGRMLIEYALAVHPLLDLDVNEQNAQALGFYRHMGFDPIGWSATDGQGRPYPLVHMRFGD

SEQ ID NO: 44390 - DNA, 453 bp, Listeria monocytogenes EGD-e
  CDS (1)..(453): transl_table=11
atgatacttataaataaacgagcggaaaatcaagattaccagatgattttagcgatttgggaaaagtcagttattgcaacgcatgattttttagctgcggaagataggcagttttacaaagaacaaattcctttgtttctagataatgtggaactgttcttatggtttgctggtgaagaaatcgttggttttagtgggacgagcgagcgggaactagatatgttatttcttaatccgatagctacgggtaatggttatgggagtcagattcttatttggttaatagaaaataagcggataaacttggtggatgtgaatgaacaaaatgaaaatgccacgagattttatttgaagcatggatttgtggtttcttccagaagtgacttggatggttttgggaacccttatccaattcttcatttacaactgaaggagagagttaatggaatatga

SEQ ID NO: 44391 - protein, 150 aa, Listeria monocytogenes EGD-e
MILINKRAENQDYQMILAIWEKSVIATHDFLAAEDRQFYKEQIPLFLDNVELFLWFAGEEIVGFSGTSERELDMLFLNPIATGNGYGSQILIWLIENKRINLVDVNEQNENATRFYLKHGFVVSSRSDLDGFGNPYPILHLQLKERVNGI

SEQ ID NO: 44392 - DNA, 453 bp, Listeria innocua Clip11262
  CDS (1)..(453): transl_table=11
atgatacttataaataaacgagcggaaaaacaagattaccagacaattttagcgatttgggaaaagtcagttattgtaacgcatgattttttaactgcggaagataggcagttttacaaagaacaaattcctttgtttctagataatgtggaactgttcttatggttcgctggtgaggaggtcattggttttagtgggacgagcgagcgggaactagatatgttgtttctggatccggtagccacgggtaatggttatgggagtcagattctgggttggctaatagaaaataagcggataaacctggtggatgtgaatgaacaaaatgaaaatgccacgagattttatttgaagcatggatttgtggtttcttccagaagtgacttggacggttttgggaagccttatccaattcttcaattgcaactgaaggagagagttaatggagtatga

SEQ ID NO: 44393 - protein, 150 aa, Listeria innocua Clip11262
MILINKRAEKQDYQTILAIWEKSVIVTHDFLTAEDRQFYKEQIPLFLDNVELFLWFAGEEVIGFSGTSERELDMLFLDPVATGNGYGSQILGWLIENKRINLVDVNEQNENATRFYLKHGFVVSSRSDLDGFGKPYPILQLQLKERVNGV

SEQ ID NO: 44394 - DNA, 456 bp, Yersinia pestis KIM
  CDS (1)..(456): transl_table=11
atgattcgagtctaccaacccgacgatctcaatgccctgatgcaactgtggctaaccagtactattgacgcgcacccttttgttgccgagcaatactggtatgagagcgcaccattaatcagagagacttatcttccggcagcacgtacctgggtatatcagcaaccaggagcggccgctgaggaaaatacgattatcgggtttatcagtatcctggaagaacaacttgtcggagcgttatttgttgcccaagcctttcacggccacggtgtcgccaaggccttgatggaccacgttcagcaacgctacccagcgctgagtctggaggtgtatcagcaaaaccgccgcgcctaccgcttctatcgtaaacaaggttttacggtcatcgggcgggcttatcacgcagaaactcagggcacaatcctcacgatgcattggcaacatcccgcacattaa

SEQ ID NO: 44395 - protein, 151 aa, Yersinia pestis KIM
MIRVYQPDDLNALMQLWLTSTIDAHPFVAEQYWYESAPLIRETYLPAARTWVYQQPGAAAEENTIIGFISILEEQLVGALFVAQAFHGHGVAKALMDHVQQRYPALSLEVYQQNRRAYRFYRKQGFTVIGRAYHAETQGTILTMHWQHPAH

SEQ ID NO: 44396 - DNA, 489 bp, Pseudomonas putida KT2440
  CDS (1)..(489): transl_table=11
atgttttccctatcgccccagaggaacaccggcatgtctgcgctactgacgctgcaaaccccgcgcttgtgcgactacagcgagctggtacaagtgtgggaggactcggtacgcgccacccacgacttcctgccagagggctatatcctgctgctgcgcgaacatgtgctgcgccgttatctcgacgcagtgatgctggtctgctgcaaggaccgccagcgcatctgtggtttcgccggtgtcgccaacgggcgggtggacatgctgttcgtcgcacctggctaccgtggccaaggggtaggcaagcgcctgctgcgctatgccatcagcgaactgaatgccgagtaccttgacgtcaacgagcagaacccgaaagcgctgggcttctacctgcatgaaggtttcgaggttatcggccgttcggaaaccgacggcctgggccagccctatcctctgctgcacatgaggctgatgcgcacagtgccttga

SEQ ID NO: 44397 - protein, 162 aa, Pseudomonas putida KT2440
MFSLSPQRNTGMSALLTLQTPRLCDYSELVQVWEDSVRATHDFLPEGYILLLREHVLRRYLDAVMLVCCKDRQRICGFAGVANGRVDMLFVAPGYRGQGVGKRLLRYAISELNAEYLDVNEQNPKALGFYLHEGFEVIGRSETDGLGQPYPLLHMRLMRTVP

SEQ ID NO: 44398 - DNA, 516 bp, Pseudomonas putida KT2440
  CDS (1)..(516): transl_table=11
atgatgccgacacttgcatggccgccgctcactggcgcgcacatccgccatcaatacactcaggatgacaccatgatcattcgccaaggcatcgctgcagactacccgcagctgctcgacatctggctgcgcgctgttcgcgcgacgcaccacttcctgcaaccctccgacatcgacgcactgttgccacagctgcgcgacgtgtacttcccggccgtcgagctgtgggttgcggtagacaccgatgaccagccactgggctttgtcggcttcaatgaaaaccatgtggaaatgctcttcgtcgacccagcgcgccaccgccagggcattggccgtgcattgctggatttcggccgccagtcacgcagtgcgatgagtgtcgatgtcaacgagcagaacccacaggcaacagcgttctaccagcactatggcttcgtccagactggccgttcaccactggatggcgaaggtcgcccgttccccttgctgcacatgagcctgcccacccgggcgtga

SEQ ID NO: 44399 - protein, 171 aa, Pseudomonas putida KT2440
MMPTLAWPPLTGAHIRHQYTQDDTMIIRQGIAADYPQLLDIWLRAVRATHHFLQPSDIDALLPQLRDVYFPAVELWVAVDTDDQPLGFVGFNENHVEMLFVDPARHRQGIGRALLDFGRQSRSAMSVDVNEQNPQATAFYQHYGFVQTGRSPLDGEGRPFPLLHMSLPTRA

SEQ ID NO: 44400 - DNA, 444 bp, Escherichia coli CFT073
  CDS (1)..(444): transl_table=11
atggttattagtattcgccgctcacggcatgaggagggggaggaactcgttgcgatttggtgtcgttctgtcgatgccactcacgattttttatcagcagagtatcgggccgagctggaagagctggtgcattcctttctgccggaagcaccgttgtgggtcgcggttaatgagcgggatcagccggttgggtttatgttgttaagtgggcagcatatggatgcgctgtttatcgatcctgatgtgcgcggctgcggcgtgggccggatgctggtgaagcatgcgctctcaatggccccggaactgacaaccaatgttaatgagcaaaatgagcaggcggttgggttctataagaaggtgggctttaaggttacggaacgctctgaggtggacgatttggggaaaccgtatccgttgctgaatctggcatatgtgggggtgtag

SEQ ID NO: 44401 - protein, 147 aa, Escherichia coli CFT073
MVISIRRSRHEEGEELVAIWCRSVDATHDFLSAEYRAELEELVHSFLPEAPLWVAVNERDQPVGFMLLSGQHMDALFIDPDVRGCGVGRMLVKHALSMAPELTTNVNEQNEQAVGFYKKVGFKVTERSEVDDLGKPYPLLNLAYVGV

SEQ ID NO: 44402 - DNA, 519 bp, Clostridium tetani E88
  CDS (1)..(519): transl_table=11
ttgccagcaaggcaaatggacttgttggcaaacacttcagaaaataaatttattaagaattatttgaaaggtggaaccaacatggaacatactattaaagattttaacaaaattaaagatatagatctaattatgaagatttggcttaattccaatctgcaagctcatgattttatttcagacagatactggatagaaaattatgatgaggtaaaaaaactattaccccaatcccatttaagagtatactggaaagatgagcagccaataggattcattggcattgtagatggatacattgcaggtatttttgtagatagtaattatcgatgtcaaggaataggacttgctcttttagaggatgcaaaaaaacaatataataaattatctctagatgtttatgaaaaaaatcaaggagcttttcgattttataaacgtaatggatttcaaaaagtttcttctaaagttgatgatattaataaagaaatagaatatcatatgatttggaagaaaaaataa

SEQ ID NO: 44403 - protein, 172 aa, Clostridium tetani E88
MPARQMDLLANTSENKFIKNYLKGGTNMEHTIKDFNKIKDIDLIMKIWLNSNLQAHDFISDRYWIENYDEVKKLLPQSHLRVYWKDEQPIGFIGIVDGYIAGIFVDSNYRCQGIGLALLEDAKKQYNKLSLDVYEKNQGAFRFYKRNGFQKVSSKVDDINKEIEYHMIWKKK

SEQ ID NO: 44404 - DNA, 468 bp, Lactobacillus plantarum WCFS1
  CDS (1)..(468): transl_table=11
ttgttaattaagtctttcccgcctgccgagcgaactccgcaattgattagccaattaactcaactctggcgacagtccgtcgacgccagtcaccactttctaacgcccgctgaaatcacaaccattgagcacgaagtccccacagcattacgaaccgttccacaactgctcgttgcagtggatgatcaaaataccccaactggtttcatcggtattgatggttcactagtagccatgctttttatcgccccagccgctagtggcgctggtattggaaccgccttactgcaaactagtattcaggattatggtgccacaacgcttacagtgaatgaacaaaacccacgggcgcgtcaattttatgaacaccgtggtttccaagtcactaatcgccaaccaactgatgatcagggccgtccatatccactattaactatgacttacaactgtgacccgttaaacgactga

SEQ ID NO: 44405 - protein, 155 aa, Lactobacillus plantarum WCFS1
MLIKSFPPAERTPQLISQLTQLWRQSVDASHHFLTPAEITTIEHEVPTALRTVPQLLVAVDDQNTPTGFIGIDGSLVAMLFIAPAASGAGIGTALLQTSIQDYGATTLTVNEQNPRARQFYEHRGFQVTNRQPTDDQGRPYPLLTMTYNCDPLND

SEQ ID NO: 44406 - DNA, 441 bp, Salmonella enterica subsp. enterica serovar Typhi Ty2
  CDS (1)..(441): transl_table=11
atgattcgcaaatcccagagtgaagacatggcgtctattctggcgctgtggatgaaaagtaccatttatgcccatccctttatcgaagaacgttactggcacgagagcgaagcaattgtacgcgacgtctatttacccgccgcgcaaacctgggtatgggaggaaaatgggcaactgaaaggcttcgtcagcgtactggaagcccgttttgtcggggcgctgtttgtcgcccccgacgcgttaagacacggcattggcaaagcgcttctggaatatgtccagcaacgttttcctctgctgagccttgaggtttaccagaaaaatcaatccgccgtaaacttctaccatgcgctcggttttcgtattgaagatagcgcctggcaggaggatacctcccaccccacctggattatgagttggcaggcggatcaaacgccgtaa

SEQ ID NO: 44407 - protein, 146 aa, Salmonella enterica subsp. enterica serovar Typhi Ty2
MIRKSQSEDMASILALWMKSTIYAHPFIEERYWHESEAIVRDVYLPAAQTWVWEENGQLKGFVSVLEARFVGALFVAPDALRHGIGKALLEYVQQRFPLLSLEVYQKNQSAVNFYHALGFRIEDSAWQEDTSHPTWIMSWQADQTP

SEQ ID NO: 44408 - DNA, 438 bp, Salmonella enterica subsp. enterica serovar Typhi Ty2
  CDS (1)..(438): transl_table=11
atgatgattaacattcgtcgttcaaggcgtgaggaaggggaaaaactgattgcgatctggcgtcgctcagtcgatgccacgcacgattttctgtcaaacgcttatcgggccgaactggaagaactggtgagcgattttctgccagaagcgccactatgggttgccgtgaccgatcaggatgagccggtagggtttatgctgcttaccggtgagcatatggatgctctgtttatcgatccggacgtgcgtggtcagggtatcggtaagatgctggttgaacatgcgttaacactggcgccgggattgacaaccaatgttaacgagcaaaatacacaagctgttggattttataagaaaatgggattcaaggtgacgggacgttcggaggtcgacgatcttgggaaaccgtatccattgttgaatttaatttatccgtga

SEQ ID NO: 44409 - protein, 145 aa, Salmonella enterica subsp. enterica serovar Typhi Ty2
MMINIRRSRREEGEKLIAIWRRSVDATHDFLSNAYRAELEELVSDFLPEAPLWVAVTDQDEPVGFMLLTGEHMDALFIDPDVRGQGIGKMLVEHALTLAPGLTTNVNEQNTQAVGFYKKMGFKVTGRSEVDDLGKPYPLLNLIYP

SEQ ID NO: 44410 - DNA, 1377 bp, Bacteroides thetaiotaomicron VPI-5482
  CDS (1)..(1377): transl_table=11
atgaagctacatcatatcgccatctggactttccgtctggaagaattaaaagatttctatgtccgctttctgggcgggacaagtaatgagaaatatatcaatcccaagaagggattcgaatcatactttatctcttttgatgaaggtcccactctggagttgatgagtcgggcagatgtgcagaataccccgatagaggaaaacaggcggggactgacacatcttgcgttcacatttcccagcaaggaggagattcttcgctttacggaagaaatgcgctccgaggggtataccatagtaggtgaaccacgcacttcgggcgacggatactttgagagcgttgtactcgaccccgacggaaatcgtttggaatgtgtatacaagaaagaaccggaagcagaaagaaccgaagcggctctatgcccgaatatcgaaacgaaacgtctgctgctgcgcccttttcaggagaatgacgcagaagcattctttgcctgttgccagaaccccaatttggggaataatgccggatgggctccccacaagacgttgaatgaatcccgtgaaatccttcacggcgcatttataggacaggaaggtatatgggctgttacattaaaagatacacagcaattgatagcttccatcggcatcgtacccgatccgaaacgggaaaatcctcaggtacgtatgctgggatattggctggacgaaccgtattggggaaaaggatacatgtcggaagcagtgcaagccgtgctcaactatggcttcaacgaactacagctcagcctcatcactgccaactgttatccgcacaacaaacgttcgcaacaagtgctgaagcgaaacggatttatctacgaaggtacacttcatcaggcagaactgacctataacgggaatatatatgatcatgaatgttactacattcccaatatagcacgccccaccgaacaggattatgatgaactgatccagctgtgggagaagtctgtccgctccacgcaccacttcctgacagaagagagtatccagttctataagccactgatacgcaaccactatctgccggcagtagagctctccatcatccgcaactctcacggaaagattgccgcattcatgggattgagtgatgagctgatcgagatgctgtttgtacaccccgacgaacagggaaagggatacggaaagcgattgatagagtatgccatccgccagaagcagatcgacaaggtggatgtgaacgaagacaacgaccaggctctccggttctatcagcatctgggattcgagatcatcggacgggatgaaacggacagtatgggcaagccgtatccaatcttgcacttacaactgaccgacgataaaaaataa

SEQ ID NO: 44411 - protein, 458 aa, Bacteroides thetaiotaomicron VPI-5482
MKLHHIAIWTFRLEELKDFYVRFLGGTSNEKYINPKKGFESYFISFDEGPTLELMSRADVQNTPIEENRRGLTHLAFTFPSKEEILRFTEEMRSEGYTIVGEPRTSGDGYFESVVLDPDGNRLECVYKKEPEAERTEAALCPNIETKRLLLRPFQENDAEAFFACCQNPNLGNNAGWAPHKTLNESREILHGAFIGQEGIWAVTLKDTQQLIASIGIVPDPKRENPQVRMLGYWLDEPYWGKGYMSEAVQAVLNYGFNELQLSLITANCYPHNKRSQQVLKRNGFIYEGTLHQAELTYNGNIYDHECYYIPNIARPTEQDYDELIQLWEKSVRSTHHFLTEESIQFYKPLIRNHYLPAVELSIIRNSHGKIAAFMGLSDELIEMLFVHPDEQGKGYGKRLIEYAIRQKQIDKVDVNEDNDQALRFYQHLGFEIIGRDETDSMGKPYPILHLQLTDDKK

SEQ ID NO: 44412 - DNA, 435 bp, Enterococcus faecalis V583
  CDS (1)..(435): transl_table=11
atgctgaaccaaaaagaagtaaaaaaaaccgattatactcaattaatttctctatggcgttcttcagtagaagctacccatttgtttttgagtcaggcagatattgataaaatcgaagtggttttacctgattattttcaacaagttcaattaagtatgtggttaaatgaagaacagaaatgtgtgggctttagtggaacaaatcaacaaacgttggaaatgttatttattgacccagtctattttcgtaaaggctatggtggagaaattatccaaaagttaatagagcaagaatcaattatctttgttgatgctaataaacaaaatgaaggggcagtgaagttctatcaatctcaagggtttcaagtaattggtgaatcaaaggaagatcctcaaggaaatccgtttcctattttacatatgaaacggatatag

SEQ ID NO: 44413 - protein, 144 aa, Enterococcus faecalis V583
MLNQKEVKKTDYTQLISLWRSSVEATHLFLSQADIDKIEVVLPDYFQQVQLSMWLNEEQKCVGFSGTNQQTLEMLFIDPVYFRKGYGGEIIQKLIEQESIIFVDANKQNEGAVKFYQSQGFQVIGESKEDPQGNPFPILHMKRI

SEQ ID NO: 44414 - DNA, 444 bp, Shigella flexneri 2a str. 2457T
  CDS (1)..(444): transl_table=11
atggttattagtattcgccgctcacggcatgaggaaggggaggaactcgttgcgatttggtgtcgatctgtcgatgccacccacgattttttatcagcagagtatcgggccgagctggaagagctggtgcgttcctttctgccggaagcaccgttgtgggtcgcggttaatgaacgggagcagccggttgggtttatgttgttaagtgggcagcatatggatgcgctgtttatcgatcctgatgtgtgcggctgcggcgtgggtcggatgctggtggagcatgcgctctcgatggcaccggaactgacaaccaacgttaatgagcaaaatgagcaggcggttgggttctataagaaggtgggttttaaggttacgggacgctctgaggtggacgatttggggaaaccgtatccgttgctgaatctggcgtatgtgggggaataa

SEQ ID NO: 44415 - protein, 147 aa, Shigella flexneri 2a str. 2457T
MVISIRRSRHEEGEELVAIWCRSVDATHDFLSAEYRAELEELVRSFLPEAPLWVAVNEREQPVGFMLLSGQHMDALFIDPDVCGCGVGRMLVEHALSMAPELTTNVNEQNEQAVGFYKKVGFKVTGRSEVDDLGKPYPLLNLAYVGE

SEQ ID NO: 44416 - DNA, 468 bp, Bordetella bronchiseptica RB50
  CDS (1)..(468): transl_table=11
atgaccagcatcagagcttcccgtcccgcagacggcgcgcgcaccgttgaaatctggcgagccgcggtggacgccacccatgatttcctgacgccgcaagaccgcctggcaatcgacgagatggtatgtggcttcctgcccctggctccgctttggcttgccgtcgatgacaacgactatccgatggccttcatgctcatcgaagacggccacatgcaggcgctgttcgtcgaccctgccgcccgtggcaggggaatcggcaccgccctggtgcgccacggcgccatgctgtatcccaggatgacgaccgacgtcaacgagcaaaatgcccaggcaatcggtttctatgaaaagctgggcttccaacgcacaggacgctcaccgctcgacgatcagggcaagccctatccgctgatccacctcgaactctcgcaggccaggccacctttgccgggatcgttcatctag

SEQ ID NO: 44417 - protein, 155 aa, Bordetella bronchiseptica RB50
MTSIRASRPADGARTVEIWRAAVDATHDFLTPQDRLAIDEMVCGFLPLAPLWLAVDDNDYPMAFMLIEDGHMQALFVDPAARGRGIGTALVRHGAMLYPRMTTDVNEQNAQAIGFYEKLGFQRTGRSPLDDQGKPYPLIHLELSQARPPLPGSFI

SEQ ID NO: 44418 - DNA, 438 bp, Bordetella bronchiseptica RB50
  CDS (1)..(438): transl_table=11
atgaacatacgcgaacgcaattacggcgacgatttcgtgctcgccgacatatggctgcgctcggtgcgcgccacccatacgttcctgagcgaggcgcagatccaggccatgtatccgcaggtgctcaagagctacctgccgtcggtgcgggtgtgggtgtgcgaggatggccagggcggcatcgccggcttcatgggcatgagcggcaacaagatcgaaatgctgttcgtcgacgccgacaagcgcgggcgcggcgccggccgccgcctgctgaacttcgcgcggtcgctgcacgacagcctgcgcgtcgatgtgaacgagcagaacgcgcaggccgtggggttttacctgcactccggtttcgtggaaaccggccgctcggacaccgatgacgccgggcggccctttcccatcatccatatgcggctggacggctag

SEQ ID NO: 44419 - protein, 145 aa, Bordetella bronchiseptica RB50
MNIRERNYGDDFVLADIWLRSVRATHTFLSEAQIQAMYPQVLKSYLPSVRVWVCEDGQGGIAGFMGMSGNKIEMLFVDADKRGRGAGRRLLNFARSLHDSLRVDVNEQNAQAVGFYLHSGFVETGRSDTDDAGRPFPIIHMRLDG

SEQ ID NO: 44420 - DNA, 447 bp, Synechococcus sp. WH 8102
  CDS (1)..(447): transl_table=11
gtgacggtgatcgatctcgatcccagctggttggcggcgtgtctcgttctggacgaacgggcgttgaacgggttctggagtgctcagcagtggcgctccgaactggaggatccccgtcgcctctgccttgggttggtgcgggacgagaaaggcttgtccggagtggcctgcggttggctcgtcgtggatgaactgcacatcacggtgttggcggtggatcccgacgagcgtcaacggggccatggccgtcgtcttctcacggcgctgttgcaacgggcacgccaggacggtgctgcccacgccaccctcgaggtccgtagcgacaacatcgccgcgctctctctgtatcaccgcgttggtttcaaaaccgccggtcgccgtgagaagtactaccgagacggttccgatgccctgatccagtggcgccggttgtccaccgaggagtag

SEQ ID NO: 44421 - protein, 148 aa, Synechococcus sp. WH 8102
MTVIDLDPSWLAACLVLDERALNGFWSAQQWRSELEDPRRLCLGLVRDEKGLSGVACGWLVVDELHITVLAVDPDERQRGHGRRLLTALLQRARQDGAAHATLEVRSDNIAALSLYHRVGFKTAGRREKYYRDGSDALIQWRRLSTEE

SEQ ID NO: 44422 - DNA, 462 bp, Photorhabdus luminescens subsp. laumondii TTO1
  CDS (1)..(462): transl_table=11
atgaatatgagaattcagcaagcgataaaggccgatttcaataaactgatcgaaatctgggaagcctcggtacgggcaacacatgactttttatctgacgaacatattaatcaattacgcccattgattctgcatacctatttaccgatgctgacggtttataaagcgataaatgataaacacgaaattgaaggttttattagcgttgatcagcatcgagttgaaatgttgtttatctctctagattcccgtggcaaaggcatcggcaagacattgctgaattttgctattagcaaattaggtatcaatgaacttgatgttaatgaacaaaatgttcaaggggtgggtttctatcagcacttgggatttgaagtttttaaccgctcagaaattgacggtcaaggtaatccatttccgttattacatatgcgaattgaacggccgaacaccgaagctacctaa

SEQ ID NO: 44423 - protein, 153 aa, Photorhabdus luminescens subsp. laumondii TTO1
MNMRIQQAIKADFNKLIEIWEASVRATHDFLSDEHINQLRPLILHTYLPMLTVYKAINDKHEIEGFISVDQHRVEMLFISLDSRGKGIGKTLLNFAISKLGINELDVNEQNVQGVGFYQHLGFEVFNRSEIDGQGNPFPLLHMRIERPNTEAT

SEQ ID NO: 44424 - DNA, 447 bp, Rhodopseudomonas palustris CGA009
  CDS (1)..(447): transl_table=11
atgcccaccttcaccctccgcccctacaccgaagccgacgaagaccccgctatcgcgctgtggctgcggacctggcagctcgcctacccggcgatcgacttcaccaagcgggtcgactggtggcgcgagcgctggcgcaccgagctggtgccgcaggccgccatcatcgtcgccgagcaggacagcgccctcatcggcttcgtcaccatcgacgcggtcggttatctcgatcagctcgtggtcgaacccgagcattggggctggggtgtcgccgaggcgctggtggacgaggccaagcagcgctcgccgaccgaggtcaccctcaaggtcaacgccgacaactaccgcgccatcaagttctatcgccgcaacggcttcgcagtgaccagcgaggagctcaatagctccggccggccggtgctgaacatgctgtggcggccggcttag

SEQ ID NO: 44425 - protein, 148 aa, Rhodopseudomonas palustris CGA009
MPTFTLRPYTEADEDPAIALWLRTWQLAYPAIDFTKRVDWWRERWRTELVPQAAIIVAEQDSALIGFVTIDAVGYLDQLVVEPEHWGWGVAEALVDEAKQRSPTEVTLKVNADNYRAIKFYRRNGFAVTSEELNSSGRPVLNMLWRPA

SEQ ID NO: 44426 - DNA, 450 bp, Clostridium difficile 630
  CDS (1)..(450): transl_table=11
atgaaatctggaataattcttgaaatgaaacaaataaattcaacagaatatgacgaaatgttgcaagtctgggaatcatcagtaagagcaacgcatgattttttaacagaaaaagatattgaatctttgataccattagttgagattggacttaaagaagtagaaaatatagtttgtataaaagataatgagataataaagggctttataggaatagataaagataaaattgagatgctctttatagaagataaatatagaggaaatggtattggtaaaaaattaataaaatatgctatagataaatacaatgtaaaatatgttgatgtaaatgagcagaataaaaaagctgtaggattttatattcacttaggatttaaagtgtttgataggtctgaaatagatggacaaggtaacccatttccaatactacatatgaaattaatttaa

SEQ ID NO: 44427 - protein, 149 aa, Clostridium difficile 630
MKSGIILEMKQINSTEYDEMLQVWESSVRATHDFLTEKDIESLIPLVEIGLKEVENIVCIKDNEIIKGFIGIDKDKIEMLFIEDKYRGNGIGKKLIKYAIDKYNVKYVDVNEQNKKAVGFYIHLGFKVFDRSEIDGQGNPFPILHMKLI

SEQ ID NO: 44428 - DNA, 465 bp, Desulfovibrio vulgaris subsp. vulgaris str. Hildenborough
  CDS (1)..(465): transl_table=11
atgcaatcgattccgtgcaaggtcgtacctctcacgcaagggcactatagcgccgtcgaggctgtctgggaggcgtcggtacgctcgacgcacgcattcttgagagaggacgacctgttgaccatcagggctagactggtttcggacttccttccggcggtgacgctgtacggcgtattcatggagggctctttggctggttttgcggggaccgccagccgcaagctggagatgttattcatcgccccatactggcaggggcgcggtctaggcaggaggcttgtagaatctgccatacgccatgagggagtcgccttcgtcgatgtcaacgaacagaatccacgggcactggcgttctacaggcatatggggttcgaggtggtgggccggtctgagcgcgatggtatggggatgccatacccgcttctgcacatgatgcttcgccatgagcatgaccagaagtga

SEQ ID NO: 44429 - protein, 154 aa, Desulfovibrio vulgaris subsp. vulgaris str. Hildenborough
MQSIPCKVVPLTQGHYSAVEAVWEASVRSTHAFLREDDLLTIRARLVSDFLPAVTLYGVFMEGSLAGFAGTASRKLEMLFIAPYWQGRGLGRRLVESAIRHEGVAFVDVNEQNPRALAFYRHMGFEVVGRSERDGMGMPYPLLHMMLRHEHDQK

SEQ ID NO: 44430 - DNA, 444 bp, Listeria monocytogenes str. 4b F2365
  CDS (1)..(444): transl_table=11
atgatacttataaataaacgagcgaaaaaacaagattaccagacaattttagcgatttgggaaaagtcagttattgcaacgcatgattttttagctgcggaagataggcagttttacaaagaacaaattcctttgtttctagataatgtggaactgttcttatggttcgctggtgaagaggttgttggttttagtgggacgagcgagcgggaactagatatgttgtttttagagccgatagctacgggtaatggttatgggagtcaaattcttagttggctaatagaaaataagcagataaatttggtggatgtgaatgaacaaaatgaaaatgccacgagattttatttgaagcatggatttgtggtttcttctagaagtgacgcggacggttttgggaagccttatccaattcttcatttgcaactgaagggagagagttaa

SEQ ID NO: 44431 - protein, 147 aa, Listeria monocytogenes str. 4b F2365
MILINKRAKKQDYQTILAIWEKSVIATHDFLAAEDRQFYKEQIPLFLDNVELFLWFAGEEVVGFSGTSERELDMLFLEPIATGNGYGSQILSWLIENKQINLVDVNEQNENATRFYLKHGFVVSSRSDADGFGKPYPILHLQLKGES

SEQ ID NO: 44432 - DNA, 441 bp, Pseudomonas fluorescens Pf-5
  CDS (1)..(441): transl_table=11
atgctcatgaagattcgccctcgcgtcgctgcggacgacgccctgttgaccgcgctctgggagcgttcggtccgcgccacccatgactttatcgctgaagacgatatccagcgcctgtacccgctggtacgcgacagctacctgccggcccttgaggcctgggtctgggagaaccccgacgccagccccggcggttttatcgccaccagcgacgacacggtacaaatgctgttcatcgaaccggcccaacggggccagggcatcggtcgaaagctcctggatcacgtacgccgtcccggcctcaaggtcgacgtcaacgaacagaacccccaggcccatggtttctaccgtcgctacggcttcgtcgactgcggtcgttcggaaaccgacggtgaaggccggccgtttccgatcattcacatgcagttgcaagaccaatga

SEQ ID NO: 44433 - protein, 146 aa, Pseudomonas fluorescens Pf-5
MLMKIRPRVAADDALLTALWERSVRATHDFIAEDDIQRLYPLVRDSYLPALEAWVWENPDASPGGFIATSDDTVQMLFIEPAQRGQGIGRKLLDHVRRPGLKVDVNEQNPQAHGFYRRYGFVDCGRSETDGEGRPFPIIHMQLQDQ

SEQ ID NO: 44434 - DNA, 423 bp, Methanosarcina barkeri str. Fusaro
  CDS (1)..(423): transl_table=11
ttgatcagaagctacaggaaaaccgatcttgaagaaatggtaaggatctggtacgaagcctccattagtgcccatttctttatccctgcctcgttctgggcttcgcaaaagaacacaatgaaggagaagtactttccactcgccgaaaactttgtttttgaggaaaaaggacagatcgcaggattcatctcccttgttggagaacatgtctgcgcccttttcgtagcgccggacatgcagggtcgaggaattggcagagcttttctcaaatatgcaaaggccctgaaaggaaggctctctctcaaagtttacagggaaaacgagagtgcccttcacttttatgaaaagtgtgggtttgtggcggctggcgaagaggttgatgagtatacaggttgcgcgcagattttgatggaatggaaataa

SEQ ID NO: 44435 - protein, 140 aa, Methanosarcina barkeri str. Fusaro
MIRSYRKTDLEEMVRIWYEASISAHFFIPASFWASQKNTMKEKYFPLAENFVFEEKGQIAGFISLVGEHVCALFVAPDMQGRGIGRAFLKYAKALKGRLSLKVYRENESALHFYEKCGFVAAGEEVDEYTGCAQILMEWK

SEQ ID NO: 44436 - DNA, 453 bp, Rhodobacter sphaeroides 2.4.1
  CDS (1)..(453): transl_table=11
atgggaaccctgaacatcctgatccggccgtatgatgcggcaacggatctcaagcgcctgtccgatatctggttcgatgcctcgatggcggcgcatcccttcatcggcgaggcgagactggtggagcagcgccagctgatcgaggaggactatctcccgacggccgagacctgggttgcctgccatgagcgggaagccgtcggcttcatcagcctgctgggcagtttcatcggcgggctcttcgtcgcccctgaccggcagggcatgggtgtcgggcgcaagctcgtttcccatgccctcgcccggcacggggaactgtcccttgaggtctataccgccaacgagcaggcggtgcgcttctacagctcgctcggctttcgcgagctgtcccggcgcgatgtcgacgacttcggttttccgttcccgaacgcgtccctgcacctgaaggtctga

SEQ ID NO: 44437 - protein, 150 aa, Rhodobacter sphaeroides 2.4.1
MGTLNILIRPYDAATDLKRLSDIWFDASMAAHPFIGEARLVEQRQLIEEDYLPTAETWVACHEREAVGFISLLGSFIGGLFVAPDRQGMGVGRKLVSHALARHGELSLEVYTANEQAVRFYSSLGFRELSRRDVDDFGFPFPNASLHLKV

SEQ ID NO: 44438 - DNA, 522 bp, Burkholderia sp. 383
  CDS (1)..(522): transl_table=11
atgacggcgtcggctacccgccgaactttccattacaaatcaaagacgggccaatccatgatcagaattcgcaagtccacccaggccgacggcgcacgcgtgctggatatctggcgcaacgcggtcgacgccacgcaccacttcctgagcgacgacgaccgtcgcgcgatcgaatccgaagtcgtcgcgttcctgcctggtgcaccgctcgatctcgccgtcgacgataccgaccgcgcgatcggcttcatgctgctcgacggcagtcacatggaagccttgttcgtcgatcccgcttaccacggcgcgggtgtcgggcgcctgctcgtggaagaggcactcgagcgtcaccccgacctgtcgaccgacgtgaacgaacagaacgaatcggcagcgggattctatgagcggctcggcttcgagcgcaccgggcgatcggcgctcgatggacaagggcgcgcctatccgctgattcacctgcgctatcgcgctgcgccgccgtcgtcgccgcagcacgcatga

SEQ ID NO: 44439 - protein, 173 aa, Burkholderia sp. 383
MTASATRRTFHYKSKTGQSMIRIRKSTQADGARVLDIWRNAVDATHHFLSDDDRRAIESEVVAFLPGAPLDLAVDDTDRAIGFMLLDGSHMEALFVDPAYHGAGVGRLLVEEALERHPDLSTDVNEQNESAAGFYERLGFERTGRSALDGQGRAYPLIHLRYRAAPPSSPQHA

SEQ ID NO: 44440 - DNA, 441 bp, Desulfovibrio desulfuricans G20
  CDS (1)..(441): transl_table=11
atgagcatacgtcccgccacccgccgtgataccgaagccatactggacatctggcttgaagcgtccatcgcggcgcacagctttatcgatgccgcattctggcgcgacaacattgaagccatgcgcaccgtctatctgccttcggccacaacagtttgcgtatacgacacaccgcagggcatcacgggtttttacgcactgcacaaacgccatctggccgcgctgtttgtggcgccacggcgacagcgcaacggcacaggacgctgcctttttgcccatgcactgcgtcaggcgggcggcctgactcttaatgtctacgccgaaaaccggcaggcctgcgacttttatctggcgcaggggtgcaccatagcagcccgcaacaccgacccgcacaccggcagggcagaatacataatgacctgtgcccccgcagagggataa

SEQ ID NO: 44441 - protein, 146 aa, Desulfovibrio desulfuricans G20
MSIRPATRRDTEAILDIWLEASIAAHSFIDAAFWRDNIEAMRTVYLPSATTVCVYDTPQGITGFYALHKRHLAALFVAPRRQRNGTGRCLFAHALRQAGGLTLNVYAENRQACDFYLAQGCTIAARNTDPHTGRAEYIMTCAPAEG

SEQ ID NO: 44442 - DNA, 438 bp, Desulfovibrio desulfuricans G20
  CDS (1)..(438): transl_table=11
atgaacatagttgccgccgcacaggaagattatccggaaatactcgcggtctgggaggcctcggtacgggctacccatgactttttgaccgaagacaatattcagtttttcaaaccgctgattttgaaggagtatctgcctgctgtggatttatactgcgcaaaggatgagaccggcaggattcatggctttctgggcgtggcggaacagaatatcgagatgctttttcttgctcctgaaagccgcggcagggggctggggaagctgctggtgaattttgccgttgcagagctcggttccgtcagggtcgatgtcaacgaacaaaatccttcagctgcggggttttacgaacatatggggtttacggttgtgcggcgttcttctgtggacgggcaggggcagccttttccccttctgcatatggagctgcggaaatga

SEQ ID NO: 44443 - protein, 145 aa, Desulfovibrio desulfuricans G20
MNIVAAAQEDYPEILAVWEASVRATHDFLTEDNIQFFKPLILKEYLPAVDLYCAKDETGRIHGFLGVAEQNIEMLFLAPESRGRGLGKLLVNFAVAELGSVRVDVNEQNPSAAGFYEHMGFTVVRRSSVDGQGQPFPLLHMELRK

SEQ ID NO: 44444 - DNA, 453 bp, Rhodospirillum rubrum ATCC 11170
  CDS (1)..(453): transl_table=11
atgaataatcccagtctctcgatccgcgcctatgacggggcggccgatctgtccaggctctcgaccatttggttcgaggcctcgcttcaggcccatgccttcattggcgaaaagcgcctgcgcgagcaacggcgccttatcgaggaaatctacctgccaaaggcggaaacctgggtggcctgttcgggggggagcgccgtgggcttcatcagtctgctcgatacgttcatcggcggcctgttcgtcgccccggaccagcaggggcggggcatcggcaaagcccttgtcgcccatgccttggcgcggacaggagagctgcggctggaggtttatacggccaaccagcaggcgttttccttctacaccagcctcggatttaaggaactctcgcgcagggccgaggatgacgagggcatgccgttcgagaatgccgctttgcgcctgacgctctga

SEQ ID NO: 44445 - protein, 150 aa, Rhodospirillum rubrum ATCC 11170
MNNPSLSIRAYDGAADLSRLSTIWFEASLQAHAFIGEKRLREQRRLIEEIYLPKAETWVACSGGSAVGFISLLDTFIGGLFVAPDQQGRGIGKALVAHALARTGELRLEVYTANQQAFSFYTSLGFKELSRRAEDDEGMPFENAALRLTL

SEQ ID NO: 44446 - DNA, 444 bp, Desulfitobacterium hafniense Y51
  CDS (1)..(444): transl_table=11
atgaaactgattgaagtaaacgaattaaatccagtcctaatagggcaactacttgaagtttgggatagatcagttagagaaacacatttatttttatctgattcagagattaaaaatatagcgaagtatattccacaggctttgaactcgatagctcatttgattgttgcagtcaataatgaaaagaaacctgttgcatttatgggaattgaagaaagaaagttggaaatgctttttatttccccccaatatagaggaaagggattggggaaacaacttttacattatggtatggaaaactattctataaacgaattaggggtgaatgaacaaaatccgcaagcaaaaggcttctatgaacacatggggtttcaggtatataaaagaactagcacagacgagcaaggaaatccttatccgattttatatatgagattagtttaa

SEQ ID NO: 44447 - protein, 147 aa, Desulfitobacterium hafniense Y51
MKLIEVNELNPVLIGQLLEVWDRSVRETHLFLSDSEIKNIAKYIPQALNSIAHLIVAVNNEKKPVAFMGIEERKLEMLFISPQYRGKGLGKQLLHYGMENYSINELGVNEQNPQAKGFYEHMGFQVYKRTSTDEQGNPYPILYMRLV

SEQ ID NO: 44448 - DNA, 453 bp, Hyphomonas neptunium ATCC 15444
  CDS (1)..(453): transl_table=11
atgaaaaatcaaatactgaccgtccgcccctataacgcggcaaccgaccttccgacattgctcgacatctggtttgaggcgtccctgcgtgcccatccctttttaggtgagcaccgtttgcgtgaggaacgcatcctgatggaaactgaatacctgccaaaatcggaaaactgggttgcctgcgaccagggagagccgattggattcattggccttctggatacattcgtgggcggactgttcattgctccggcccatcagggaaaaggcgctggccgcctcttaacagcgcatgcgctggaactgaaaggcagactcgaactggaggtctacaccgacaaccagcaagcatatgctttctatgaaaagctgggctttcgggaagtctcgaggcgtcggactgatgaccacggcctccccttcgaaaacgcccgcatgcgactgacaggctga

SEQ ID NO: 44449 - protein, 150 aa, Hyphomonas neptunium ATCC 15444
MKNQILTVRPYNAATDLPTLLDIWFEASLRAHPFLGEHRLREERILMETEYLPKSENWVACDQGEPIGFIGLLDTFVGGLFIAPAHQGKGAGRLLTAHALELKGRLELEVYTDNQQAYAFYEKLGFREVSRRRTDDHGLPFENARMRLTG

SEQ ID NO: 44450 - DNA, 432 bp, Pseudomonas aeruginosa UCBPP-PA14
  CDS (1)..(432): transl_table=11
atgcacattcgcaagcgcgtcgacgccgacaacacggcattggtcgacctgtgggaacgttccgtccgcgcgacccacgactttctcagtgaagcggacatcgtcgagctttacccacaggtccgcgacctgtacctgccggccgtcgaggtctgggtgctggtcgacgacgacggcgtggcccagggcttcattggcctgaaccagacgcatgtcgagatgctcttcgtcgaacccgggctgcgcggccggggtatcggccgacgcctgctcgatcatgcgcgggcgacctggccgcgcctgagcgtcgatgtcaacgagcagaacccgcaggcctgcggtttctatcgacactatgggttccgccagaccggccgctccgcgaccgactcggcggggcggccgttcccgctgctgcacatgagcctctag

SEQ ID NO: 44451 - protein, 143 aa, Pseudomonas aeruginosa UCBPP-PA14
MHIRKRVDADNTALVDLWERSVRATHDFLSEADIVELYPQVRDLYLPAVEVWVLVDDDGVAQGFIGLNQTHVEMLFVEPGLRGRGIGRRLLDHARATWPRLSVDVNEQNPQACGFYRHYGFRQTGRSATDSAGRPFPLLHMSL

SEQ ID NO: 44452 - DNA, 444 bp, Pseudomonas putida GB-1
  CDS (1)..(444): transl_table=11
atgatcattcgccaaggcatcgctgcagactacccgcagttgctcgacatctggctgcgcgccgtacgcgcgacgcaccactttctacaaccctgcgacatcgacgcgctgttgccacagctgcgtgacctgtattttccggccgtcgagctgtgggttgcagtagacaccgatgaccagcccctgggcttcatcggcttcaatgaaaaccacgtggaaatgctcttcgtcgaccccgcgcgccacggccagggcattggccgcgaactgctggatttcggccgccagtcgcgcagcacgatgagtgtcgatgtcaacgagcagaacccgcaggcaacagggttttaccagcactatggctttgtccagaccggccgctcgccgctggacggtgaaggccgcccgttccctttgctgcacatgagcttgcccgccgatccatga

SEQ ID NO: 44453 - protein, 147 aa, Pseudomonas putida GB-1
MIIRQGIAADYPQLLDIWLRAVRATHHFLQPCDIDALLPQLRDLYFPAVELWVAVDTDDQPLGFIGFNENHVEMLFVDPARHGQGIGRELLDFGRQSRSTMSVDVNEQNPQATGFYQHYGFVQTGRSPLDGEGRPFPLLHMSLPADP

SEQ ID NO: 44454 - DNA, 456 bp, Pseudomonas putida GB-1
  CDS (1)..(456): transl_table=11
atgcctgcgctactgacgctgcaaaccccgcgcttgtgcgactacagcgaattggtacaggtatgggaggattcggtacgcgccacccacgacttcctgccagagggctacatcctgctgctgcgcgaacacgtgctgcgccgctacctcgacgcagtgatgctgatttgctgcaaggaccgccaacggatctgcggtttcgccggggtcgccaacgggcgggtggacatgctgttcgtcgcacctacccaccgtggccagggtgttggcaagcgcctgctgcgctatgccatcaacgaactgaatgccgagtacctggacgtcaacgaacaaaacccgcaagcgttgggcttctacctgcatgaaggatttgaagtcatcggccgttcggaaaccgacggtttgggccagccctaccctctgctgcacatgaggctggtgcgaagcgtaccttga

SEQ ID NO: 44455 - protein, 151 aa, Pseudomonas putida GB-1
MPALLTLQTPRLCDYSELVQVWEDSVRATHDFLPEGYILLLREHVLRRYLDAVMLICCKDRQRICGFAGVANGRVDMLFVAPTHRGQGVGKRLLRYAINELNAEYLDVNEQNPQALGFYLHEGFEVIGRSETDGLGQPYPLLHMRLVRSVP

SEQ ID NO: 44456 - DNA, 444 bp, Pseudomonas aeruginosa
  CDS (1)..(444): transl_table=11
atgtcctctccgccgaagatccgccgctacattcccgccgaccgcgatgccaccctcgccatctggctggaggcctcgcgcgtcggccacggtttcctcggcgaagccgagttgcagaagcagaaggcactggttcgcgatcattatctggatgcctcggaaacctggctggcgctggacggcgatacgccgctgggcttcatcggcctgctcgatgccttcatcggcggcctgttcgtcgcccgacggcccacggcgcggatcggccggcaactggtggagcacgcggcaaccctgaagggcgcgctggaggtcgaggtctacgccgccaaccgcgaggcgctggggttctacgcgcgctgcggcttcgtcgagagcggccgacgcccgcgcgacgacgaggggcgcgcgctggagatcgtccagttgcgccgcgaacactag

SEQ ID NO: 44457 - protein, 147 aa, Pseudomonas aeruginosa
MSSPPKIRRYIPADRDATLAIWLEASRVGHGFLGEAELQKQKALVRDHYLDASETWLALDGDTPLGFIGLLDAFIGGLFVARRPTARIGRQLVEHAATLKGALEVEVYAANREALGFYARCGFVESGRRPRDDEGRALEIVQLRREH

SEQ ID NO: 44458 - DNA, 453 bp, Escherichia coli
  CDS (1)..(453): transl_table=11
atgaataacatacaaataagaaactatcagcctggcgattttcagcaactatgcgctattttcattagagcggttacgatgaccgccagtcagcattattcaccacaacaaatttccgcctgggcgcagattgacgaatctcgctggaaggagaaactcgcgaaatcacaagtgtgggttgcgatcattaatgcacaaccggttggttttatttcccgcattgaacattatatcgatatgttatttgttgaccctgaatacacccgccgtggggttgccagcgctttgttaaaacctttgattaagtctgaatccgaacttacggtggacgcaagcataaccgcaaaacccttttttgaacgttatggttttcagacagttaagcagcagcgcgttgaatgccggggagcgtggtttactaatttttatatgcgatataaaccgcaacattaa

SEQ ID NO: 44459 - protein, 150 aa, Escherichia coli
MNNIQIRNYQPGDFQQLCAIFIRAVTMTASQHYSPQQISAWAQIDESRWKEKLAKSQVWVAIINAQPVGFISRIEHYIDMLFVDPEYTRRGVASALLKPLIKSESELTVDASITAKPFFERYGFQTVKQQRVECRGAWFTNFYMRYKPQH

SEQ ID NO: 44460 - DNA, 438 bp, Salmonella typhimurium
  CDS (1)..(438): transl_table=11
atgatgattaacattcgccgttcaaggcatgaggaaggggaaaaactgattgcgatctggcgtcgctcagtcgatgccacgcacgattttctgtcaaacgcttatcgggccgaactggaagaactggtgagcgattttctgccagaagcgccactatgggttgccgtgaccgatcaggatgagccggtagggtttatgctgcttaccggtgagcatatggatgctctgtttatagatccggacgtgcgcggtcagggtatcggtaagatgctggttgaacatgcgttaacactggcgccgggattgacaaccaatgttaacgagcaaaatacacaagctgttggattttataagaaaatgggattcaaggtgacgggacgttcggaggtcgacgatcttgggaaaccgtatccattattgaatttaatttatccgtga

SEQ ID NO: 44461 - protein, 145 aa, Salmonella typhimurium
MMINIRRSRHEEGEKLIAIWRRSVDATHDFLSNAYRAELEELVSDFLPEAPLWVAVTDQDEPVGFMLLTGEHMDALFIDPDVRGQGIGKMLVEHALTLAPGLTTNVNEQNTQAVGFYKKMGFKVTGRSEVDDLGKPYPLLNLIYP

SEQ ID NO: 44462 - DNA, 24 bp, Artificial sequence
  primer
atggttattagtattcgccgctca

SEQ ID NO: 44463 - DNA, 22 bp, Artificial sequence
  primer
ttacgcccccacatacgccaga

SEQ ID NO: 44464 - protein, 131 aa, Artificial sequence
  consensus sequence
  Variant (2)..(8): Xaa in position 2 to 8 is any amino acid
  Variant (9)..(11): Xaa in position 9 to 11 is any or no amino acid
  Variant (13)..(13): Xaa in position 13 is any amino acid
  Variant (15)..(46): Xaa in position 15 to 46 is any amino acid
  Variant (47)..(54): Xaa in position 47 to 54 is any or no amino acid
  Variant (57)..(66): Xaa in position 57 to 66 is any amino acid
  Variant (67)..(67): Xaa in position 67 is any or no amino acid
  Variant (70)..(71): Xaa in position 70 to 71 is any amino acid
  Variant (73)..(77): Xaa in position 73 to 77 is any amino acid
  Variant (79)..(79): Xaa in position 79 is any amino acid
  Variant (81)..(82): Xaa in position 81 to 82 is any amino acid
  Variant (84)..(95): Xaa in position 84 to 95 is any amino acid
  Variant (96)..(102): Xaa in position 96 to 102 is any or no amino acid
  Variant (104)..(104): Xaa in position 104 is any amino acid
  Variant (105)..(106): Xaa in position 105 to 106 is any or no amino acid
  Variant (108)..(109): Xaa in position 108 to 109 is any amino acid
  Variant (111)..(112): Xaa in position 111 to 112 is any amino acid
  Variant (115)..(117): Xaa in position 115 to 117 is any amino acid
  Variant (120)..(123): Xaa in position 120 to 123 is any amino acid
  Variant (125)..(127): Xaa in position 125 to 127 is any amino acid
  Variant (129)..(130): Xaa in position 129 to 130 is any amino acid
WXXXXXXXXXXHXFXXXXXXXXXXXXXXXXXXXXXXXXXXXXXXXXXXXXXXXXGFXXXXXXXXXXXLFXXPXXXXXGXGXXLXXXXXXXXXXXXXXXXXXXVXXXNXXAXXFYXXXGFXXXXRXXXDXXG

SEQ ID NO: 44465 - protein, 19 aa, Artificial sequence
  protein pattern
  Variant (2)..(4): Xaa in position 2 to 4 is any amino acid
  Variant (5)..(6): Xaa in position 5 to 6 is any or no amino acid
  Variant (8)..(8): Xaa in position 8 is any amino acid
  Variant (9)..(9): Xaa in position 9 is Glu, Asn, Gln, Arg or Ser
  Variant (11)..(12): Xaa in position 11 to 12 is any amino acid
  Variant (15)..(17): Xaa in position 15 to 17 is any amino acid
VXXXXXNXXAXXFYXXXGF

SEQ ID NO: 44466 - DNA, 1650 bp, Escherichia coli
  CDS (1)..(1650): transl_table=11
atgaaaagagttctgacggcgcttgccgccacactccctttcgcagctaacgccgcggatgctattagcggggccgtagagcgccagccaacgaactggcaggcgattattatgttcctgattttcgtcgtgtttacgctcggcattacctactgggcatcaaaacgcgtacgttctcgtagcgactactacaccgcaggcggcaatatcactggcttccagaacgggctggcgattgccggggactatatgtccgccgcctcattcttggggatctccgcgctggtgtttacctccggctatgacggcttaatttactcgctgggcttcctggtgggctggccgatcattttgttcctgattgccgaacgtctgcgtaacctggggcgctacacctttgccgatgtggcctcttaccgtctgaaacaagggccgattcgtattctttcggcctgtggttctctggtggtggtggcgctttaccttatcgcccagatggtgggcgcaggtaaactgatcgagctgctgtttggccttaactatcacattgcggtggtgctggtcggcgtgctgatgatgatgtacgtcctgttcggcggcatgctggcgaccacctgggtgcaaattatcaaagccgtgctgttgctgttcggtgccagctttatggcctttatggtgatgaaacacgtcggctttagcttcaacaatctgttcagtgaagcgatggcggtacacccgaaaggtgtcgacatcatgaagccgggcgggctggtgaaagatccgatctccgcgctctctctgggtctgggactgatgtttggtacggcgggcttgccgcacattctgatgcgcttctttacagtcagcgatgcccgcgaagcacgtaagagcgtgttctacgccaccgggtttatgggctacttctatattctgacctttattatcggcttcggcgcgatcatgctggttggtgcgaatccggaatataaagacgcggcgggccatctgattggtggtaacaacatggcggccgttcacctggcgaatgcagtgggcggcaacctgttcctcggttttatttcagcggttgctttcgccactatcctcgcggtggttgcgggtctgacgctggcgggcgcatccgcggtttcgcatgacttgtacgctaacgtcttcaaaaaaggcgcgaccgaacgtgaagagctgcgggtatcaaaaatcaccgtactgatcctcggcgtgattgcgattatcctcggcgtgctgtttgagaatcagaacatcgcctttatggtggggctggcgtttgccatcgcggcgagctgtaacttcccgatcattctgctttctatgtactggtcgaaactgaccacgcgtggcgcgatgatgggtggctggctggggctgattaccgcagtagtactgatgatcctcggcccgacgatttgggtacagatccttggtcacgaaaaagccatcttcccgtatgaatacccggcgctgttctctatcaccgtggcattcctcggcatctggttcttctcggcaaccgataactcagcggaaggcgcgcgtgagcgtgaactgttccgcgcgcagtttatccgctcccagaccggctttggcgttgagcaaggccgcgcgcattaa

SEQ ID NO: 44467 - protein, 549 aa, Escherichia coli
MKRVLTALAATLPFAANAADAISGAVERQPTNWQAIIMFLIFVVFTLGITYWASKRVRSRSDYYTAGGNITGFQNGLAIAGDYMSAASFLGISALVFTSGYDGLIYSLGFLVGWPIILFLIAERLRNLGRYTFADVASYRLKQGPIRILSACGSLVVVALYLIAQMVGAGKLIELLFGLNYHIAVVLVGVLMMMYVLFGGMLATTWVQIIKAVLLLFGASFMAFMVMKHVGFSFNNLFSEAMAVHPKGVDIMKPGGLVKDPISALSLGLGLMFGTAGLPHILMRFFTVSDAREARKSVFYATGFMGYFYILTFIIGFGAIMLVGANPEYKDAAGHLIGGNNMAAVHLANAVGGNLFLGFISAVAFATILAVVAGLTLAGASAVSHDLYANVFKKGATEREELRVSKITVLILGVIAIILGVLFENQNIAFMVGLAFAIAASCNFPIILLSMYWSKLTTRGAMMGGWLGLITAVVLMILGPTIWVQILGHEKAIFPYEYPALFSITVAFLGIWFFSATDNSAEGARERELFRAQFIRSQTGFGVEQGRAH

SEQ ID NO: 44468 - DNA, 1587 bp, Deinococcus radiodurans R1
  CDS (1)..(1587): transl_table=11
atgacctttctgcttgcggccctgatcgtgctcattaccctgggcgtcaccttctgggcgtcgtcgcgcaacacctctgccggagacttctatgtggcgggcggcaaaatcagcgccacccagaacggcatcgcgattgccggggactatatgtcggcggcgagttttctggggattaccggcctcatcgccctgaacggctacgacggcttcatgtactcggtgggctggtttatcgcctacctgacggtgctgttcatcgtggccgagccgctcaggaacctcggcaaatacaccctcgccgacatgctggtgtaccgcctcaaagaccagcgggtgcgcttctacgcggcgttttccaccatcaccgtgtccactttctacatgatcgcgcaggtggtcggcgccgggtcgctcatctcgctgctctcgggcgggctgctcaagcctacacttgctattccgctcgtcggcctgttgatgatcgtgtacgtggtggtcggcgggatgctggcgacgacgtgggtgcagatcatcaaggcgatgctgctgatgttcgccaccatcgtgatgagcgtgctcattctcgcccgcttcggcttctcgttcagcgacctgctcggggccgccaccgacaagaacggggccgcctttctggaaccgggcctgaagtacaaaaaccccctcgacctgatttcgctgtgcctcgcgctggtgctgggcaccgccgggctgccgcacatcctggtgcgctttttcaccgtgcccaccgcgcaagacgcccgcaagagcgtggtcgtggcgatgggcctgatcggcgccttttacatcatgaccgccctgatgggcaacgccgccaacgtgctggtcggcaaggacaccatcgtggccgccaacccggcgggcaacatggccgcgccactgctcgctcaggcgctcggcgggggagccgggacgctcggcggcgagttcggcctcgcctttgtcaccgctgtggccttcgccaccatcctcgcggtggtcgcgggcctgaccatcagcgccagcacgtcgtttacccacgacatctacaacggcgtgatgaaaggcggcaaagccaatgagcaggagcagttcaaggtcgcccgcatggcgacggtcgccgtgggtctgctctccatcgtgctggggctgctcgccaaggaccagaacgtggcctttctggtcgcgctcgccttcgccatcgctgccagcgccaacctgccggtgattctctacaccctgttctggcgcggcttcaacgccaacggcgcggtgtggggcatcgtcggcggcctcgccgtgaccctggtcctgattgcgctgagccccaacatcatgagcgtggacccgcccgaaaagaccaccggacgccacccggtgcagcgcacggcgattttcccgctggaaaaccccggcatcgtcagcattcccgccgggtttgccctcgctgccctgggcgccctgctcggcaaacgccgcccggaagacgagcggaacttcgaggaaatgcagtaccgcgcgtacaccggggccggcatggacggcacggtggcggcgcacgactga

SEQ ID NO: 44469 - protein, 528 aa, Deinococcus radiodurans R1
MTFLLAALIVLITLGVTFWASSRNTSAGDFYVAGGKISATQNGIAIAGDYMSAASFLGITGLIALNGYDGFMYSVGWFIAYLTVLFIVAEPLRNLGKYTLADMLVYRLKDQRVRFYAAFSTITVSTFYMIAQVVGAGSLISLLSGGLLKPTLAIPLVGLLMIVYVVVGGMLATTWVQIIKAMLLMFATIVMSVLILARFGFSFSDLLGAATDKNGAAFLEPGLKYKNPLDLISLCLALVLGTAGLPHILVRFFTVPTAQDARKSVVVAMGLIGAFYIMTALMGNAANVLVGKDTIVAANPAGNMAAPLLAQALGGGAGTLGGEFGLAFVTAVAFATILAVVAGLTISASTSFTHDIYNGVMKGGKANEQEQFKVARMATVAVGLLSIVLGLLAKDQNVAFLVALAFAIAASANLPVILYTLFWRGFNANGAVWGIVGGLAVTLVLIALSPNIMSVDPPEKTTGRHPVQRTAIFPLENPGIVSIPAGFALAALGALLGKRRPEDERNFEEMQYRAYTGAGMDGTVAAHD

SEQ ID NO: 44470 - DNA, 1734 bp, Xylella fastidiosa 9a5c
  CDS (1)..(1734): transl_table=11
atgaacataggcatgcgtctttttttggtgttgtttggggtgttgccagtgaggttggggtttgctgcagatgcgataagtgtggtcgataaacagccagtgaactgggtagtgatctcaatttttgttgtttttgtgctgattacgttatggatcactaagtgggcagcgaagaggacgcgatcgtctgcggacttttacacggctggggggacgatcaccggtttccaaaatggtttggcgatggcgggtgattacatgtctgctgcggcgtttcttggcattacctcggcggtgatgatcagtgggtatgatggaatgctctatgcgattggttctttagtgggttggccgattctggtttttctagtcgctgagcgactgcgtaatcttggcaaatatacttttgctgatgtggttgcttaccgtttcgcggcggtgccagttcggttgttcacttctgcgagtacgttggtggtggtgttgtgttccctagttgcacaaatggttggggccggtgcgcttattaagttgctatttggtttggattattgggtcgcagtgattttggttggtggactgatgatggtgtacgtgatgtttggtgggatggctgcaaccacctgggtacagattattaaggcggtgttgctgttgacttgtttgactttcatggcagtcatgatcatgtggaggttcggttttaattttgagggcctgtttgcgagtgcggtgggagttaagacgcaaatcgcgatggcggggggtaaatctggggaggaggctaaagcgttagggctatcgatcatggcgccgggtagttttatcaaggatccaatttcggcgatttcattaggtatcgcattggtattcggtaatgttgggttaccgcatatcctgatgcgtttctttgctgtgcccgatgccagagaggtgcgtcattcggtgttgtgggcgattacctggatcggttattgctacatcttgatgtttattgtcggtttcggtgcgattgtgttcgtgttaacaaatccgcagtatgccgatatcgccactggcacgatccgtggtgggcagggtgcagccaatatggctgcggtgcttgtcgccaaagtagtgggtggggatgtatttatggggtttgtttctgctgtggcatttgcgacgattttggcggtggcggctgggttggcgttgtctggtgcatcggcggtgtcacatgatgtgtatgcgatggtgattaagcagggtaagccatcttcggatactgagttgttggtctcgcgtgtgaccacggcagtattgggtgtggttgcggtgttgctggggatcgtgtttcagaagcagaatgttgcgttcatggtgtcattagcatttgcgattgcggcgtcggctaattttccggtgctgattttgtcgctgctttggaaaaattgtacgacctggggtgcggtgatcggtggttttctcggtttgatttcttcgttggtgttgacggtgttatcaccttcggtgtgggtcgatacgttgggtcattcagtggattcggtgcgatttccttatacgtcgccggcattgttttccgtggccatagggtttgtcggtatttggttgttttcggtgctggatcgtagtggtcgggcggcgaaggagcgcgttgcgtttaaggcgcagcaggtacgtgctgagactggattaggtgcttccaaaatgtcgcccaattggttcgcttag

SEQ ID NO: 44471 - protein, 577 aa, Xylella fastidiosa 9a5c
MNIGMRLFLVLFGVLPVRLGFAADAISVVDKQPVNWVVISIFVVFVLITLWITKWAAKRTRSSADFYTAGGTITGFQNGLAMAGDYMSAAAFLGITSAVMISGYDGMLYAIGSLVGWPILVFLVAERLRNLGKYTFADVVAYRFAAVPVRLFTSASTLVVVLCSLVAQMVGAGALIKLLFGLDYWVAVILVGGLMMVYVMFGGMAATTWVQIIKAVLLLTCLTFMAVMIMWRFGFNFEGLFASAVGVKTQIAMAGGKSGEEAKALGLSIMAPGSFIKDPISAISLGIALVFGNVGLPHILMRFFAVPDAREVRHSVLWAITWIGYCYILMFIVGFGAIVFVLTNPQYADIATGTIRGGQGAANMAAVLVAKVVGGDVFMGFVSAVAFATILAVAAGLALSGASAVSHDVYAMVIKQGKPSSDTELLVSRVTTAVLGVVAVLLGIVFQKQNVAFMVSLAFAIAASANFPVLILSLLWKNCTTWGAVIGGFLGLISSLVLTVLSPSVWVDTLGHSVDSVRFPYTSPALFSVAIGFVGIWLFSVLDRSGRAAKERVAFKAQQVRAETGLGASKMSPNWFA

SEQ ID NO: 44472 - DNA, 1656 bp, Corynebacterium glutamicum ATCC 13032
  CDS (1)..(1656): transl_table=11
atgaattccactattctccttgcacaagacgctgtttctgagggcgtcggtaatccgattcttaacatcagtgtcttcgtcgtcttcattattgtgacgatgaccgtggtgcttcgcgtgggcaagagcaccagcgaatccaccgacttctacaccggtggtgcttccttctccggaacccagaacggtctggctatcgcaggtgactacctgtctgcagcgtccttcctcggaatcgttggtgcaatttcactcaacggttacgacggattcctttactccatcggcttcttcgtcgcatggcttgttgcactgctgctcgtggcagagccacttcgtaacgtgggccgcttcaccatggctgacgtgctgtccttccgactgcgtcagaaaccagtccgcgtcgctgcggcctgcggtaccctcgcggttaccctcttttacttgatcgctcagatggctggtgcaggttcgcttgtgtccgttctgctggacatccacgagttcaagtggcaggcagttgttgtcggtatcgttggcattgtcatgatcgcctacgttcttcttggcggtatgaagggcaccacatacgttcagatgattaaggcagttctgctggtcggtggcgttgccattatgaccgttctgaccttcgtcaaggtgtctggtggcctgaccacccttttaaatgacgctgttgagaagcacgccgcttcagattacgctgccaccaaggggtacgatccaacccagatcctggagcctggtctgcagtacggtgcaactctgaccactcagctggacttcatttccttggctctcgctctgtgtcttggaaccgctggtctgccacacgttctgatgcgcttctacaccgttcctaccgccaaggaagcacgtaagtctgtgacctgggctatcgtcctcattggtgcgttctacctgatgaccctggtccttggttacggcgctgcggcactggtcggtccagaccgcgtcattgccgcaccaggtgctgctaatgctgctgctcctctgctggccttcgagcttggtggttccatcttcatggcgctgatttccgcagttgcgttcgctaccgttctcgccgtggtcgcaggtcttgcaattaccgcatccgctgctgttggtcacgacatctacaacgctgttatccgcaacggtcagtccaccgaagcggagcaggtccgagtatcccgcatcaccgttgtcgtcattggcctgatttccattgtcctgggaattcttgcaatgacccagaacgttgcgttcctcgtggccctggccttcgcagttgcagcatccgctaacctgccaaccatcctgtactccctgtactggaagaagttcaacaccaccggcgctgtggccgctatctacaccggtctcatctccgcgctgctgctgatcttcctgtccccagcagtctccggtaatgacagcgcaatggttccaggtgcagactgggcaatcttcccactgaagaacccaggcctcgtctccatcccactggcattcatcgctggttggatcggcactttggttggcaagccagacaacatggatgatcttgctgccgaaatggaagttcgttccctcaccggtgtcggtgttgaaaaggctgttgatcactaa

SEQ ID NO: 44473 - protein, 551 aa, Corynebacterium glutamicum ATCC 13032
MNSTILLAQDAVSEGVGNPILNISVFVVFIIVTMTVVLRVGKSTSESTDFYTGGASFSGTQNGLAIAGDYLSAASFLGIVGAISLNGYDGFLYSIGFFVAWLVALLLVAEPLRNVGRFTMADVLSFRLRQKPVRVAAACGTLAVTLFYLIAQMAGAGSLVSVLLDIHEFKWQAVVVGIVGIVMIAYVLLGGMKGTTYVQMIKAVLLVGGVAIMTVLTFVKVSGGLTTLLNDAVEKHAASDYAATKGYDPTQILEPGLQYGATLTTQLDFISLALALCLGTAGLPHVLMRFYTVPTAKEARKSVTWAIVLIGAFYLMTLVLGYGAAALVGPDRVIAAPGAANAAAPLLAFELGGSIFMALISAVAFATVLAVVAGLAITASAAVGHDIYNAVIRNGQSTEAEQVRVSRITVVVIGLISIVLGILAMTQNVAFLVALAFAVAASANLPTILYSLYWKKFNTTGAVAAIYTGLISALLLIFLSPAVSGNDSAMVPGADWAIFPLKNPGLVSIPLAFIAGWIGTLVGKPDNMDDLAAEMEVRSLTGVGVEKAVDH

SEQ ID NO: 44474 - DNA, 1686 bp, Xanthomonas axonopodis pv. citri str. 306
  CDS (1)..(1686): transl_table=11
atgcccgccggcatcgcactggcagccggcggcgacctgggtcaggtcgacaagcagcccaccaactgggtggcgatcggcatgttcggcttcttcgtgctggccaccctgtggatcaccaaatgggcagcggccaagaccaagtcggccgctgacttctataccgctggcggtggcatcaccggtttccagaacggcctggcgatcgcaggcgacttcatgtcggcggcctcgttcctgggcatcaccgctgcggtgatggccaacggctacgacggcctgatctatgcgatcggttttctggtgggctggccgatcctgaccttcctgatggccgaacgcctgcgcaacctcggcaagtacacgtttgccgacgtggccggttaccgcttcgcgccgacggcgatccgcagctttgcggcgtcgggcacgttggtggtggtgctgttctatctgatcgcacagatggtcggtgccggtgcgctgatcaagttgctgttcggcctggactactgggtggcggtgaccctggtcggcgtgctgatgatgatctacgtgttgttcggcggcatgaccgcaacgacctgggtgcagatcatcaaggccgtgctgctgctgaccggcgtgaccttcatggccgtggcgatcatgtggcatttcaacttcagcttcgaggcgctgtttgccgaaggcgtgcgggtcaaaaccgcggtcgcggccagcggtggcgcttcgcccgaggatgcggcaaaagcaggcctgtcgatcatgggaccgggcggtttcgtcaaggacccgatttcggcgatttccttcggcatggcgctgatgttcggtaccgccggcctgccgcacatcctgatgcgcttcttcaccgttcccgatgccaagcaggcgcgtaagtcggtgctgtgggccaccacctggatcggctacttctacatcctgatcttcatcatcggcttcggtgcgatcgcactggtgctgaccaacccgcagttcgccgatgttgccaccggcaccatccatggcggcaagggtgcggccaacatggcggcggtgctggtcggtaacgccgtgggcggcaacgtgttcatgggcttcatctcggcagtggccttcgccaccatcctggcggtggtggcgggcctgaccctgtccggcgcctcggcggtgtcgcatgacctgtacgccacggtgatcaagaagggcaacccggcgccgggctcggagctcaaggtctcgcgtgccaccaccctggtgctgggcgtgatcgcggtgctgctgggcatcgtgttcgagaagcagaatgtggccttcatggtgtcgctggcgttcgccatcgcggcctcggccaacttcccggtgctgatcctgtcgttgttgtggaagaactgcaccacccgtggcgcagtgatcggcggtttcctcggcctgatctcttcgctggtgctgacgatcctgtcgccatcggtgtgggtggacacgctgggcaacgcggccggctcggcgccgttcccgtacacctcgccggcgctgttctcgatgacgattggctttgtgggcatctggttgttctccgtgctggatcgcagcccgcaggcagccaacgaacgcgccgccttcaaggcgcagcagatccgtgccgaaaccggcctgggtgccagtggtgcgtccggtcactga

SEQ ID NO: 44475 - protein, 561 aa, Xanthomonas axonopodis pv. citri str. 306
MPAGIALAAGGDLGQVDKQPTNWVAIGMFGFFVLATLWITKWAAAKTKSAADFYTAGGGITGFQNGLAIAGDFMSAASFLGITAAVMANGYDGLIYAIGFLVGWPILTFLMAERLRNLGKYTFADVAGYRFAPTAIRSFAASGTLVVVLFYLIAQMVGAGALIKLLFGLDYWVAVTLVGVLMMIYVLFGGMTATTWVQIIKAVLLLTGVTFMAVAIMWHFNFSFEALFAEGVRVKTAVAASGGASPEDAAKAGLSIMGPGGFVKDPISAISFGMALMFGTAGLPHILMRFFTVPDAKQARKSVLWATTWIGYFYILIFIIGFGAIALVLTNPQFADVATGTIHGGKGAANMAAVLVGNAVGGNVFMGFISAVAFATILAVVAGLTLSGASAVSHDLYATVIKKGNPAPGSELKVSRATTLVLGVIAVLLGIVFEKQNVAFMVSLAFAIAASANFPVLILSLLWKNCTTRGAVIGGFLGLISSLVLTILSPSVWVDTLGNAAGSAPFPYTSPALFSMTIGFVGIWLFSVLDRSPQAANERAAFKAQQIRAETGLGASGASGH

SEQ ID NO: 44476 - DNA, 1665 bp, Pseudomonas putida KT2440
  CDS (1)..(1665): transl_table=11
atgattcgccaagtcaaagccctggccgtattggcctgcggagccttcgcacccgccgtgtgggccgccgatgccctgaccggcgaggtgcagaaacaaccgctgaacgtttccgccatcgccatgttcgtggccttcgtcgccttcaccctcggcatcacctattgggcctccaaacgcaacaagtcggcatcggactactacgctgccgggggcaagatcaccggcttccagaacggcctggcgattgctggcgactacatgtcggccgcctcgttcctgggtatttccgcgctggtgttcacctcgggttacgacggcctgatctactcgatcggcttcctggttggctggccgatcattcttttcctgattgccgaacgcttgcgcaacctgggcaagtacaccttcgccgacgtggcctcgtaccgcctcgggcaaaaggaaatccgcaccctgtcggcctccggttcgctggtggtggtggcgttctacctgatcgcgcagatggtcggcgccggcaagctgatcgagctgctgttcggcctggactaccatgtggcggtgatcctggtgggtatcctgatgtgcctgtacgtgctgttcggcggcatgctggccaccacctgggtacagatcatcaaggctgtgctgctgctgtccggtgccagtttcatggcgctgatggtcatgaagcacgtaggctttgacttcaacacgctgttctccgaagcgatcaaggtacacgccaagggcgaggcgatcatgagccccggcggcctggtcaaggacccgatctcggcattctccctgggcctggcactgatgttcggtactgccggcctgccgcacatcctgatgcgcttcttcaccgtcagtgacgccaaggaagcgcgcaagagcgtgctgtacgccaccggcttcatcggctacttctacatcctcaccttcatcattggctttggcgcgatcctgctggtcagcaccaacccggaattcaaggacgccgcaggcgctctgctgggcggcaacaacatggccgcggtgcacctggccaatgcggtggggggcagtgtgttcctcggcttcatctcggcggtggcctttgccaccatcctggcggtggtggctggcctgaccctggccggtgcctcggcagtgtcccacgacctgtacgccagcgtctggcgcaagggcaaagccaacgacaaggacgagatccgcgtatcgaagatcaccactgtcgccctgggtgtactggcgatcggcctggggattctgttcgagaagcagaacatcgccttcatggtcggcctggcgttctccattgcggccagctgcaacttcccggtactgctgctttcgatgtactggaagaagctgaccacccgcggcgccatgatcggcggctggctgggcctggtgagtgcggtgacgctgatgatccttggcccgaccatctgggtacagattctcggccacgagaaacccatctacccgtacgagtacccggcgctgttctcgatggccattgccttcgtcagcatctggttcttctcggtcaccgacaagtccaaggcggctgaggatgagcgcgcgctgttcttcccgcagttcgtgcgttcgcagactggcctgggtgccagcggggcggtctcgcactaa

SEQ ID NO: 44477 - protein, 554 aa, Pseudomonas putida KT2440
MIRQVKALAVLACGAFAPAVWAADALTGEVQKQPLNVSAIAMFVAFVAFTLGITYWASKRNKSASDYYAAGGKITGFQNGLAIAGDYMSAASFLGISALVFTSGYDGLIYSIGFLVGWPIILFLIAERLRNLGKYTFADVASYRLGQKEIRTLSASGSLVVVAFYLIAQMVGAGKLIELLFGLDYHVAVILVGILMCLYVLFGGMLATTWVQIIKAVLLLSGASFMALMVMKHVGFDFNTLFSEAIKVHAKGEAIMSPGGLVKDPISAFSLGLALMFGTAGLPHILMRFFTVSDAKEARKSVLYATGFIGYFYILTFIIGFGAILLVSTNPEFKDAAGALLGGNNMAAVHLANAVGGSVFLGFISAVAFATILAVVAGLTLAGASAVSHDLYASVWRKGKANDKDEIRVSKITTVALGVLAIGLGILFEKQNIAFMVGLAFSIAASCNFPVLLLSMYWKKLTTRGAMIGGWLGLVSAVTLMILGPTIWVQILGHEKPIYPYEYPALFSMAIAFVSIWFFSVTDKSKAAEDERALFFPQFVRSQTGLGASGAVSH

SEQ ID NO: 44478 - DNA, 1659 bp, Pseudomonas putida KT2440
  CDS (1)..(1659): transl_table=11
atgaaaaaactcgtacctctggccctgctgctgcactcaggcctgctgctggcttcgccttcgctcgacgctggtcagcgtcagccgctcaacctgcatgccatcggcatgttcatggtgttcgtgctgttcaccttgtgcatcacctggtgggcggcgcgtcgcacacgctcgacgacagacttctacagcgccggtggcggcatccagggctggcagaacggcctggcgctggccggggactacatgtccgcctcgacgctgttggggatcaccgcactcatctacacctccggcatggatggctacatctacctcatcgctttcttcgcgggctggccggtgttgctgctgttgatgaccgagcggctgcgcaacctgggccgcttcacctttgccgatatcacctcgtatcgcctcgaccaaggcaaggtgcgcaccatggccgccatcggctcgctgaccgtggtgtgtttctacctggtggcgcagatggtcggggccgggcagttgatcaggttgctgttcggcctggactaccacatcgcggtggtcatcgtcggtgcgctgatgatgctgtatgtgaccttcggcggcatggtggcgactacctgggtgcagatcatcaaggcgttcctgctgctggtcggcggctcgctggtgctgttcctggcgatgcgcgagttcgacttcagctatgacgcgctggtgagcaaggccatggacacccatgccctgggcgaacgcctgctggcgcccggcagcctgctggccgacccgttgaccgcgctgtcgctgagcctggggctggtgttcggcaccgccgggctgccgcatatcctgatgcgcttcttcaccgtcagcgatgcccgggaggcgcgcaagtcggtgctctatgccaccgggttcatcggctacttcttcaatgtcattttcctgctgggcctggcgtcgatcgtgatcgtcagtcagcagccgaagttcttcgagggcggtgaggtgggtggcaagctgctgggcgggggcaatatggtggtcatgcacctggcccaggcagtcggcggcaacctgctgctgggtttcttgtctgcagtgaccttcgccaccatcctggctgtggtttcaggcctggctctggccggggcgtccgccatcgcccatgacctgtatgcgcgggtgatcatgaagggcgcggccagcgaggcgcaggagctgcgggtgaccaagttggctaccctgagccttgggttggtggccatagccttgggcatcctgttcgaaaatatcaacgtggctttcatggttgcgctggcctttggtattgccgcttcggccaacttcccggtgctgttcctgtcgatgttctggtcggggctgaccacccgcggcgcattggccgctggctacgtcgggttgctcagtgccatgggcttcgtggtgttttccaagctggtgtgggtggatgtgttgcactttgccgaaccgctgttcccctatacccagcctgcgctgttctccatgccgctggcgtttttggtggcgtatgcggtttcccggatggaccgcactgcgcgggccaaggccgaaagggcggccttcgccgaccagttcgtccgtggccagaccggccttggtgccagcggtgccgtcgatcattga

SEQ ID NO: 44479 - protein, 552 aa, Pseudomonas putida KT2440
MKKLVPLALLLHSGLLLASPSLDAGQRQPLNLHAIGMFMVFVLFTLCITWWAARRTRSTTDFYSAGGGIQGWQNGLALAGDYMSASTLLGITALIYTSGMDGYIYLIAFFAGWPVLLLLMTERLRNLGRFTFADITSYRLDQGKVRTMAAIGSLTVVCFYLVAQMVGAGQLIRLLFGLDYHIAVVIVGALMMLYVTFGGMVATTWVQIIKAFLLLVGGSLVLFLAMREFDFSYDALVSKAMDTHALGERLLAPGSLLADPLTALSLSLGLVFGTAGLPHILMRFFTVSDAREARKSVLYATGFIGYFFNVIFLLGLASIVIVSQQPKFFEGGEVGGKLLGGGNMVVMHLAQAVGGNLLLGFLSAVTFATILAVVSGLALAGASAIAHDLYARVIMKGAASEAQELRVTKLATLSLGLVAIALGILFENINVAFMVALAFGIAASANFPVLFLSMFWSGLTTRGALAAGYVGLLSAMGFVVFSKLVWVDVLHFAEPLFPYTQPALFSMPLAFLVAYAVSRMDRTARAKAERAAFADQFVRGQTGLGASGAVDH

SEQ ID NO: 44480 - DNA, 1563 bp, Pseudomonas putida KT2440
  CDS (1)..(1563): transl_table=11
atgaactggaccgccatttcgatgttcatggtgtttgtctgcttcaccctgctggtcacccgctgggctgccctgcgcacccgctcggccagtgacttctacaccgccggcggcggcttgaccggtatgcagaacggcctggcaatcgctggcgacatgatcagtgccgcttcgttcctgggcatttccgcgatgatgttcatgaacggctacgacggcctgttgtatgccctcggtgtcctggcgggctggccgatcatcctgttcctgattgccgagcgcctgcgtaacctgggtaagtacacctttgccgacgtggtcagctaccggttggcgcaaaccccagtgcgcttgacctcggctttcggcaccctggtggtggcgctgatgtacctggtggcgcaaatggtcggcgctggcaagctgatcgagctgctgttcggcatcagctacctgtacgccgtgatgctggtcggggtgctgatggtttcctatgtcaccttcggtggcatgctcgccaccacctgggtgcagatcatcaaggcggtaatgctgctatcaggcaccagtttcatggccttcatggtgctcaagcacttcggcttcagcaccgaggccatgtttgccagtgcggtggccgtgcatgccaagggccaggcgatcatggccccaggcggcttgttgtccaacccggtggacgccatttccctcggtttgggcatgatgttcggcaccgctggcctgccgcatatcctgatgcgctttttcactgtcagtgatgccaaggaagcacgcaagagcgtgttctacgccaccggtttcattggttacttctacctgctgctgatcgttgtcggttttggcgccatcgtcatggtcggcactgagccgtcctaccgcgacgccactggcgccatcatcggtggcggcaacatggtcgccgtgcacctggcccaggccgtgggtggcaacctgttcctcggcttcatctcagccgtggccttcgccaccattctggctgtggtcgctggcctggcgctgtccggcgcatcggcggtgtcccacgacctgtatgcctgcgtgatgcgcaaaggcaaggcgaccgagcaagaggaaatgcgcgtgtcacgcattgccacgttgctcatcggcctgctggcggtgatcctgggcctgatgttcgagtcgcagaacattgccttcctttccggcctggtgctggcggtggccgcttcggtcaacttcccggtgctgctcctttccatgttctggaaaggcctgaccacccgtggcgcggtgtgcggcagcatggccgggctggtctcggcggtgctgttggtagtgttgggcccggcggtgtgggtcaacgtgctgcacaacgaaacggcgctgttcccctacagcaaccctgcgctgttctccatgagcctggccttcctcagtgcctgggtgttctcggttaccgatacctccgaacgtgccgttgaagaacgtggtcgctacctgggccagttcatccgctccatgaccggtatcggcgcggctggcgccagcaaacactga

SEQ ID NO: 44481 - protein, 520 aa, Pseudomonas putida KT2440
MNWTAISMFMVFVCFTLLVTRWAALRTRSASDFYTAGGGLTGMQNGLAIAGDMISAASFLGISAMMFMNGYDGLLYALGVLAGWPIILFLIAERLRNLGKYTFADVVSYRLAQTPVRLTSAFGTLVVALMYLVAQMVGAGKLIELLFGISYLYAVMLVGVLMVSYVTFGGMLATTWVQIIKAVMLLSGTSFMAFMVLKHFGFSTEAMFASAVAVHAKGQAIMAPGGLLSNPVDAISLGLGMMFGTAGLPHILMRFFTVSDAKEARKSVFYATGFIGYFYLLLIVVGFGAIVMVGTEPSYRDATGAIIGGGNMVAVHLAQAVGGNLFLGFISAVAFATILAVVAGLALSGASAVSHDLYACVMRKGKATEQEEMRVSRIATLLIGLLAVILGLMFESQNIAFLSGLVLAVAASVNFPVLLLSMFWKGLTTRGAVCGSMAGLVSAVLLVVLGPAVWVNVLHNETALFPYSNPALFSMSLAFLSAWVFSVTDTSERAVEERGRYLGQFIRSMTGIGAAGASKH

SEQ ID NO: 44482 - DNA, 1692 bp, Bradyrhizobium japonicum USDA 110
  CDS (1)..(1692): transl_table=11
gtgaagaaattctcatggctcctggcgatcctgctcgcaggcctgcccaccatcgcgctcgccgcaggcagcatcgacggcggcgttaagcaggcgaccaactggtcggcgatcggtatgttcgtcgggttcgttggcctgacgctcgtcatcacctattgggccgccaagaggaccgcatcggccgcggatttctactcggccggcggcggaattacgggcttccagaacggacttgcgatcgcaggcgactacatgtcggcggcatcctttctcggcatatcgggcctcgtctatacttcgggctacgacggcttgatctactccgtcggctggctggtgggatggccgatcgtcacctttctgatcgccgaacaattgcgcaacctcggaaagttcacctttgccgacgtgacctcgtttcggctcgggcagaccgagatccgtatcctggcggcgtgcggctcgctggtgacggttgcgttctatctcatcgcgcagatggtcggtgccggtaagctgatccagctgttgttcggtctcgactactggatcgcggtcgtcctggttggcggcctgatgatgatctacgtgacgttcggcgggatgaaggcgacgacctgggtgcagatcatcaaggcggtgctgttgctctcaggcgcaacgttcatggccggagccgtcctctacaagtacgggttcagcccggaagcgctgttcaccaaggcaacagaggtgcatcccaagaaactcgcgatcatggagcccggcagcctgatttccaatccgctctcggccatctcgctcggcctggcgctgatgttcggaacggcgggcctgcctcacatcctgatgcgcttcttcaccgtgaaggacgctcaggcggcccgcaagtccgtgttctacgccacgggtttcatcggctatttctacatcctgaccttcatcatcggctttggcgcgatcacgctggtttcgaccgacgcgatgtttctcgatgggagcattctcgagaagaccaagagcggaatcgcggcgatcaagggcggctccaacatggcggcgattcatctcgcgaacgccgtcggcggcaatctgttccttggcttcatttcggccgttgcctttgccacgatcctggccgtcgtgtcaggcttggctctggccggggcatcatccatcagccacgatctctacggcatggtgatcaagggcggcaacgcaaacgagcaggacgagatccgggtctcgaagattgcgacactggtgctcggcgtgcttgcgatcttcctgggcatcgtgttcgagaaccagaacgtcgccttcatggtgggccttgctttcgccatcgcggcatcctgcaatttccccgtgctggtgatgtcgatcttctggaaaggcctgacgacgcggggagccgtgttcggcggcttccttggcctgttcagcgcggttgtgggcgtggtcctctcgccggcagtctgggaggcgacgcttggctttgccaaggggtcggctcccatcaagctggacaatccggcgctgttctcgatggcgctcgcctttgcggggatctggctggtctcgatcctggaccgcagcaagcgtgccgcggccgatcgcgatggctttgacgcgcaatatgtccgatcgcagaccggtatcggtgctgcttcggccacggctcactag

SEQ ID NO: 44483 - protein, 563 aa, Bradyrhizobium japonicum USDA 110
MKKFSWLLAILLAGLPTIALAAGSIDGGVKQATNWSAIGMFVGFVGLTLVITYWAAKRTASAADFYSAGGGITGFQNGLAIAGDYMSAASFLGISGLVYTSGYDGLIYSVGWLVGWPIVTFLIAEQLRNLGKFTFADVTSFRLGQTEIRILAACGSLVTVAFYLIAQMVGAGKLIQLLFGLDYWIAVVLVGGLMMIYVTFGGMKATTWVQIIKAVLLLSGATFMAGAVLYKYGFSPEALFTKATEVHPKKLAIMEPGSLISNPLSAISLGLALMFGTAGLPHILMRFFTVKDAQAARKSVFYATGFIGYFYILTFIIGFGAITLVSTDAMFLDGSILEKTKSGIAAIKGGSNMAAIHLANAVGGNLFLGFISAVAFATILAVVSGLALAGASSISHDLYGMVIKGGNANEQDEIRVSKIATLVLGVLAIFLGIVFENQNVAFMVGLAFAIAASCNFPVLVMSIFWKGLTTRGAVFGGFLGLFSAVVGVVLSPAVWEATLGFAKGSAPIKLDNPALFSMALAFAGIWLVSILDRSKRAAADRDGFDAQYVRSQTGIGAASATAH

SEQ ID NO: 44484 - DNA, 1725 bp, Xylella fastidiosa Temecula1
  CDS (1)..(1725): transl_table=11
atgaacataggcaggcatcttttgttggtgttgtttgggtggttgccggtgagattggggtttgctgcagatgcgataagtgttgtcgataagcagccggtaaattgggtggcgatcaccatgttcgctgtttttgtgctgattacgttatggatcactcagtgggccgcgaagaagacgcgatcatctgcggacttttatacggctggggggacagtcaccggtttccaaaatggtttagcgattgccggtgactacgtgtccgctgcttcgtttcttggtattacttcggcagtgatggccaatggctatgatggaatgctctatgcaattggctttttagttggttggccgattctgacttttttgattgctgagcggctgcgcaatcttggcaaatatacttttgctgatgtggtggcttaccgttttgcggcgacgtcagttcggttgtttgcttccgttagtacgttggtggtggtgttgtgttatctgattgcacagatggttggggccggtgcgctgattaggttgttgtttggtttagattattgggttgcaatggtgctggttggcggactgatgatggtgtacgtgttgtttggtgggatggctgcaaccacctgggtacagattattaaggcggtgctgttgctgattggtgcgactttcatggcagtcatgatcatgcgcaggttcggttttaattttgaggggttgtttgcgagtgcggtggaggtcaagactcaaattgcgatggcgggcggtaaatctggggaggaggctaaagcgttagggctatcgatcatggcgccgggtagttttatcaaggatccaatttcggcgatttcattaggcatcgcattggtattcggtactgcggggttaccacatattttaatgcgcttcttcaccgtgcctgacgccagacaggcgcgtcattcggtgttgtgggcgattacctggatcggttattgctacatcttgatgtttatcattggattcggtgcgattgtgcttgtgttagcgaatccgcagtatgccgatatcgcttctggcaccatccgcggtggtcagggtgcagccaatatggctgcggtgcttgtcgccaaagtagtcgggggtaatgtgttcatggggtttgtctctgctgtggcatttgcgacgattctggcggtggtagcagggttggcgttgtctggtgcatcggcggtgtcacatgatgtgtatgcgatggtgattaagcagggtaagccatcttcggatactgagttgttggtctcgcgtgtgaccacggcagtattaggtgtggttgcggtgttgctggggatcgtgtttcagaagcagaatgttgcgttcatggtgtcattagcatttgcgattgcagcgtcggctaatttccctgtactggttctgtcgctgttttggaagaattgtacgacgaggggtgcggtaatcggtggttttctcggtttgatttcttcgttggtgttgacggtgttatcaccttcggtgtgggtcgatacgttgggtcattcggtggattcggtgcgattcccttacacgtcgccggcattgttttccatgaccatagggtttgtcggtatttggttgttttcggtgctggatcgtagtggccgggcggcgaaggagcgcgttgcgtttaaggcgcagcaggtacgtgctgaaactggattaggtgcttccaaaatgtcacccaattga

SEQ ID NO: 44485 - protein, 574 aa, Xylella fastidiosa Temecula1
MNIGRHLLLVLFGWLPVRLGFAADAISVVDKQPVNWVAITMFAVFVLITLWITQWAAKKTRSSADFYTAGGTVTGFQNGLAIAGDYVSAASFLGITSAVMANGYDGMLYAIGFLVGWPILTFLIAERLRNLGKYTFADVVAYRFAATSVRLFASVSTLVVVLCYLIAQMVGAGALIRLLFGLDYWVAMVLVGGLMMVYVLFGGMAATTWVQIIKAVLLLIGATFMAVMIMRRFGFNFEGLFASAVEVKTQIAMAGGKSGEEAKALGLSIMAPGSFIKDPISAISLGIALVFGTAGLPHILMRFFTVPDARQARHSVLWAITWIGYCYILMFIIGFGAIVLVLANPQYADIASGTIRGGQGAANMAAVLVAKVVGGNVFMGFVSAVAFATILAVVAGLALSGASAVSHDVYAMVIKQGKPSSDTELLVSRVTTAVLGVVAVLLGIVFQKQNVAFMVSLAFAIAASANFPVLVLSLFWKNCTTRGAVIGGFLGLISSLVLTVLSPSVWVDTLGHSVDSVRFPYTSPALFSMTIGFVGIWLFSVLDRSGRAAKERVAFKAQQVRAETGLGASKMSPN

SEQ ID NO: 44486 - DNA, 1659 bp, Pseudomonas syringae pv. tomato str. DC3000
  CDS (1)..(1659): transl_table=11
atgatccggcgcctatcagcagcacttggcctggccgcattcgcgccgaccctctgggcggcagatgcattgactggcgcagtacagaaacaacccctgaacgtcgctgcgatcgtcatgttcgtgatcttcgtcgcgttcacgctgtacatcacctactgggcctcaaagaagaacaagaccgcatcggactattactcggcgggtggcaagatcaccggctttcagaatggtctggcgattgctggtgactacatgtcggcagcctcttttctgggtatttccgcactggtctacacctccggctacgacggcctgatctactcgatcggcttcctggtgggctggccgatcattctgttcctgatcgccgagcgcctgcgtaacctgggtaaatacacctttgccgacgtagcctcttatcgcctcaagcaaaaagagattcgcacactgtctgcctgtggttcgctggtggtggtggcgttttatctgattgcgcaaatggtcggtgcgggcaagctgatccagttgctatttggtctggactacaccgttgcagtggtgctggtcggtattctgatgtgcctttacgtgctgttcggcggcatgctggcgaccacctgggtacagatcatcaaagcggtgatgctgctttccggtgcctcgttcatggcgctgatggtcatgaaacacgtcaacttcgacttcaacatgctgttctccgaggcgatcaaggttcaccctaaaggtgaagcgatcatgagcccgggcgggctggtaaaagacccgatctcggcgttctcgctgggtctggcgttgatgttcggtacggcgggtctgccgcacattctgatgcgcttcttcaccgtgagtgatgccaaggaagcccgtaagtcggtgctctacgccactggctttatcggctacttctacatcctgaccttcatcatcggttttggcgcgatcctgctggtcagcaccaacccggcattcaaggatgcagcgggtgccttgctgggcggcaacaacatggcggcgattcacctggccgatgcggtcgggggcagtctgttcctgggcttcatttctgccgtcgcctttgcgaccatcctggcggtggttgccggtctgacgctggccggtgcgtcggcggtctcccatgacctgtacgccagtgtgatcaaggcgggcaaagccaacgagaaagacgaaatccgcatctcgaaaatgaccaccattgcactggctgtcgtggcgatcctgttgggtattgctttcgaaagtcagaacatcgcgttcatggtgggcctggcgttctccgtcgcggcaagttgcaacttcccgatactgctgctttccatgtactggaaaaacctgaccacccgtggcgccatgattggtggctggatgggcctgatcagcgctgtggtgctgatggtgctcggcccgaccatctgggtgcagatcctgcacaaccctaaagccatcttcccttacgaatacccggcgctgttctctatcgccatcgcattcgtgggtatctggttcttctccatcaccgacaagtcgaaagcggcagagggcgaacgcgccttgttctacccgcagttcgtccggtcgcagacggggctgggtgccagcggtgcggtttctcactaa

SEQ ID NO: 44487 - protein, 552 aa, Pseudomonas syringae pv. tomato str. DC3000
MIRRLSAALGLAAFAPTLWAADALTGAVQKQPLNVAAIVMFVIFVAFTLYITYWASKKNKTASDYYSAGGKITGFQNGLAIAGDYMSAASFLGISALVYTSGYDGLIYSIGFLVGWPIILFLIAERLRNLGKYTFADVASYRLKQKEIRTLSACGSLVVVAFYLIAQMVGAGKLIQLLFGLDYTVAVVLVGILMCLYVLFGGMLATTWVQIIKAVMLLSGASFMALMVMKHVNFDFNMLFSEAIKVHPKGEAIMSPGGLVKDPISAFSLGLALMFGTAGLPHILMRFFTVSDAKEARKSVLYATGFIGYFYILTFIIGFGAILLVSTNPAFKDAAGALLGGNNMAAIHLADAVGGSLFLGFISAVAFATILAVVAGLTLAGASAVSHDLYASVIKAGKANEKDEIRISKMTTIALAVVAILLGIAFESQNIAFMVGLAFSVAASCNFPILLLSMYWKNLTTRGAMIGGWMGLISAVVLMVLGPTIWVQILHNPKAIFPYEYPALFSIAIAFVGIWFFSITDKSKAAEGERALFYPQFVRSQTGLGASGAVSH

SEQ ID NO: 44488 - DNA, 1617 bp, Streptomyces avermitilis MA-4680
  CDS (1)..(1617): transl_table=11
atgaacgacttcagctccgggacgcaggcgaccgtcctgatcctgttcaccgccctggtcaccctcacgctgctgatgtgcgtgatggcgggaccggaccgcgacgacctgacgaacttctacaccggctacctctcgctcaccccgctcaagaacggcctggcgatcgcgggcgactacatttccgcggccacggtgctgagcaccaccggcatcatcgcgctcgccggatacgacggcgacgtgctggcggtcagcaccgccatgtcgctggtgctgctgatgttcctgctggccgaacccctgcgcaacgccggcaggttcaccatgggagacgtcctggcccgcaacatgcccgggcgggccgtccgtatcgcctcctgcgtggtgacgctcgcggcgaccctccccttcctggtcgtccagctctccggggccgggtcgctgctcaccttcatcctgggcatcccgcacctgtcgggcgccagaacggtgtgcatcgtcctcgtcggcagcttgatgatcatttacgcggcgatcggcggcatgcgcggcaccgcactcatccagatgatcaagatcgtgcttctgctgggcaccagcgtcgccctcgccgccctggtcctgaaccgcttcgactggaaccccggcgacctgctccgggccgcccagcgcggcagcggcgcgggcccggccttcctccagcagggcctgcaactgggcacctcggccggcagccggctggacttcgtcagtctccagatcaccgtggtactcggcgtggcctgcctgccgcacatcacgatgcgcctgttctccgcgcgggacgtgcccgccgtgcgccgctccatgtcgtgggcggtcggcacggtcaccacgttctgcctgctcgtgatcgtcatgggcacgggcgcggcggcgctcgtgggatcgcggtacatcaccgcggccgacccgcacggcaggacgtccgtgctcatgctgtcccaggtgctcggcggcgatgccgactccgcgggggcgacgatcctctacgcggccatggcgggcacggtgttcatcaccctgctgtcctcggtcgcggggatgaccctggccgcggcctcgtcactcgcccacgacctgttcgcccatgcggcgcggcggggacaggcggcgccgcgcacggagatgacggtcgcggcgtggacgagcgtggctgtgggaaccgtcgccatcacgctctccaccctggtccagcactgggacgtcggcgtactgaccacgctggcgatctgcatcggggcgtcggcggtggcccccgcgctgacgtactccctgttctggcgaggcttcacgcgcaccggcctgctcgggagcctctacggcggcgcggcctgcgcgctggtgctgatggtcttctcccaggccgtttcgggtacgccgtccgccgtgttcccgaaggccgacttcgctctgttcccgatgcagtcgaccggcctggtctccataccgttcggctacctggcgggctggctgggcagccgtctcgaccgccggcgccgcgccgccgagagccgcgagaaccagcggctgtacgaggagagcgaggcacggctgctcgccgccgccgaatga

SEQ ID NO: 44489 - protein, 538 aa, Streptomyces avermitilis MA-4680
MNDFSSGTQATVLILFTALVTLTLLMCVMAGPDRDDLTNFYTGYLSLTPLKNGLAIAGDYISAATVLSTTGIIALAGYDGDVLAVSTAMSLVLLMFLLAEPLRNAGRFTMGDVLARNMPGRAVRIASCVVTLAATLPFLVVQLSGAGSLLTFILGIPHLSGARTVCIVLVGSLMIIYAAIGGMRGTALIQMIKIVLLLGTSVALAALVLNRFDWNPGDLLRAAQRGSGAGPAFLQQGLQLGTSAGSRLDFVSLQITVVLGVACLPHITMRLFSARDVPAVRRSMSWAVGTVTTFCLLVIVMGTGAAALVGSRYITAADPHGRTSVLMLSQVLGGDADSAGATILYAAMAGTVFITLLSSVAGMTLAAASSLAHDLFAHAARRGQAAPRTEMTVAAWTSVAVGTVAITLSTLVQHWDVGVLTTLAICIGASAVAPALTYSLFWRGFTRTGLLGSLYGGAACALVLMVFSQAVSGTPSAVFPKADFALFPMQSTGLVSIPFGYLAGWLGSRLDRRRRAAESRENQRLYEESEARLLAAAE

SEQ ID NO: 44490 - DNA, 1593 bp, Streptomyces avermitilis MA-4680
  CDS (1)..(1593): transl_table=11
gtgaccggccatcatcagacgctggcgctgctgctgttcagcggtttcgttgcggtgacactggcgatcacgacgtgggtgagccgtcaccggcatggttcggcggaggagttctacgcgggcgggcgcctgttctcacccatggagaatggttttgccatcgcgggcgactacatgtcggccgcgtccttcctgggggtcacagggctcatcgcgctctacgggtacgacgggctgctgtatgtggtgggcttcctggtcgcctggttggtggtgcttttcttggtcgccgaactggtgcgcaactgcgggcgcttcaccctcgcggacgtggtcgcggcgcggatgagcgagcgtccggtgcgcatcgcggcgggaacttcgtcggtgaccgtgtccgttctgtatctggtggcgcagatggtgggggcgggcagcctggtcgcgctgctgctcgggggttcaagcggggcagcgcgcgcctggacggtgatcggcgtcggcgcgctcatggtgatctatgtgtcgatgggagggatgcgggccaccacctggatccagatcgtcaaggcggtgctgctgctcagcggcacgatcgcgctgaccgtgctcgtgctggtgcggttccaaggggacttcgaccaattgctgcgtacggcgatggagcgcagcgggcacggtgaggccttcctcgcgccagggctgaagtacggcggggactggaccgcgcggctggacttcatcagtttgggcctggccctggtgctcggtacggcggggctgccgcacatcctgtcccgcttctacaccgtgccgaccgcacgcgccgcgcgccgctcggtcgtctggtcggtcgggctcatcggcggcttctatctgatgacgatcgtgctgggcttcggtgcggccgcgatcgtcggacccgaggccgtgcgcaggtcgaacgcggcggggaacacggcggttccgttgctggcgctcgatctgggcggtgggacgaattccaccggaggaacggttctgtttgcgatcgtcgccgccgtcgcgtttgccacgattctcgcggtcgtcgccgggatcacgctcgcctcctcggcgtccgtggctcacgatctctacgcgtcgctgcggcgtcggcatgcgaagccgcggagcgaggtggccgtcgcacggaccgcggcggtcggtgtcggcgtggtcgcgatcgccctcggactgctcgcccgggatctcaatgtggccttcctggtgggcctggccttcgcggtcgccgcgtccgcgaatcttccggtgctcatgtattcgctgttctggcgcagcttcaccacacgtggcgcggtgtggtcggtctacgggggcctggtgcccgcgctggggctcgtgctgctctctccggtggtgacggggagccccgaatcgcttttcccgggcgtcgacttccagtacttccccttgcagaaccccggcatcgtgtccatcccgctgggcttcctcgcgggctggctcggcacggtcacttcggtggagccggcggacgaggcgaagcacgcggaggccgaggtgcggtcgctcacgggggccggtgcggtctga

SEQ ID NO: 44491 - protein, 530 aa, Streptomyces avermitilis MA-4680
MTGHHQTLALLLFSGFVAVTLAITTWVSRHRHGSAEEFYAGGRLFSPMENGFAIAGDYMSAASFLGVTGLIALYGYDGLLYVVGFLVAWLVVLFLVAELVRNCGRFTLADVVAARMSERPVRIAAGTSSVTVSVLYLVAQMVGAGSLVALLLGGSSGAARAWTVIGVGALMVIYVSMGGMRATTWIQIVKAVLLLSGTIALTVLVLVRFQGDFDQLLRTAMERSGHGEAFLAPGLKYGGDWTARLDFISLGLALVLGTAGLPHILSRFYTVPTARAARRSVVWSVGLIGGFYLMTIVLGFGAAAIVGPEAVRRSNAAGNTAVPLLALDLGGGTNSTGGTVLFAIVAAVAFATILAVVAGITLASSASVAHDLYASLRRRHAKPRSEVAVARTAAVGVGVVAIALGLLARDLNVAFLVGLAFAVAASANLPVLMYSLFWRSFTTRGAVWSVYGGLVPALGLVLLSPVVTGSPESLFPGVDFQYFPLQNPGIVSIPLGFLAGWLGTVTSVEPADEAKHAEAEVRSLTGAGAV

SEQ ID NO: 44492 - DNA, 1647 bp, Streptomyces avermitilis MA-4680
  CDS (1)..(1647): transl_table=11
atgagcacgagcagcacacaacacgccgcacccgccttcaccggattcagcagttccgcgcaggcgatgtcgctcgtggcgttcacgaccgtcgccaccatcacgctcctgctgtgcgtgatgaccgggcccgaccgcgacgacctcgaagagttctacacgggctacggctccctgtccccgatgcgcaacggcctcgccatcgcgggcgactacatctccgccgcgaccgtcctcggcaccggcggagtcatcgccctcaccggctacgacggtgtcgtactcgccctcagcacggccctgtccctcatgctgctgatgttcctgctggccgaacccctgcgcaacgcgggccagttcaccatgggggacgctctcgcccggcgcatgcccggacgggcggtacgcgtcaccgcgtgcgtcgtcaccatcgccgcgctgctgccgctgatgctcgtccaactggccggaacgggcgacctgctgtcgttcatcctcggcttctccaacgacaccctgaagaccggctgcatcatcggcctcggcgcgctgatgatcagctacgcggcgatcggcggtatgaaaggcaccgccctcatccagatcatgaagatcgtcatgctgctcggttccggcgccgtcgtcgccgtgctcatcctgcaccgcttcgactgggacccgggcgccctgttctcggccgcggcggcacacagcggcgcgggaccggcgttcctgcgctccgggctcgagttcgccggcgggcccaacccgcgcctcgacatgatcactacggagctgacggtcgtcctgggcggcggctgcctcccgcacgtcaccatgcgcatgtacaccgccaacagcgcacgtcaggtgcggcggtcgatgtcctgggcggtgcccgcggtggcgctgttcgtgctcgtcatcaccgtcgtcggcttcggcgcgacggcgctggtcggccgcgaagccatcgccgccgccgacccacagggcaacacggcctacctgctgggctcgcgggcggcgttcggcccggacgtgtcgtcggcggagacactcctgttcaccaccgtgaccaccgcgctcttcctcaccctgctcgcctcggtcgccgggatgatcctcgcctgcgccaactccctcgcccacgacgtgttcgccgcgcgggtgcaggagatgtcgccgcgccgcgagatgaccctggcccgcctgtcggcgctggcggtgggcgtaccgacgatcctgctggccaccctcgtccaccaccgcagtctgcagccgctggtcaccctgtcgttctgcatcggcgcgtccgccatcgcgccggccctggtctacggcctcttctggcgccgctacacccgaaccggcctgctctgcaccctgatcggcggcaccctgtccgtggtcctgctgctgccgggcaccaacctggtcaccggttcacccgccgccgccttccccgacgccgacttcaactggttcccgttcacgacgacgggcctggccaccatccccctcggcttcctcctcggctggctcggcacgctgctctcgggccggcaaaaggcggaggcacagcgcaggcagtacgaagccgtcgagggatggatcctggcgggggcggtgcgcaggagcggatga

SEQ ID NO: 44493 - protein, 548 aa, Streptomyces avermitilis MA-4680
MSTSSTQHAAPAFTGFSSSAQAMSLVAFTTVATITLLLCVMTGPDRDDLEEFYTGYGSLSPMRNGLAIAGDYISAATVLGTGGVIALTGYDGVVLALSTALSLMLLMFLLAEPLRNAGQFTMGDALARRMPGRAVRVTACVVTIAALLPLMLVQLAGTGDLLSFILGFSNDTLKTGCIIGLGALMISYAAIGGMKGTALIQIMKIVMLLGSGAVVAVLILHRFDWDPGALFSAAAAHSGAGPAFLRSGLEFAGGPNPRLDMITTELTVVLGGGCLPHVTMRMYTANSARQVRRSMSWAVPAVALFVLVITVVGFGATALVGREAIAAADPQGNTAYLLGSRAAFGPDVSSAETLLFTTVTTALFLTLLASVAGMILACANSLAHDVFAARVQEMSPRREMTLARLSALAVGVPTILLATLVHHRSLQPLVTLSFCIGASAIAPALVYGLFWRRYTRTGLLCTLIGGTLSVVLLLPGTNLVTGSPAAAFPDADFNWFPFTTTGLATIPLGFLLGWLGTLLSGRQKAEAQRRQYEAVEGWILAGAVRRSG

SEQ ID NO: 44494 - DNA, 1650 bp, Streptomyces avermitilis MA-4680
  CDS (1)..(1650): transl_table=11
atgagccccgcgatcaccctggccgccgacgcggccggcccacgtcttctcgccgccggtgaggcgagcgagcaccggccgctgatcatcaccctgttcgcggtgttcgtcgccgcgaccctcgtcatcaccgtctgggcgggccggcagaccaaggacgccgccgacttctacgcgggcggccgccagttcaccgccttccagaacggcctcgcggtctccggtgactacatgtccgccgcgtccttcctcggcatcgcgggcgccatcgccctcttcgggtacgacggcttcctgtactccatcggattcctcgtcgcctggctggtcgccctgctcctggtcgccgagccgctgcgcaactccggccgctacaccatgggcgacgtcctcgcgttccgcatgcgccagcgccccgtccgcacggccgccggcacctccacgatcgtcgtctcgatcttctacctgctggcccagatggcgggcgcgggcgtcctcgtctcgctgctgctcggtatcaccagcgacggcggcaagatcggcatcgtcgccctggtcggcgtgctgatgatcgtgtacgtcaccatcggcggcatgaagggcaccacctgggtccagatggtcaaggccgtgctgctgatcgccggcgccctgctgctcaccttcctggtgctgctgaagttcaacttcaacatctccgacctgctcggcaaggccgcctccaacagcggcaagggcagcgccttcctcgagcccggcctcaagtacggcgccacctcgacgaccaagctggacttcatctccctgggcatcgccctggtcctgggcaccgcgggcctgccgcacatcctgatccgcttctacacggtgcccaccgccaaggccgcgcggaagtcagtgaactgggctatcggcctcatcggcggcttctacctgatgaccctcgcgctcggcttcggcgcggccgcgctcatcaagccggacgagatcatcgcctccaacaaggcgggcaacacggccgcacccctgctcgccctgcacctgggaggcgtcgactccaactggggtgccatcctgctcgccaccatctcggcggtcgccttcgccacgatcctcgcggtcgtcgcgggcctgaccctggcctcctcctcgtcgttcgcgcacgacatctacgcgaacgtcatcaagaaggggcaggccagcgagaaggacgaggtacgggccgcccggtacgcgacgatcgccatcggcgtcgtgtccatcggcctcggcgccctcgcccgcgacttgaacgtcgcaggcctcgtcgccctcgccttcgccgtcgccgcctccgccaacctgccgacgatcctctacagcctcttctggaagcggttcaccaccccgggagcgctctggtcgatctacggcggcctgatcacggcggtcggcctggtgctgttctcgccggtggtctcgggcaagcccacgtcgatgttcccgggcgtcgacttccactggttcccgctggagaaccccggcatcgtctccatcccggtcggcttcctgctgggctggctcggcacgatcctgtcgaaggaggagccggacaccgccaagtacgcggagctggaggtgcggtccctgtcgggcaccggagcgcactga

SEQ ID NO: 44495 - protein, 549 aa, Streptomyces avermitilis MA-4680
MSPAITLAADAAGPRLLAAGEASEHRPLIITLFAVFVAATLVITVWAGRQTKDAADFYAGGRQFTAFQNGLAVSGDYMSAASFLGIAGAIALFGYDGFLYSIGFLVAWLVALLLVAEPLRNSGRYTMGDVLAFRMRQRPVRTAAGTSTIVVSIFYLLAQMAGAGVLVSLLLGITSDGGKIGIVALVGVLMIVYVTIGGMKGTTWVQMVKAVLLIAGALLLTFLVLLKFNFNISDLLGKAASNSGKGSAFLEPGLKYGATSTTKLDFISLGIALVLGTAGLPHILIRFYTVPTAKAARKSVNWAIGLIGGFYLMTLALGFGAAALIKPDEIIASNKAGNTAAPLLALHLGGVDSNWGAILLATISAVAFATILAVVAGLTLASSSSFAHDIYANVIKKGQASEKDEVRAARYATIAIGVVSIGLGALARDLNVAGLVALAFAVAASANLPTILYSLFWKRFTTPGALWSIYGGLITAVGLVLFSPVVSGKPTSMFPGVDFHWFPLENPGIVSIPVGFLLGWLGTILSKEEPDTAKYAELEVRSLSGTGAH

SEQ ID NO: 44496 - DNA, 1650 bp, Helicobacter hepaticus ATCC 51449
  CDS (1)..(1650): transl_table=11
atgaaaagtttattttttagcttaagcttattaagtgtaaattcgctttttggtgcatctattgattttggtggtgcaaaatcagacattaatccaatagcgataggtatgtttttagcctttgtgcttgcaactttatttattacttatctttctaacaaaaagagtcaatctgcaagtggtttttatactgcagggggtaatatcactggtatgcaaaatggtgtagctattgctggagattatatgagtgcagcgagctttttaggtattactgcgcttgtatttacaaatggctttgatggacttatttattccataggatttttagctgggtggcctatcattttgtttttgattgctgaaaaatttagaaatttgggtaaattcacttttgctgacattactgcctatcgtttagatgcaaagcctattcgtattatttctgctatttctgctttgagcgttatagtgttttatctcattgcacaaatggttggtgcaggacagcttatacaggtgctttttggtttaccttatagtgtagcagtggtgcttgtgggaatcttaatgatttgctatgtcgtttttggtggaatgcacgctacaacttgggtgcaaattattaaagcagtgttgcttttagcaggtgcaagttttatggcaattatgattttgtatttgacaaaatttgacttaagctactacttctcacaggcggtttcacatcaccctaaaggagaatctattatgtcgcctggaggttttttacctgatagtatttctgcagtatcgcttgggttagctcttatgtttggaacagcaggattgcctcatattttaatgagatttttcacggtaaaagatgccaaagaagctcgtaaatctgtattttatgcaacagggttaattggatatttttatattctaactttcatcattggttttggtgcaattgcacttttacttgggaatccagattatacagatgcaaatggtgcttataatggtgttacaaatatggttgctgtaaatcttgcttctgtgcttggcggagatttcttctatggctttatttgtgcggtggcatttgctacaattttggcagttgtttctggattggcaattacaggtgcaggtgcaatcagccacgatttgtttgtcaatgtttgtaaaaatggacaatgtgatcctgcacttgaaatgagagtaactaaaatcgctacaatttgtattggaatatgtgcaattgcacttggcattgtatttgaaaagcaaaatgttgctttcaccgttggattagcttttgcgattgctgcaagcgtgaattttcctattttgcttttgtgtatttattggaaaaacctcaccacaaagggtgcattttggggcggacttatagggcttatagtggtgcttacacttgtaattttaagtcctagtatttgggtgaaaagctttggttttgaaagtgcgattttcccttatgatcaccctgcgatttttactatgccacttacctttatccttatttttattatttcaaagttggataattctaaacgagcacaaattgatagagcaggttttgaagcacaggatttccgtgcgcaaagcggtataggagcaagtgaggctgtagcacattaa

SEQ ID NO: 44497 - protein, 549 aa, Helicobacter hepaticus ATCC 51449
MKSLFFSLSLLSVNSLFGASIDFGGAKSDINPIAIGMFLAFVLATLFITYLSNKKSQSASGFYTAGGNITGMQNGVAIAGDYMSAASFLGITALVFTNGFDGLIYSIGFLAGWPIILFLIAEKFRNLGKFTFADITAYRLDAKPIRIISAISALSVIVFYLIAQMVGAGQLIQVLFGLPYSVAVVLVGILMICYVVFGGMHATTWVQIIKAVLLLAGASFMAIMILYLTKFDLSYYFSQAVSHHPKGESIMSPGGFLPDSISAVSLGLALMFGTAGLPHILMRFFTVKDAKEARKSVFYATGLIGYFYILTFIIGFGAIALLLGNPDYTDANGAYNGVTNMVAVNLASVLGGDFFYGFICAVAFATILAVVSGLAITGAGAISHDLFVNVCKNGQCDPALEMRVTKIATICIGICAIALGIVFEKQNVAFTVGLAFAIAASVNFPILLLCIYWKNLTTKGAFWGGLIGLIVVLTLVILSPSIWVKSFGFESAIFPYDHPAIFTMPLTFILIFIISKLDNSKRAQIDRAGFEAQDFRAQSGIGASEAVAH

SEQ ID NO: 44498 - DNA, 1680 bp, Chromobacterium violaceum ATCC 12472
  CDS (1)..(1680): transl_table=11
atgcagcaaatccgactcaaactcgccgcctgctcggcggcgctgctgcccgcgctcgcctgcgcggccggcgcgatagaaggcgacgtcaagcagcaagccaccaactggcacgccatcatcatgttcttcctgttcgtcgccttcacgctgggcatcacctactgggcggcgcgccgcaccaagtcggccagcgacttctacgccgcgggcggcggcatcaccggcttccagaacggcctggcgatcgccggtgactatatgtccgccgcgtccttcctggggatttccgcgctggtgttcgaaaagggctacgacggcctgatctactcgatgggcttcctggtcggctggcccatcatcctgttcctggtggccgaacggctgcgcaacctgggcaagtacaccttcgcagacgtcgcctcctaccggctcggacagacgccggtgcgcagcttcgccgcgctgtccacgctggtggtggtggcgatctacctgatcgcccagatggtcggcgcgggcaagctgatccagctcttgttcggcatgagctacagctccgccgtgctgatggtcggcgtgctgatggtgtgctacgtgctgttcggcggcatgctggccaccacctgggtgcaaatcatcaaggcggtgctgctgctgtccggcgccaccttcatggccatcatggtgctgtccaccgtcggtttcagcccggaaatgatgttcgagaaagccgtggccgcgcacagcaagggcgccgccatcatggcgccgggcaaggcggacccgatcgactccatctcgctgggcctggcgctgatgttcggcaccgccggcctgccgcacatcctgatgcgcttcttcactgtcgccgacgccaaggaagcccgcaaatcggtgttcttcgccaccggtttcatcggctacttctacatcctgaccttcatcatcggcttcggcgccatcatgctggtgctgaaccagccgggcatgatggaaaccgtggtcaagaacggcaagtcggtcacccagctgatcggcggcaacaatatggccgccatccacctggccgacgccgtcggcggcgacatcttcctcggcttcatctccgcggtggccttcgccaccatcctggcggtggtggcgggcctggcgctgtccggcgcgtccgcggtgtcgcacgatctgtacgccagcgtgatcaagcacggcaaggccaacgaggccgacgagatccgcgtgtccaagatcaccaccgtggtgctgggcgtggtggccatcgtgctgggcctggtgttcgagaagcagaacatcgccttcatggtcggcctcgccttctccatcgccgcctccgccaacttcccggtgctgttcctgtccatgttttggaagggcctgaccacgcgcggcgcggtggtgggcggcctggtcggcctgctgaccgcggtggtgctgatcgtgctgggaccgacggtgtgggtggaagtgatgaagcacgagcacgccatcttcccgtacaagaacccggccatcttctcgatgaccctggccttcgtcgtcacctggctggtttcggtgctggacacctccaagcaggccgcagacgagaaggccaagttcgaggcccagtacgtgcgggcgatgaccggcatcggcgccagtggcgccagcaagcactaa

SEQ ID NO: 44499 - protein, 559 aa, Chromobacterium violaceum ATCC 12472
MQQIRLKLAACSAALLPALACAAGAIEGDVKQQATNWHAIIMFFLFVAFTLGITYWAARRTKSASDFYAAGGGITGFQNGLAIAGDYMSAASFLGISALVFEKGYDGLIYSMGFLVGWPIILFLVAERLRNLGKYTFADVASYRLGQTPVRSFAALSTLVVVAIYLIAQMVGAGKLIQLLFGMSYSSAVLMVGVLMVCYVLFGGMLATTWVQIIKAVLLLSGATFMAIMVLSTVGFSPEMMFEKAVAAHSKGAAIMAPGKADPIDSISLGLALMFGTAGLPHILMRFFTVADAKEARKSVFFATGFIGYFYILTFIIGFGAIMLVLNQPGMMETVVKNGKSVTQLIGGNNMAAIHLADAVGGDIFLGFISAVAFATILAVVAGLALSGASAVSHDLYASVIKHGKANEADEIRVSKITTVVLGVVAIVLGLVFEKQNIAFMVGLAFSIAASANFPVLFLSMFWKGLTTRGAVVGGLVGLLTAVVLIVLGPTVWVEVMKHEHAIFPYKNPAIFSMTLAFVVTWLVSVLDTSKQAADEKAKFEAQYVRAMTGIGASGASKH

SEQ ID NO: 44500 - DNA, 1656 bp, Wolinella succinogenes DSM 1740
  CDS (1)..(1656): transl_table=11
atgaggagagctttgtctctgattattttcctaggttcactctcctttcttagcgctgcaggaacgattgagggcgaggtgcaaaagagcgcgatcaactactccgcgattctgatgtttctcctctttgtggccgccacgcttggcatcacctactggtcggctaaacgcaccaaaagcgccaaagatttctataccgctggcggaggaatcacaggctttcaaaatggtcttgccattgcgggcgattatatgtcagcggcaagtttccttggaatctcagggctagtctatatgaagggctttgatggactcatctactccattggattccttgtggggtggcctatcatcctcttcctcatcgccgaacagctccgcaatctaggcaaattcactttcgctgatgtggcctcctatcgactcaagcagctccccatccgcacactctcagcgattggctcgctcagtgtggtcattttctacctcatcgcacagatggttggggcgggcaaactcatccagctcctctttggtctctcctatgagctcgctgttgttttagtgggaatcctcatgatcatctatgtcaccttcggcggaatgctcgccaccacatgggtgcagatcatcaaggcgattttactcctctcaggcgccaccttcatgtcactctccgtgctctatctcacgggctttagctttgaaggactcttctctcaagccgtcgaggttcacaaagatggactcaaaatcatgagccccggaggactcgtgagcgaccctatctcagcgatctcccttggcatggcgctcatgtttggaacagcgggtttaccccacattctcatgcgattcttcaccgtctcagacgccaaagaggcgagaaaatcggtcttttatgcgactggtttcatcggatatttctatatcctcacctttatcatcggctttggagcgattgtcctcatctccaaaaatcccgaatatcttgatgccgcagggatgattgtcggcggaagcaacatggccgccatccacctctcgcacgctgtgggcgggaatcttttcctaggcttcatctccgccgtggcatttgcgaccatcctagcggtcgtatcaggtctcacgctcgcaggagcctcggcggtctcccatgacatctactctaatgtcatcaaaaagggcaaggccgatgaagagagcgagattagagtttccaagatcaccaccgtggtgatggggattctatccatcatcttaggaatcgcctttgagaatcagaatatcgccttcatggtcggtctcgcgtttgccatcgcagcgagtgcaaacttccccgtcctctttatgtcgatgttttggagcaatctcaccacaagaggagcagtcattggcggctccatcggtctggtgagcgcacttcttatggtgctctttagcccctctatttgggtcaaagtgatgggacacgccgaggccattttcccctatgattatcccgccttcttcaccgtgcctttggcgttctttatgatttggttcttctctatcaccgataagagcgaaagtgccaaagaggagaaggaggcctacaaggctcagtttatccgctcacaaactggaatcggagccgaaggtgccatctctcactaa

SEQ ID NO: 44501 - protein, 551 aa, Wolinella succinogenes DSM 1740
MRRALSLIIFLGSLSFLSAAGTIEGEVQKSAINYSAILMFLLFVAATLGITYWSAKRTKSAKDFYTAGGGITGFQNGLAIAGDYMSAASFLGISGLVYMKGFDGLIYSIGFLVGWPIILFLIAEQLRNLGKFTFADVASYRLKQLPIRTLSAIGSLSVVIFYLIAQMVGAGKLIQLLFGLSYELAVVLVGILMIIYVTFGGMLATTWVQIIKAILLLSGATFMSLSVLYLTGFSFEGLFSQAVEVHKDGLKIMSPGGLVSDPISAISLGMALMFGTAGLPHILMRFFTVSDAKEARKSVFYATGFIGYFYILTFIIGFGAIVLISKNPEYLDAAGMIVGGSNMAAIHLSHAVGGNLFLGFISAVAFATILAVVSGLTLAGASAVSHDIYSNVIKKGKADEESEIRVSKITTVVMGILSIILGIAFENQNIAFMVGLAFAIAASANFPVLFMSMFWSNLTTRGAVIGGSIGLVSALLMVLFSPSIWVKVMGHAEAIFPYDYPAFFTVPLAFFMIWFFSITDKSESAKEEKEAYKAQFIRSQTGIGAEGAISH

SEQ ID NO: 44502 - DNA, 1548 bp, Desulfovibrio vulgaris subsp. vulgaris str. Hildenborough
  CDS (1)..(1548): transl_table=11
atgcctgagttcaccagcactctcggacagcccaacgccgtctccatcctcttcttcttcgccttcgtcgccttcacgttggccatcacgtggttcgcggcacgccgcagccgttcggcctcggaattctatgcggcggggcgtagcgtcaccggactgcagaacggcctcgccctcgcgggcgactacatgagtgcggcctcgtttctcggcatcgccggactggtgtcgctgaaggggtacgacggcctcatctactccatcggctttctcgtgggctggccgctcatgatgttcctcatcgccgaacccctgcgcaatctcggccggtacaccttcgcggatgtcgtggcctacaggctgcggcagaagcccatacgcatcgctgccgcgtgcgggtcgctgatgacggtgtgcttctacctcatcgcccagatggtggggtcgggagcactggtgcagctcatgttcggcatccgctacgaatacgccgtggtggccgtgggcttcatcatgatggcctatgtgctcttcggcggcatgctggccacgacatgggtgcagataaccaaggcggtgctgctccttggcggtgccacggccatggtggtgatggttctcgcgcagttcgactacagccccacccgtctcttcgtgaccgcagccgcgaagcacggcgaggcgatgctggcccccggcggcctcgtgtccaacccgtgggacgccatctcgctgggcatggcactcatgttcggcacggcagggcttccgcacatcctcatgcgcttctacacggtgcccgacgcccgcgccgcccgtaaatcggtgttctatgccaccggtctcatctcgtacttctacgtgctcaccttcatcatcggcttcggtgccatgatgcttgtcggccccgacgccatccgcatgttcgacaagggcggcaacatggcggccccgctgctggcggaagtgacaggtggcaccatgttcctcggcttcatcgccgccgtcgccttcgccaccatcctcgccgtggtcgcgggtctgacgctggcaggggcgacgaccttctcccacgacctctacgccaatgtcttcaagggcggacagtcgaacgaggcggatgaggtccgcgtggccaaacgcgccaccatcgccctcggcgtcatcgccatgctgctgggcatcgccttcaagggacagaacgtggccttcatggtcggactggccttcgccatcgccgccagtgccaacctgcccgcactcctcctgtccatcatgtggcgcggctgcagcaccaccggcgcagtgtgggccattgtcaccgggggcgttctcgccgtgggcctcatcatcgtcagccccaccgtctggacggatgtgttccacctcggcacggcccccttcccgctcaaaaacccggccctgctttccatgcccgccgcgttcatggccggaatcgccgggtcgctgttgcgccccgacagtgaggagtccgcccgcttcgacgcccagaagattcgcaactacctcggcgtaggcgcggagtga

SEQ ID NO: 44503 - protein, 515 aa, Desulfovibrio vulgaris subsp. vulgaris str. Hildenborough
MPEFTSTLGQPNAVSILFFFAFVAFTLAITWFAARRSRSASEFYAAGRSVTGLQNGLALAGDYMSAASFLGIAGLVSLKGYDGLIYSIGFLVGWPLMMFLIAEPLRNLGRYTFADVVAYRLRQKPIRIAAACGSLMTVCFYLIAQMVGSGALVQLMFGIRYEYAVVAVGFIMMAYVLFGGMLATTWVQITKAVLLLGGATAMVVMVLAQFDYSPTRLFVTAAAKHGEAMLAPGGLVSNPWDAISLGMALMFGTAGLPHILMRFYTVPDARAARKSVFYATGLISYFYVLTFIIGFGAMMLVGPDAIRMFDKGGNMAAPLLAEVTGGTMFLGFIAAVAFATILAVVAGLTLAGATTFSHDLYANVFKGGQSNEADEVRVAKRATIALGVIAMLLGIAFKGQNVAFMVGLAFAIAASANLPALLLSIMWRGCSTTGAVWAIVTGGVLAVGLIIVSPTVWTDVFHLGTAPFPLKNPALLSMPAAFMAGIAGSLLRPDSEESARFDAQKIRNYLGVGAE

SEQ ID NO: 44504 - DNA, 1737 bp, Acinetobacter sp. ADP1
  CDS (1)..(1737): transl_table=11
atgaaaaaggactgcactaagatgaaatggaattcattcaaagcgttggctttaatggcagttggagtactcttctctacacttgcgatggcaagtcctgatctgggtcagtcagagcagcaagcaacaaactggcatgcaattatcatgtttgttgcgtttgttggaggaactttgttcattacaaaatgggcagccaagcaaaccaccagtaccaaagatttctatacagcaggcggcggtatttctggtttccagaatggtctggcgattgctggggactatatgtcggctgcttcgttcctgggtatttcggctttagtgtttagttcaggattcgatggtttactgtattctctaggttttatggtgggctggccaatcgtattgttcttgattgccgagcgcttacgtaacttgggcaaatataatctatctgatgtagtgtcattccgtctggaagaaaagccagtgcgtacgcttgctgcatttagctcgctggtggttgtagcattttatctgattgcgcaaatggtgggtgcagggcaattgatcaagcttctctttggcttgaactataatattgcggttgtgattgtgggtttactcatgatggcttatgtcatctttggtggcatgctagcaaccacttgggtacaaattattaaagcagtgcttttgctctcaggtgcaaccttcatggcatttatggtcatgaaagcagtcggctttagctttagtaacatgttcactcaggccattgatgtttatgccaatgttcgtaatatcagtctggatgatgcagccaagattatggggccaggtaaactcgctgcgaatccaatcgatgcgatttctcttggtttggcattgatgtttggtactgcgggattgccacatattttgatgcgtttctttacagtgaaagatgcgaaagaagcacgtaaatctgttgtagtggctacaggattcattggttatttctacctgctcacgtttattattggcttcggtgcgattctgtttgtttcaaacaatccacagttccttgatgttgccaaaatggcagtgacaggcaaacttgagttgatgggcgggaataacatggctgcggtgcatttaagtgatgcattgggcggcgatttattcatgggcttcatttcagcagtggctttcgcaaccattcttgcggttgttgcgggtttaacgctgtctggcgcctctgcgatttcacacgacttatatgccaacgtatttagaaaaggcaaaactacgcctgaatctgaattacgtatgtctaaaatcgcaacacttggtcttgcaatttttgcgatgattttgggtattctgtttgaaaagcaaaacgtggctttcatggttggtttagcattctcggttgcgtgttgtgccaatttcccagttcttgtactttcaatgttctggaaaggtttaactacgcgcggtgcagtgattggtggtgtagttggtttaacaactgcggtggtgctcattattctgtctaaagcagtgtgggtggatactctcaagatttcagatacaccaattaacccatttaatggtcctgcaatctttgcaatgccattgtcattcctatgctgctggttcttttcaatcacagataactcagcacgtgctaaagctgaacgtaaagcatttgatgcgcaatatgttcgctcaatgacaggggttggaatttcaggtgcatcggatcactaa

SEQ ID NO: 44505 - protein, 578 aa, Acinetobacter sp. ADP1
MKKDCTKMKWNSFKALALMAVGVLFSTLAMASPDLGQSEQQATNWHAIIMFVAFVGGTLFITKWAAKQTTSTKDFYTAGGGISGFQNGLAIAGDYMSAASFLGISALVFSSGFDGLLYSLGFMVGWPIVLFLIAERLRNLGKYNLSDVVSFRLEEKPVRTLAAFSSLVVVAFYLIAQMVGAGQLIKLLFGLNYNIAVVIVGLLMMAYVIFGGMLATTWVQIIKAVLLLSGATFMAFMVMKAVGFSFSNMFTQAIDVYANVRNISLDDAAKIMGPGKLAANPIDAISLGLALMFGTAGLPHILMRFFTVKDAKEARKSVVVATGFIGYFYLLTFIIGFGAILFVSNNPQFLDVAKMAVTGKLELMGGNNMAAVHLSDALGGDLFMGFISAVAFATILAVVAGLTLSGASAISHDLYANVFRKGKTTPESELRMSKIATLGLAIFAMILGILFEKQNVAFMVGLAFSVACCANFPVLVLSMFWKGLTTRGAVIGGVVGLTTAVVLIILSKAVWVDTLKISDTPINPFNGPAIFAMPLSFLCCWFFSITDNSARAKAERKAFDAQYVRSMTGVGISGASDH

SEQ ID NO: 44506 - DNA, 1680 bp, Burkholderia mallei ATCC 23344
  CDS (1)..(1680): transl_table=11
atgccggccgcgctcttcgcgtgcgcggcgctggctccggcggccgcgcgcgcgatgggcgccgccgccgcgccgatgcccgaaaaggtcgcgccgaatcccgtcgcgatcggcatgttcttcgtcttcgtgttcgcgacgctcgcgctcacgcgctgggccgcgcgccgcacccgcagcgcgcgcgatttctacacggcgggcggcggcatcaccggcttgcagaacgggctcgcgatcgcgggcgactacatgtccgccgcctcgtttctcggcttgtcgggcatggtgttcatgttcggcttcgacgggctcatctactcgatcggctttctcgtcggctggccgttcgtgatgttcctgatcgccgagccgctgcgcaacctcggcaagttcacgttcgtcgacgtcgtcgcgtaccgcttcgcgcagcggccgatccggctcctcacgtccgccagcgcgctgacgatcgtcgtgctgtatctcgtcgtgcagatggtcggcgcgggcaagctgatccagctgctgttcgggctgtcgtacggcgtcgcggagctgatcgtcggcgtgctgatggtcgtctacgtgttcttcggcgggatgaccgcgacgacctgggtgcaggtgatcaaggccgtgctgctgctcgccggcgcgacgctgctcgccgcgctcgcgctcggcgagttcggcttcagcctcgacgagatgttccgccgcgcggtggccgtgcatccgggcgcgctcggcatcatggggcccggcaagctgatccgcgatccggccaacgcgctgtcgctcggcatcgcgctgatgttcggcaccgcgggctttccgcatatcctgatgcgcttcttcacggtgccgaacgcgaaggaggcgcgcaaatcggtgctgtacgcgacgggcttcatcggctacttctatctgctcacgttcgtgatcggcttctcggcgatcgtgctgctcgcgcaacatccggagttcttccgccacgacgcggcgggcgcgttcgacctgacgcgcgatctcgtcggcggctcgaacatggtcgcggtgaagctcgcgcaggcggtcggcggcaaccggttctacggtttcatcgcggccgtgacgttcgcgacgatcctcgccgtcgtcgcgggcttgaccctcgccggcgcgacgacgatctcgcacgatctctacgcgcagatgtgggcgcgcggcaagccgcacgagcggcgcgagatgcgcatttcgcgcgcggcgacgctcgcgctgtccgcggtcgcgatcggcctgtcgatcctgttcgagcacgtgaacgtcgcgttcatggtcgggctcgtcgcggcggtggcggcgagcgcgaatttcccggtgctcgcgacgtcgatcttctggcgcgggatgacaacgcgcggcgcggtggcgggcggcgggctcgggctcgcgtcggccgtcgcgctcacggtgctgtcgaaatcggtgtgggtcgacgtgctgcatcacgcgcacgcgccggtgttcctcgacaatccggcgctcgtttcggtgccgctcgcgttcgcgggcatcgtgatcggctcgctcaccgatcgcagcgagcgcgcgcggcgcgaacgcgacgcattcgcgcgccaggagttctatgcgcagacgggcgcgctcgccacccgggccgccacgcactga

SEQ ID NO: 44507 - protein, 559 aa, Burkholderia mallei ATCC 23344
MPAALFACAALAPAAARAMGAAAAPMPEKVAPNPVAIGMFFVFVFATLALTRWAARRTRSARDFYTAGGGITGLQNGLAIAGDYMSAASFLGLSGMVFMFGFDGLIYSIGFLVGWPFVMFLIAEPLRNLGKFTFVDVVAYRFAQRPIRLLTSASALTIVVLYLVVQMVGAGKLIQLLFGLSYGVAELIVGVLMVVYVFFGGMTATTWVQVIKAVLLLAGATLLAALALGEFGFSLDEMFRRAVAVHPGALGIMGPGKLIRDPANALSLGIALMFGTAGFPHILMRFFTVPNAKEARKSVLYATGFIGYFYLLTFVIGFSAIVLLAQHPEFFRHDAAGAFDLTRDLVGGSNMVAVKLAQAVGGNRFYGFIAAVTFATILAVVAGLTLAGATTISHDLYAQMWARGKPHERREMRISRAATLALSAVAIGLSILFEHVNVAFMVGLVAAVAASANFPVLATSIFWRGMTTRGAVAGGGLGLASAVALTVLSKSVWVDVLHHAHAPVFLDNPALVSVPLAFAGIVIGSLTDRSERARRERDAFARQEFYAQTGALATRAATH

SEQ ID NO: 44508 - DNA, 1719 bp, Azoarcus sp. EbN1
  CDS (1)..(1719): transl_table=11
atgagcggccgtttcacgcatatcggtgcggggctcgtcctcgcgctgctgtctgccgtcgcactcgccgcaggtggcgatctcggccaggcagagaagcagcccaccaactggaccgcgatcgcgatgttcggcggtttcgtcgtcttcacgctgttcatcaccaagtgggcggcggcgaagaccaagtcggcggcagacttctacactgcgggcggcggcatcaccggcttccagaacgggctggcgatcgccggcgactacatgtcggcggcgtcgttcctggggatctccgcggcggtcatggcgaacggttatgacggactgatctactcgatcggcttcctcgtcggctggccggtgatcactttcctgatggctgaacgcctgcgcaacctcggcaagttcacgttcgccgacgtcgccgcgtaccgcttcaagcagacgccgatccgcgcgttcgccgcgtcgggcacgctcgtcgtcgtcgcgttctacctgatcgcgcagatggtcggcgccggccagctgatcaagctgttgttcggcctcgagtactggatggccgtcgtcatcgtcggtgcgctgatgatggtctacgtgctgttcggcggcatgaccgcgacgacgtgggtgcagatcatcaaggcctgcctgctgctcgccggtgcgtcgttcatggcgttcatggtgctgtgggcgtacggcttctcgccggaggcgctgttcgccgcgtcggtgcaggtcaaggcgcagatcgcggaagccggcggcaggtcgccggaggaggccgggatcatcggacaggcgatcatggggccgggctcgttcatcaaggacccgatctcggcgatctcgttcggcatggcgctgatgttcggcaccgccggcctgccgcacatcctgatgcgcttcttcaccgtgccggacgccaaggaggcgcgcaagtcggtgttctgggcgacgacctggatcggctacttctacgtgctgacgttcatcatcggcttcggcgcgatcgtgctggtgtcgacgaaccccagcttcctcgacgcgaacggcgtgctgatcggcggcggcaacatggcggctatccacctcgccaatgcggtcggcggcaacgtcttcctcggcttcatctcggcggtcgcgttcgcgacgatcctcgcagtggtcgccggcctgacgctgtcgggcgcctcggcggtgtcgcacgacctgtacgcgacggtgttcaagaaaggcaacgcggactcggcctccgagctgcgcgtgtcgcggatgacgaccgtcgtgctcggcatcatcgccgtcgtgctcggcatcgcgttcgagaagcagaacatcgcgttcatggtgtcgctggcgttcgcgatcgccgcgtcggccaacttcccggtgctgttcatgtcggtgctgtggaaggactgcacgacgcgcggcgcgacgatcggcggcttccttggcctgatcaccgcggtcggcctgacggtcgtgtcgccgtcggtgtgggaagcgacgctcggcaatccgaagggctcggcgctgttcccctacacgtcgccggcgctgttctcgatggccgcaggcttcatcggcatctggctgttctcgatactcgacaacagtgcgcgtgcgaaggaagaccgcgcaggttacctcgcgcagaaagtgcgctccgagacgggtatcggcgctgccggcgcctcgggccactga

SEQ ID NO: 44509 - protein, 572 aa, Azoarcus sp. EbN1
MSGRFTHIGAGLVLALLSAVALAAGGDLGQAEKQPTNWTAIAMFGGFVVFTLFITKWAAAKTKSAADFYTAGGGITGFQNGLAIAGDYMSAASFLGISAAVMANGYDGLIYSIGFLVGWPVITFLMAERLRNLGKFTFADVAAYRFKQTPIRAFAASGTLVVVAFYLIAQMVGAGQLIKLLFGLEYWMAVVIVGALMMVYVLFGGMTATTWVQIIKACLLLAGASFMAFMVLWAYGFSPEALFAASVQVKAQIAEAGGRSPEEAGIIGQAIMGPGSFIKDPISAISFGMALMFGTAGLPHILMRFFTVPDAKEARKSVFWATTWIGYFYVLTFIIGFGAIVLVSTNPSFLDANGVLIGGGNMAAIHLANAVGGNVFLGFISAVAFATILAVVAGLTLSGASAVSHDLYATVFKKGNADSASELRVSRMTTVVLGIIAVVLGIAFEKQNIAFMVSLAFAIAASANFPVLFMSVLWKDCTTRGATIGGFLGLITAVGLTVVSPSVWEATLGNPKGSALFPYTSPALFSMAAGFIGIWLFSILDNSARAKEDRAGYLAQKVRSETGIGAAGASGH

SEQ ID NO: 44510 - DNA, 1659 bp, Pseudomonas fluorescens Pf-5
  CDS (1)..(1659): transl_table=11
atgatccgacgtctattcgcagcactcggtcttgccgccttcgctcccgccctctgggctgcagacgccttgacgggcgaagtccacaagcaaccactcaacgtatcggcgatcgtgatgttcgtggtcttcgtcggtgccaccctgtgcatcacctactgggcctccaagcgcaacaagtcggctgccgactattacgcggcgggcggcaagatcaccggcttccagaacggcctggcgatcgctggcgactacatgtccgcggcgtccttcctggggatttccgccctggtgttcacttctggctatgacggcctgatctactccatcggcttcctggtgggctggccgatcattctgttcctgatcgccgagcgcctgcgcaacctgggcaagtacacctttgccgacgtggcgtcctaccgcctcggacagacccagatccgcaccctgtcggcctgtggctcgctggtggtggtggcgttctacctgatcgcgcagatggtgggtgccggcaagctgatccaactgctgttcggcctcgactaccatgtggcggtgatcctggtgggcatcctgatgtgcctgtacgtgctgttcggcggcatgctggccacgacctgggtgcagatcatcaaggcggtgctgttgctctccggcgcgtccttcatggcactgatggtgatgaagcacgtcaacttcgacttcaacaccctgttctccgaagcgatcaaggttcaccccaagggtgaagcgatcatgagccccggcggcctggtgaaagatccgatctcggcgttctccttaggcctcgcgctgatgttcggtaccgctggcctgccccacatcctgatgcgcttcttcaccgtcagcgatgccaaggaagctcgcaagagcgtgctctatgccactggcttcatcggctacttctacatcctgaccttcatcatcggcttcggcgcgatcctgctggtaagcaccaacccggacttcaaggatgccgcaggcgccttgctgggcggcaacaacatggcggcggtgcacctggccaacgcagtgggcggcagcgtgttcctcggcttcatttcggccgtggccttcgccaccatcctggcggtcgttgcaggcctgaccctggctggcgcctcggcggtgtcccatgacctgtatgccagcgtgatcaagaagggcaaggccaacgagaaggacgagatccgcgtttccaagatcaccaccgtggcattgggcgtactggccatcggcctgggcattctctttgaaagccagaacatcgcgttcatggtcggcctggcgttctccattgccgccagctgcaacttcccggtactgctgctttccatgtactggaagaagctcaccacccgtggcgccatgattggcggctggatgggcctggtgagtgccgtggcgctgatgatcctcggcccgaccatctgggtgcagatcctgcatcacgagaaggcgatcttcccgtacgagtacccggcgctgttctcgatgatcatcgccttcatcggtatctggttcttctccatcaccgacaagtcgaccgcggcggtcaacgagcgggcgctgttcttcccgcagttcgtgcgttcgcagaccggcctgggtgccagtggggcggtgtcgcactaa

SEQ ID NO: 44511 - protein, 552 aa, Pseudomonas fluorescens Pf-5
MIRRLFAALGLAAFAPALWAADALTGEVHKQPLNVSAIVMFVVFVGATLCITYWASKRNKSAADYYAAGGKITGFQNGLAIAGDYMSAASFLGISALVFTSGYDGLIYSIGFLVGWPIILFLIAERLRNLGKYTFADVASYRLGQTQIRTLSACGSLVVVAFYLIAQMVGAGKLIQLLFGLDYHVAVILVGILMCLYVLFGGMLATTWVQIIKAVLLLSGASFMALMVMKHVNFDFNTLFSEAIKVHPKGEAIMSPGGLVKDPISAFSLGLALMFGTAGLPHILMRFFTVSDAKEARKSVLYATGFIGYFYILTFIIGFGAILLVSTNPDFKDAAGALLGGNNMAAVHLANAVGGSVFLGFISAVAFATILAVVAGLTLAGASAVSHDLYASVIKKGKANEKDEIRVSKITTVALGVLAIGLGILFESQNIAFMVGLAFSIAASCNFPVLLLSMYWKKLTTRGAMIGGWMGLVSAVALMILGPTIWVQILHHEKAIFPYEYPALFSMIIAFIGIWFFSITDKSTAAVNERALFFPQFVRSQTGLGASGAVSH

SEQ ID NO: 44512 - DNA, 1647 bp, Pseudomonas fluorescens Pf-5
  CDS (1)..(1647): transl_table=11
atgaagcgcctgctcactctattcctgctgccctgcctgctggccaccgacctggccctggcggccgacacgccggcgcggccattgaactggaacgccatcggcatgttcctggtgtttgtcctgatgaccctcggcatcacccgctgggccgcccggcgcacccgctccgccagcgacttctataccgccggtggcggcatgagcggcatgcagaatggcctggcgatcgccggcgacatgatttccgcggcgtccttcctcggcatctcggcaatgatgttcctcaatggctacgacggtctgttgtacgcactgggggtgctggccggctggccgatcatcctgttcctgatcgccgaacgcctgcgcaacctgggcaagtacaccttcgccgacgtggtgtcctatcgcctggcccagacgccggtgcgcctgacctcagccttcggcaccctgagcgtggcgctgatgtacctggtggcgcagatggtcggcgccggcaagctgatcgagctgctgttcggcatcagctacctctatgcggtgatgctggtgggcctgctgatggtctgctacgtgaccttcggcggcatgctggccaccacctgggtacagatcatcaaggcgctgatgctgctctcgggcaccagcttcatggccttcatggtgctcaagcacttcggcttcagcagcgaggcgctgttcgcccaggccagcgcggtgcacgccaagggcagcgcgatcatggccccgggtgggttgctgtcgaaccccatcgatgccatttccctggggctgggcatgatgttcggcaccgccggcctgccgcacatcctcatgcgcttcttcaccgtcagcgatgcccgggaagcgcgcaagagcgtgttctacgccaccggtttcatcggctacttctacctgctgctgatcattgtcggcttcggcgccatcgtcatggtcggtaccgagccccagtaccgcgatgccggcggcgcgatcatcggcggcgccaacatggttgccgtgcacctggcccaggcggtgggcggcaacctgttcctgggcttcatctcggccgtggccttcgccaccatcctggcggtggtggccgggctggcgctgtccggcgcctcggcggtctcccacgacctgtacgcctgcgtgctgcgcaagggccaggccagcacccggcaggaaatgcgcgtctcgcggatcgccaccctgtgcatcggggtgctggcggtgctgctggggctgttgttcgaatcgcagaacattgcctttctctcggggctggtgctggccatcgccgcttcggtgaatttcccggtgctgtttctttccatgttctggaaaggcctcaccactcgcggcgcggtgggcggcagcctggctggcctggtctcggcgattgtgctgctgatgctcagcccggcggtctgggtcaatgtgctgcatcacccccaggcgctgtttccctatgccaacccggcgctgttttccatgagcctggcgttcttctgtgcctgggccttctccgtcagcgaccgctcgccccgggccgaactggagcgcgggcgctacctggcgcagttcatccgttccatgaccggcattggcgcatccgacgccactcatcactga

SEQ ID NO: 44513 - protein, 548 aa, Pseudomonas fluorescens Pf-5
MKRLLTLFLLPCLLATDLALAADTPARPLNWNAIGMFLVFVLMTLGITRWAARRTRSASDFYTAGGGMSGMQNGLAIAGDMISAASFLGISAMMFLNGYDGLLYALGVLAGWPIILFLIAERLRNLGKYTFADVVSYRLAQTPVRLTSAFGTLSVALMYLVAQMVGAGKLIELLFGISYLYAVMLVGLLMVCYVTFGGMLATTWVQIIKALMLLSGTSFMAFMVLKHFGFSSEALFAQASAVHAKGSAIMAPGGLLSNPIDAISLGLGMMFGTAGLPHILMRFFTVSDAREARKSVFYATGFIGYFYLLLIIVGFGAIVMVGTEPQYRDAGGAIIGGANMVAVHLAQAVGGNLFLGFISAVAFATILAVVAGLALSGASAVSHDLYACVLRKGQASTRQEMRVSRIATLCIGVLAVLLGLLFESQNIAFLSGLVLAIAASVNFPVLFLSMFWKGLTTRGAVGGSLAGLVSAIVLLMLSPAVWVNVLHHPQALFPYANPALFSMSLAFFCAWAFSVSDRSPRAELERGRYLAQFIRSMTGIGASDATHH

SEQ ID NO: 44514 - DNA, 1659 bp, Pseudomonas syringae pv. phaseolicola 1448A
  CDS (1)..(1659): transl_table=11
atgatccggcgcctatcagcagcacttggccttgccacattcgcgccgactctctgggcggcagacgcattgacgggcgccgtgcagaagcaaccccttaacatcgccgcgatcgtcatgttcgtggtattcgtcgccttcacgctgtacatcacctactgggcgtcgaaaaagaacaagaccgcgtcggactactactcggcaggcggcaagatcaccggtttccagaacggtctggcaattgccggtgattacatgtcggcagcgtcctttctgggtatctccgcactggtctacacctccggctacgatggcctgatctactcgatcggctttctggtgggctggccgatcattctgttcctggtcgccgaacgcttgcgtaacctgggtaaatacacatttgccgacgttgcgtcgtatcgcctcaagcaaaaggaaattcgcaccttgtccgcctgcggctcgctggtggtagtggcgttctacctgattgcgcaaatggtcggtgccggcaagctgatccagctgctgttcggtctggactacacggttgcggtggtactggtcggcatcctgatgtgcctttacgtattgttcggcggtatgctggccactacctgggtgcagatcatcaaggcggtcatgttgctgtccggtgcgtcgttcatggccctgatggttatgaaacacgttaacttcgacttcaacatgctgttctccgaggcgatcaaggttcaccctaaaggtgaagcgatcatgagccctggcggtctggtgaaagacccgatttcagcgttctcgctgggtctggcgctgatgttcggtactgctggcctgccgcacattctgatgcgcttcttcaccgtgagcgatgccaaggaagcccgcaagtctgtgctgtacgcaaccggcttcatcggctacttctacatcctgacctttatcatcggttttggcgcgatcctgctggtcagcaccaacccggcgttcaaggatgcagcgggcgccttgctgggcggtaacaacatggcagcggttcacctggccgatgcggtcggtggcagcctgttcctgggcttcatctcggcagtcgccttcgccaccattctggcagtggttgccggtctgaccctggcaggtgcttcggcggtctcccatgacctgtatgccagcgtgatcaaagcgggcaaggccaacgagaaagacgagatccgtatctcgaaaatcaccaccattgcgctggcagtcgtggcgatccttctgggtattgccttcgaaagtcagaacatcgcgttcatggtgggtctggcgttctcggtcgctgcaagctgcaacttcccgatcctgctgctttccatgtactggaaaaacctgaccacccgtggcgctatgattggcggctggatgggcctgatcagtgccgtggtgctgatgatcctggggccaaccatctgggtgcagatcctgcatcacgagaaagccattttcccttacgaatacccggcgctgttttctatcgccatcgccttcgtaggtatctggttcttctccatcaccgacaagtcgaaagcggcagagggcgagcgcgccttgttctacccgcaattcgtccggtcacaaacaggcctgggtgccagcggtgcggtttcgcactaa

SEQ ID NO: 44515 - protein, 552 aa, Pseudomonas syringae pv. phaseolicola 1448A
MIRRLSAALGLATFAPTLWAADALTGAVQKQPLNIAAIVMFVVFVAFTLYITYWASKKNKTASDYYSAGGKITGFQNGLAIAGDYMSAASFLGISALVYTSGYDGLIYSIGFLVGWPIILFLVAERLRNLGKYTFADVASYRLKQKEIRTLSACGSLVVVAFYLIAQMVGAGKLIQLLFGLDYTVAVVLVGILMCLYVLFGGMLATTWVQIIKAVMLLSGASFMALMVMKHVNFDFNMLFSEAIKVHPKGEAIMSPGGLVKDPISAFSLGLALMFGTAGLPHILMRFFTVSDAKEARKSVLYATGFIGYFYILTFIIGFGAILLVSTNPAFKDAAGALLGGNNMAAVHLADAVGGSLFLGFISAVAFATILAVVAGLTLAGASAVSHDLYASVIKAGKANEKDEIRISKITTIALAVVAILLGIAFESQNIAFMVGLAFSVAASCNFPILLLSMYWKNLTTRGAMIGGWMGLISAVVLMILGPTIWVQILHHEKAIFPYEYPALFSIAIAFVGIWFFSITDKSKAAEGERALFYPQFVRSQTGLGASGAVSH

SEQ ID NO: 44516 - DNA, 1680 bp, Dechloromonas aromatica RCB
  CDS (1)..(1680): transl_table=11
atgactaaattcaccaaaattcttgctggccttctggccatggcggttgccggtggcgccatcgccgccggtgccgaccttggcaacaccacccagcaggcaaccaactggatcgcaatttccatgtttgcggtcttcgtcggcggcacgcttttcatcaccaagtgggcggcctccaagaccaagtccgctgctgacttctacaccggcggtggtggcatcaccggcttccagaacggcttggcgattgctggcgactacatgtccgctgcttccttcttgggtatttccggtctggtgttcgccaacggcttcgacggcctgatcttctcgatcggctggctggtcggctggccggtcatcaccttcctgatggccgagcgtctgcgtaacctgggcaagttcacgttcgccgacgtggcttcctaccgtttcgcccagaccccggttcgcgtttttgcagcttccgcttccctggttatcgtcgccttctacatgattgcgcagatggtcggtgccggtcagctgatcaaggtgctcttcggtctggagtacatgtacgccgaaatcctcgtcggttccgtgatgatgatgtacgtgctgttcggtggcatgaccgccacgacctgggtgcagatcatcaaggcctgcatgctgctggctggtgccaccttcatggccgtctccgtactcctgcagttcggtttctcgccggaagctttgttcaccaaggcggttgaagttcactccaagcacgacgccatcatggctccgggcgcactgatcaaggatccgatctctgccatctccgttggtatggcgctgatgtttggtaccgctggtctgccgcacatcctgatgcgcttcttcaccgtgccgaacgccaaggaagcccgcaagtcggttgcctgggcaaccacctggatcggttacttctacatcctgacctttatcatcggtttcggcgccattaccaatctggtgcaaaacccgggcgacttctatgtcggcggcgaaatcgccaagggcttgaagggcggcggcaatatggctgctgtgcatttggccaaggcggttggtggtgacgtgttcctcggcttcatctctgccgtggccttcgcaaccatcctggctgttgtggcgggtctgaccctgtctggcgcttctgccgtgtcccatgacctgtacgcttccgtgttcaacaagggttgctcttccgaacaggagctgcgtgtctccaagatcacgaccgtgctgctcggcatcctggctgttgttctgggtatcgccttcgagaaggaaaacgttgcctacatggtgatgctggccttcgtgatcgcctgttcctccaacttcccggtgttgttcatgtccgtgctgtggaaaaactgcacgaccaagggggccgtggttggtggcttcgtcggtctggcctctgccgtggtcctgaccatcggttccgccagcgtctgggaagccgtgatgcacaatccgaagggctccgcctggttcccgtacaactctgctgccatcttctcgatgaccgctgcgttcgtgaccatctggctggtgtccattctggacaactccgcacaggccaagaaggagcgtgctctgtacccgtctcagcaactgcgctccgagactggtctgggtgcctcgactgcttcttcgcactaa

SEQ ID NO: 44517 - protein, 559 aa, Dechloromonas aromatica RCB
MTKFTKILAGLLAMAVAGGAIAAGADLGNTTQQATNWIAISMFAVFVGGTLFITKWAASKTKSAADFYTGGGGITGFQNGLAIAGDYMSAASFLGISGLVFANGFDGLIFSIGWLVGWPVITFLMAERLRNLGKFTFADVASYRFAQTPVRVFAASASLVIVAFYMIAQMVGAGQLIKVLFGLEYMYAEILVGSVMMMYVLFGGMTATTWVQIIKACMLLAGATFMAVSVLLQFGFSPEALFTKAVEVHSKHDAIMAPGALIKDPISAISVGMALMFGTAGLPHILMRFFTVPNAKEARKSVAWATTWIGYFYILTFIIGFGAITNLVQNPGDFYVGGEIAKGLKGGGNMAAVHLAKAVGGDVFLGFISAVAFATILAVVAGLTLSGASAVSHDLYASVFNKGCSSEQELRVSKITTVLLGILAVVLGIAFEKENVAYMVMLAFVIACSSNFPVLFMSVLWKNCTTKGAVVGGFVGLASAVVLTIGSASVWEAVMHNPKGSAWFPYNSAAIFSMTAAFVTIWLVSILDNSAQAKKERALYPSQQLRSETGLGASTASSH

SEQ ID NO: 44518 - DNA, 1674 bp, Dechloromonas aromatica RCB
  CDS (1)..(1674): transl_table=11
atgcgtcgcctgacacaactcattaccgcgctcggcctcgtcgctgttgcagccatggcttacgccggtggcccgctcgaaggcgtgaccgaaaagcaggcgaccaactggcacgccatcatcatgttctgcatcttcgtcacgatgacgatgggcattacctattgggccgccagccgcaccaaatcgacggctgacttctacacggccggtggcggtatcaccggtttccagaacggcctggcgattgccggcgactacatgtctgccgccacgctgcttggtctgactgccatggtctatggccagggttatgacggctatatctacatgctggctttctttgccggctggccggtcatcctgttcctgatggcagaacgcctgcgcaatctgggcaagttcaccttctccgacatcaccgcctaccgcctggatcagggcaaggtgcgcaccatggccgcgatttcctcgctgaccgtggtctgcttctacctgatcgcccagatggttggtgccggtcagctgatcaagctgctgttcggtctcgattacaacgtcgcgatcttcgccgttggcatcttgatgatggtttacgtgaccttcggcggcatggttgctacgacctgggtgcagatcatcaaggcctgcatgttgctggccggtggcacgctggtcatgttcctggccttcggtcagttcggcttctcgttccagaccttggtggagaaggcgacggcagtgcacaagctgggtcccaagctgatgttcccgggtagcctgctggccgatccggtgaccgccatctcgctcggtcttggcctgatgttcggtacggccggcctgccgcatatcctgatgcgtttcttcacggtgaccgatgccaaggaagcgcgtaagtcggtgctttacgcttccggttttgtcgcctacttcttcaacgtcatcttcatcatgggcctgtgcggcatcctgatcgtcggtcagaatccggagttcttcgaaggcggcgtcgtcggcgccaagatgatcggtggtggcaatatggttgccatgcacctggccaaggctgtgggcggcaacatgctgctcggcttcctggcagcggtggccttcgctactatcctggccgttgtgtcgggtctggcgctggctggtgcttcggccatttcgcacgacatctacgctcgcgtcatcatgaaggggcaggcttcggaagccactgaaatccgtgtttcgaagattgcgaccatttgtcttggtgctgttgccatcgtgctcggcatcctgttcgagaagcagaacatcgccttcatggtcggcctggcgttcggcgtggcagcagcagccaacttcccggtcctgatcctctccatgtactggaagggcttgaccacccgcggcgcgctgttcggcggctacggcggcctggtttccgctgtgctcttcgtggtcttctccaagtcggtgtgggttgatgtgctgcacaatgcagccccgctcttcccttacacccaaccggcgctgttcgcgatgccgattgccttcctgcttgcctacattttctcgaagactgacaccagtgttcgcgctggcaaggaaatcgaggcgttcgaagatcagtatgtccgtgcccagacgggttacggagctgaatcagccagcaagcactga

SEQ ID NO: 44519 - protein, 557 aa, Dechloromonas aromatica RCB
MRRLTQLITALGLVAVAAMAYAGGPLEGVTEKQATNWHAIIMFCIFVTMTMGITYWAASRTKSTADFYTAGGGITGFQNGLAIAGDYMSAATLLGLTAMVYGQGYDGYIYMLAFFAGWPVILFLMAERLRNLGKFTFSDITAYRLDQGKVRTMAAISSLTVVCFYLIAQMVGAGQLIKLLFGLDYNVAIFAVGILMMVYVTFGGMVATTWVQIIKACMLLAGGTLVMFLAFGQFGFSFQTLVEKATAVHKLGPKLMFPGSLLADPVTAISLGLGLMFGTAGLPHILMRFFTVTDAKEARKSVLYASGFVAYFFNVIFIMGLCGILIVGQNPEFFEGGVVGAKMIGGGNMVAMHLAKAVGGNMLLGFLAAVAFATILAVVSGLALAGASAISHDIYARVIMKGQASEATEIRVSKIATICLGAVAIVLGILFEKQNIAFMVGLAFGVAAAANFPVLILSMYWKGLTTRGALFGGYGGLVSAVLFVVFSKSVWVDVLHNAAPLFPYTQPALFAMPIAFLLAYIFSKTDTSVRAGKEIEAFEDQYVRAQTGYGAESASKH

SEQ ID NO: 44520 - DNA, 1662 bp, Ralstonia eutropha JMP134
  CDS (1)..(1662): transl_table=11
atgaaagcgaaccaagccttcattgccggcagcgcgctgctgctttccaccgccgcgctggccgcgggcggagacctcgggcaggccgtccggcagccgaccaactggactgccatcggcatgttcgtggtattcgtgatcggcacgctgttcattaccaagtgggccgcaaagcgaaccacctccgcagcgaccttctatacaggcggtggcggcatcacgggcttccagaacggcctggccatcgcaggcgatttcatgtccgcggcctcgttcctcggcatctccgcggcggtctatgccaatggctatgacgggctgatctattcaatcggcttcctggtcggctggcccgtcatcacgttcctgatggccgaacgcctgcgcaatctgggccgcttcacgtttgccgacgtcgcggcgtaccgattcaagcagggaccgatccgcgcattcgccgcatcgggcacgcttgtcgtggtggcgttctacctgatcgcacagatggtcggtgcgggccagctcatcaagctgctgttcggcctggaatactggatcgcggtggtgatcgtcggcgcgctgatgatggtgtacgtgctgttcggcggcatgacggccacgacgtgggtgcagatcatcaaggcgtgcctgctgctcggcggcgcgacgttcatggcgttcatggtgctggcgcagtaccacttcagccccgaggcgctgttcgcgaaggcggtcgaggtccacgccaagaaggaatcgatcatgagtccgggcaacttcatcaaggacccgatctcggcaatctcgttcggcatcgcgctgatgttcggcacggcgggcctgccgcacatcctgatgcgcttcttcaccgtgcccaacgccaaggaagcgcgcaagtcggtgttctgggcaaccacatggatcggctacttctacatcctgaccttcatcatcggcttcggcgcgatcgtgctggtcagcaccaacccgagcttccaggacggcagcggcaagctgctcggcggcgtcaacatggcggcggtgcacctggccagcgcggtcggcggcaatgtgttccttggctttatctcggccgtggcgttcgcgacgatccttgctgtggtagcgggcctgacgctcgccggcgcatcggcggtctcgcatgacctctatgccacggtgttcaagcacggtaaggcgaccagctcgatggagctgcgcgtatcgcgcatcacgaccatcatcctcggcatggttgcggtggtgctcggcatcgtgtttgaaaagcagaacatcgcgttcatggtgtcgctcgcgttcgctgtggcagcgtcggccaacttcccggtgctgttcatgtcggtgctgtggaagggctgcaccacgcgcggcgcgaccatcggcggcttccttggcctgctgtcggcggtggtgctcaccgtgctgtcgcaagccgtgtgggtcgacgtgttccacttcaaggacgcgccgttcccgtacacctctccggcgctgttctcgatgacgatcggctttgtcggcatctggatcttctcgctgaccgacaagtccgcacgcgcacgcctcgacatggcaggtttcgaggcgcaggagctgcgttcggagaccggcattggcgccgtgcagggggcaagccactga

SEQ ID NO: 44521 - protein, 553 aa, Ralstonia eutropha JMP134
MKANQAFIAGSALLLSTAALAAGGDLGQAVRQPTNWTAIGMFVVFVIGTLFITKWAAKRTTSAATFYTGGGGITGFQNGLAIAGDFMSAASFLGISAAVYANGYDGLIYSIGFLVGWPVITFLMAERLRNLGRFTFADVAAYRFKQGPIRAFAASGTLVVVAFYLIAQMVGAGQLIKLLFGLEYWIAVVIVGALMMVYVLFGGMTATTWVQIIKACLLLGGATFMAFMVLAQYHFSPEALFAKAVEVHAKKESIMSPGNFIKDPISAISFGIALMFGTAGLPHILMRFFTVPNAKEARKSVFWATTWIGYFYILTFIIGFGAIVLVSTNPSFQDGSGKLLGGVNMAAVHLASAVGGNVFLGFISAVAFATILAVVAGLTLAGASAVSHDLYATVFKHGKATSSMELRVSRITTIILGMVAVVLGIVFEKQNIAFMVSLAFAVAASANFPVLFMSVLWKGCTTRGATIGGFLGLLSAVVLTVLSQAVWVDVFHFKDAPFPYTSPALFSMTIGFVGIWIFSLTDKSARARLDMAGFEAQELRSETGIGAVQGASH

SEQ ID NO: 44522 - DNA, 1665 bp, Ralstonia eutropha JMP134
  CDS (1)..(1665): transl_table=11
atgaagccgactcttcgcaaactgcctcttctcatcatgagcctggcaagtggcgctgcgctggcggcgcctgccatccagggcgaggtcacgcgccggccgctgaactggagcgccatcgtgatgttcatgctgttcgtgctgttcacgctcggcatcacgcgctgggccgcgcggcgcacgaaatcagcgtcggacttctatgcggccggaggcggcctgaccggcttccagaacggcctcgcgattgcgggcgacatggtctcggccgcatcgttcctcggcatctcggcaatgatgttcgacaagggctatgacgggctgatctacgcgctcggcgtggtcgccggctggcccatcatcctgttcatcgtggccgagcggctgcgcaacctgggccgctatacgtttgccgacgtcgtgtcgtaccgcctgtcgcagaagcccgtgcgcatcacggccgcattcggcacgttgaccgtcgtgatcatgtacctggtcgcgcagatggttggggccggcaagctgattgaactgctgttcggcaccagctatgaatcggccgtggtcgtcgtcggcctgctgatggtgctgtacgtgctgttcggcggcatgctggcgacgacctgggtgcagatcatcaaggccgtgctgctgctgggcggcgtcacgttcatggcgttcatggtgctggcgtacttcgactacagccccgaagcgatgttcgcgggcgcggcgaaggtgcatgacaagggactcgccatcctgtcgcccggcggcctcgtgtcgaacccgatcgacgccatttcgctgggcgtgggcatgatgttcggcacggccggtctgccgcatatcctgatgcgcttcttcacggtcgcggatgcgcgtgaagcgcgcaagtcggtgctctatgcgaccggttttatcggctacttctacgtgctgatcctcgtggtgggcttcggcgctatcgtcatggtcgggagcgatcccgcctaccgcgatgccgcgggcaagctcatcggcggcagcaatatggtggcggtgcatctcgcgcatgccatcggtggtgacctgttcctcggcttcatctcggcggtggcgttcgcgaccatcctcgcggtggtggcgggcctggcgctttcgggggcctcggcggtgtcgcacgacttgtacgccaatgtgttccgcaaaggacaggcgaacgagaaggacgagattcgcgtctcgaaggcggccacgctggtcatcggcctgctggcgatggtgctcggcgtgctgttcgagaagcagaatatcgccttcctgtccgggctcgtgctggctattgccgcttcggtcaacttcccggtgctgttcctgtcgatgttctggaagggactgaccacgaagggcgccgttgcgggaagcctcgcgggactcgcatcggcggtggcgctgctggtgctcggccccacggtgtgggtcggcctgctgcaccatgacaagccgatcttcccgtatgcgaatccggcgttgttctcgatgacgcttgcgttcgtctccgcgtggctcgtgtcggtgctggacaactcggcgcaggctgctgcggagcggcgtcgctttggcgcgcagttcgtgcggtcgatgacggggatcggggctgcgggggcatcgcagcattga

SEQ ID NO: 44523 - protein, 554 aa, Ralstonia eutropha JMP134
MKPTLRKLPLLIMSLASGAALAAPAIQGEVTRRPLNWSAIVMFMLFVLFTLGITRWAARRTKSASDFYAAGGGLTGFQNGLAIAGDMVSAASFLGISAMMFDKGYDGLIYALGVVAGWPIILFIVAERLRNLGRYTFADVVSYRLSQKPVRITAAFGTLTVVIMYLVAQMVGAGKLIELLFGTSYESAVVVVGLLMVLYVLFGGMLATTWVQIIKAVLLLGGVTFMAFMVLAYFDYSPEAMFAGAAKVHDKGLAILSPGGLVSNPIDAISLGVGMMFGTAGLPHILMRFFTVADAREARKSVLYATGFIGYFYVLILVVGFGAIVMVGSDPAYRDAAGKLIGGSNMVAVHLAHAIGGDLFLGFISAVAFATILAVVAGLALSGASAVSHDLYANVFRKGQANEKDEIRVSKAATLVIGLLAMVLGVLFEKQNIAFLSGLVLAIAASVNFPVLFLSMFWKGLTTKGAVAGSLAGLASAVALLVLGPTVWVGLLHHDKPIFPYANPALFSMTLAFVSAWLVSVLDNSAQAAAERRRFGAQFVRSMTGIGAAGASQH

SEQ ID NO: 44524 - DNA, 1638 bp, Ralstonia eutropha JMP134
  CDS (1)..(1638): transl_table=11
atgaaacgcctattgatcaccgctgccgcgctggcagcaaccaccccggccttcgcggcgacgcctccggtcggccagggcctcaacctgattgccatcggcatgttcgtggtatttgtcgcggcgacgctcggcgtgacgcgctgggcagcacggcgcaaccacagcgttgccgaccactacgcggcgggcggcaagatcactgcgatgcaaaatggctgggccatcgccggcgactatatgtcggcagcatcgctgctcggtatctcggcgctggtcttcaccagcggctacgacgggctgatctactcgattggctttctggccagctggccgatcatcctgttcctgatcgccgagccgctgcgcaacctcgggcgctacacgctggccgatgtcctgtcctatcgcctcaggcagcggccaattcgtggtttctcggcatcgagttcgatcgtcatcgtgctcctgtacctggtctcgcagatggtcggcgccggcaagctcgtggaattgctgttcggcttcaactacacctcggcggtcgtgctggtcggcgtgctcatggtcgtctatgtgttctttggcggcatgctcgcgaccacctggatccagatcatcaaggcggtcatgctgctggccggttgcgcattcatggcttacatggtgctcagccgtttcggcttcagcctgaacagcctgttcgaccacgccattgccgcgcacggcaagcacgaggcgatcatgcgtcccggcggtctggtgtccgatccggtctccgccgtttcactggggctggcgctgatcttcggtacggctggactgccgcacatcctgatgcgctttttcaccgtcggcgatgtcaaggccgcacgcaagagcgtgctttatgcgaccggcatcgtcggcacgggctatgccatgatcatcgtgatcggatttggcacgatcgcgctggttgcgcaggatccgctgtaccacaatggcgcgggcgcagtgattggcggcgtgaacatggtggccgtgcatctggctcacgcagtcggcggcaatgtgttcctcggctttatctgcgccgtggcgttctcgaccatcctggctgtcgtggcaggcctgacgctcgccggatcttcggcgatctcgcatgacctctatgcaacggtcatccgcaaggggcaagcgtccgacaaggatgagctgcgagtgtcccgcatgaccacgctggtgcttggtgtcctgtcgatcctgctcggcattctgttcgagaagcagaccattgcgttcatcgtcagcctgaccttctccatcgcggccagctccaatttccccgtgctgcttctgtcgatctactggcgcgggctcaccacgcgcggcgccgtagtcggcggcatgctgggcctcgtgacggcggtcgtcctgacgatcctcagcccaacggtctgggtacaggtgctgggacatgcgtccgcaatctacccgtacgaatatccggcgctgttttcgatgctggtggcattcctcggcatctacgtgttctccgtgaccgaccgatcgcctcgcggcgcgtgggaacgcgatgcctaccagaaccagcgcgtagatggcgaactggggctcggcagtaaaaccgccggctga

SEQ ID NO: 44525 - protein, 545 aa, Ralstonia eutropha JMP134
MKRLLITAAALAATTPAFAATPPVGQGLNLIAIGMFVVFVAATLGVTRWAARRNHSVADHYAAGGKITAMQNGWAIAGDYMSAASLLGISALVFTSGYDGLIYSIGFLASWPIILFLIAEPLRNLGRYTLADVLSYRLRQRPIRGFSASSSIVIVLLYLVSQMVGAGKLVELLFGFNYTSAVVLVGVLMVVYVFFGGMLATTWIQIIKAVMLLAGCAFMAYMVLSRFGFSLNSLFDHAIAAHGKHEAIMRPGGLVSDPVSAVSLGLALIFGTAGLPHILMRFFTVGDVKAARKSVLYATGIVGTGYAMIIVIGFGTIALVAQDPLYHNGAGAVIGGVNMVAVHLAHAVGGNVFLGFICAVAFSTILAVVAGLTLAGSSAISHDLYATVIRKGQASDKDELRVSRMTTLVLGVLSILLGILFEKQTIAFIVSLTFSIAASSNFPVLLLSIYWRGLTTRGAVVGGMLGLVTAVVLTILSPTVWVQVLGHASAIYPYEYPALFSMLVAFLGIYVFSVTDRSPRGAWERDAYQNQRVDGELGLGSKTAG

SEQ ID NO: 44526 - DNA, 1659 bp, Pseudomonas fluorescens PfO-1
  CDS (1)..(1659): transl_table=11
atgatccggcgtctactggctcttttgagcatcgcagcgttcgctccggccgtctgggccgctgacgccctgaccggcgaagtccacaaacaaccactcaacgtttccgcgatcgtcatgttcgtggtgttcgttggcgcgaccctgtgcatcacctactgggcgtccaagcgcaacaagtcggcggccgactactatgcggcgggcggcaagatcaccggtttccagaacggtctggcaattgccggtgactacatgtcggcggcgtccttcctgggtatttccgcgctggtgttcacctccggctacgacggcctgatctactcgatcggcttcctggtgggctggccgatcattctgttcctgatcgccgagcgtctgcgtaacttgggtaaatacacctttgccgacgtggcgtcctaccgcctcgggcaaacccagatccgcaccctgtcggcctgcggttcgctggtggtggtagcgttctacctgatcgcgcaaatggtcggtgccggcaagctgatccagctgctgttcggtctcgactaccacgtcgcggtgattctggtcggtatcctgatgtgcctgtacgtgctgttcggcggcatgctggcgactacctgggtgcagatcatcaaggcggtgctgttgctgtccggtgcctcgttcatggcgctgatggtgatgaagcacgtcaacttcgacttcaacaccctgttctccgaagccatcaaggttcacgccaagggtgaagcgatcatgagcccgggcggtctggtcaaagacccgatctcggcgttctccctgggtctggcgctgatgttcggtaccgccggcctgccgcacatcctgatgcgcttcttcaccgttagcgacgcgaaagaagcccgtaagagcgtgctgtacgcgaccggtttcattggctacttctacatcctgaccttcatcatcggcttcggcgcgatcctgctggtcagcaccaacccggccttcaaagatgcggcgggcgctctactcggcggcaacaacatggcggcggtgcacctggccaatgccgtgggcggcagcgtgttcctcggcttcatctcggcggtagcgttcgcgaccattctggcggtcgtggccggtctgaccctggccggggcttcggcggtgtctcacgacctgtacgccagcgtgatcaagaagggcaaggccaacgagaaggatgagatccgcgtttcgaagatcaccaccatcgcgctgggcgttctggccattggcctgggcatcctgttcgaaagccagaacattgcgttcatggttggcctggcgttctccatcgcggcaagctgcaacttcccggtgctgctgctttcgatgtactggaagaagctgaccactcgtggcgccatgattggcggctggctgggcctggtgagtgcggtgggtctgatgattcttggcccgaccatctgggtgcagattctgcatcatgagaaggcgatcttcccttacgagtatccggcgttgttctcgatgatcattgcgtttatcgggatctggttcttctcggtcaccgataagtcggccgaagccgagaatgagcgtgcgctgttcttcccgcagtttgtgcgttcgcagactgggttgggggctagtggggcggtttcgcactga

SEQ ID NO: 44527 - protein, 552 aa, Pseudomonas fluorescens PfO-1
MIRRLLALLSIAAFAPAVWAADALTGEVHKQPLNVSAIVMFVVFVGATLCITYWASKRNKSAADYYAAGGKITGFQNGLAIAGDYMSAASFLGISALVFTSGYDGLIYSIGFLVGWPIILFLIAERLRNLGKYTFADVASYRLGQTQIRTLSACGSLVVVAFYLIAQMVGAGKLIQLLFGLDYHVAVILVGILMCLYVLFGGMLATTWVQIIKAVLLLSGASFMALMVMKHVNFDFNTLFSEAIKVHAKGEAIMSPGGLVKDPISAFSLGLALMFGTAGLPHILMRFFTVSDAKEARKSVLYATGFIGYFYILTFIIGFGAILLVSTNPAFKDAAGALLGGNNMAAVHLANAVGGSVFLGFISAVAFATILAVVAGLTLAGASAVSHDLYASVIKKGKANEKDEIRVSKITTIALGVLAIGLGILFESQNIAFMVGLAFSIAASCNFPVLLLSMYWKKLTTRGAMIGGWLGLVSAVGLMILGPTIWVQILHHEKAIFPYEYPALFSMIIAFIGIWFFSVTDKSAEAENERALFFPQFVRSQTGLGASGAVSH

SEQ ID NO: 44528 - DNA, 1731 bp, Rhodobacter sphaeroides 2.4.1
  CDS (1)..(1731): transl_table=11
atgagccgtctcacgtcttcgcgccgccttgcagtggccatggccgcgctgatcctgctgccgacgctggcgctggccgcgggcccggatctgggcgaggtccagaagcaggccacgaacttcaccgccatcggcatgttcgcggccttcgtggtcttcacgctcttcatcaccaaatgggccgcggccaagaccaagtccgccgccgacttctacaccgcgggcggcggcatcaccggctttcagaacgggctcgccatcgcgggcgactacatgtcggcggcctccttcctcgggatttcggcagccgtgatggcctcgggcttcgacgggctgatctattccatcggtttcctcgtgggctggccgatcctgaccttcctcatggccgagcggctgcggaacctcgggcagttcaccttcgcggacgtggcggccttccgcttcgcccagacgccggtgcgcgtgttcgcggcttcctcgaccctcgtcgtggtggccttttacctcatcgcgcagatggtgggggcggggcagctcatcaagcttctcttcgggctcgaatattgggtggcggtcgtcatcgtgggcgggctcatgatgatctacgtcctcttcggcggaatgacggctacgacctgggtgcagatcatcaaggcctgcctccttctgggcggcgccaccttcatggccgtcatggtgatgatgcagtatggcttcagcctcgagcggttcttcgcggcagcggtcgaggtgaaggcgcagatcgcggcccagaccccgggcaccacgcccgaggatgcggcggcggccggacaatcgatcatggggccgggcaagttcatcaccgacccgatctcggccatctccttcggcatggcgctgatgttcgggaccgcgggcctgccgcacatcctgatgcgcttcttcaccgtgccggacgccaaggaggcgcggaagtcggtgatgtgggcgaccacctggatcggctacttctacctcttgaccttcatcatcggcttcggcgcgatcaccttcgtgctgacgagcccgggcttcctcgacgagacgggcgcgctggtgggcggcagcaacatggcggcgatccatctcgccaaggccgtgggcggcaacctcttcctcggcttcatctctgcggtggccttcgccacgatcctcgcggtggtggcgggcctgacgctcgccggcgcttcggccgtgtcgcacgacatctatgcgacggtcatcaagaagaacaaggcgggcagcgccgcggaactcaaggtctcgcgttatacggtgctggcgctcggcgtgctggcggtggctctgggcatcgtgttcgagaagcagaacatcgccttcatggtctcgctcgccttcgccatcgcggcttcggccaacttcccggtgctgtttctgtcggtgctgtggaagggctgcacgacgcggggcgtggtgatcggcggcttcatcggcctcgtcgtgtcggtggtgctgaccgtgctctcgccctcggtctgggaggcgacgctgggctatgacaagggctcggcgcccttcccctatacctcgcccgcgctattctcgatgaccgcggggttcgtggggatctggctcttctcgacgctcgaccgcagcctgcgcggacggcaggaccgggcgggcttcgtggcgcagcaggtccgctccgagacgggcatcggggccgcggccgcctccgcgcactga

SEQ ID NO: 44529 - protein, 576 aa, Rhodobacter sphaeroides 2.4.1
MSRLTSSRRLAVAMAALILLPTLALAAGPDLGEVQKQATNFTAIGMFAAFVVFTLFITKWAAAKTKSAADFYTAGGGITGFQNGLAIAGDYMSAASFLGISAAVMASGFDGLIYSIGFLVGWPILTFLMAERLRNLGQFTFADVAAFRFAQTPVRVFAASSTLVVVAFYLIAQMVGAGQLIKLLFGLEYWVAVVIVGGLMMIYVLFGGMTATTWVQIIKACLLLGGATFMAVMVMMQYGFSLERFFAAAVEVKAQIAAQTPGTTPEDAAAAGQSIMGPGKFITDPISAISFGMALMFGTAGLPHILMRFFTVPDAKEARKSVMWATTWIGYFYLLTFIIGFGAITFVLTSPGFLDETGALVGGSNMAAIHLAKAVGGNLFLGFISAVAFATILAVVAGLTLAGASAVSHDIYATVIKKNKAGSAAELKVSRYTVLALGVLAVALGIVFEKQNIAFMVSLAFAIAASANFPVLFLSVLWKGCTTRGVVIGGFIGLVVSVVLTVLSPSVWEATLGYDKGSAPFPYTSPALFSMTAGFVGIWLFSTLDRSLRGRQDRAGFVAQQVRSETGIGAAAASAH

SEQ ID NO: 44530 - DNA, 1635 bp, Burkholderia sp. 383
  CDS (1)..(1635): transl_table=11
atgaagcgtgtactactcgcgtcgctcatcgcgatcgaagcattgccagcagtcgcggcccaacctggatcgctcacgcacggccataatccggtcgcaatcggcatgttcttgttgtttgtggcatcgacactcctgatcacccgctgggcggcccgcaaaaaccacagcgtcgctgatcactatgccgccggaggcaagattactgcgttccagaacggatgggcgattgccggtgactacatgtcggcggcatctctgctcggcatctcggcgctcgtgttcacaagcggttacgatgggctgatctattccatcggatttctcgcgagctggcccatcatcctgttcctgatcgccgagccgttgcgcaacctcggcaaatacacactggcagacgtggtgtcctaccggctccagcaacggccaatccgggcctttgcggcttcgagctcgatcgtcatcgtgctgctgtatctcgtgtcgcagatggttggcgcgggcaagctggtcgaattgctgttcggcctgaattacaccattgcggtactgatcgtcggcctgctgatggtcgtctacgtattcttcggcggaatgctggcaacgacgtggattcagatcgtcaaggccgtcctgctactcgccggcgcagcattcatggcactcatggtgctgagtcatttcggcttcagcctgaacgcccttttcacgcaggcggttctcgtgcattcgaagcacgatgccatcatgcgcccaggcgggcttgtctcggatccggtttccgctgtatcgctcggcctcgcgctgatcttcggcacggccgggctgccccatatcctgatgcgattcttcacggtcggcaacgtcaaggctgcgcgcaagagcattctttacgccacgggtatcgtcggcgtcggctacgcattgatcatcatcattggcttcgggacaatcgcactcgttgcgtcaaatccggagtatcacaattcgtcaggttccgtgatcggcggcgtgaacatggtagcgatccatctcgcgcacgcggtggggggaaacgtgttcctcggattcatctgcgcagtcgcattctcgaccattcttgcagtggtagccggcctgaccctggctggatcgtccgcgatctcgcatgacctgtacgcgaatgtcctgcgccgtggcaatgcgtctgatcgcgatgaaatgcgcgtggcccgtataaccacgctcgtcctgggcgtcctggcagtgctcctcggtatcgccttcgagaagcaaaacatcgccttcattgtcagtcttacgttttcgattgcggccagctcaaacttcccggtcctactgctctcgatctattggcgcggcctgaccacgcgcggcgctgtcatcggtggcatgctcggtctcatcaccgccgttgtgctgaccgtattgagtccgacagtatgggtacaggttcttggccacgcgcatgctctctacccgtacgaataccccgcactcttttcgatggctgtcgcgttcgccggcattgtcgtgatttccgttgcggacaactcggcccgggcccgacaggagcgcgcacgatttgacacgcagctcgtcgagtgcgaattgggggggacgcggcacggttga

SEQ ID NO: 44531 - protein, 544 aa, Burkholderia sp. 383
MKRVLLASLIAIEALPAVAAQPGSLTHGHNPVAIGMFLLFVASTLLITRWAARKNHSVADHYAAGGKITAFQNGWAIAGDYMSAASLLGISALVFTSGYDGLIYSIGFLASWPIILFLIAEPLRNLGKYTLADVVSYRLQQRPIRAFAASSSIVIVLLYLVSQMVGAGKLVELLFGLNYTIAVLIVGLLMVVYVFFGGMLATTWIQIVKAVLLLAGAAFMALMVLSHFGFSLNALFTQAVLVHSKHDAIMRPGGLVSDPVSAVSLGLALIFGTAGLPHILMRFFTVGNVKAARKSILYATGIVGVGYALIIIIGFGTIALVASNPEYHNSSGSVIGGVNMVAIHLAHAVGGNVFLGFICAVAFSTILAVVAGLTLAGSSAISHDLYANVLRRGNASDRDEMRVARITTLVLGVLAVLLGIAFEKQNIAFIVSLTFSIAASSNFPVLLLSIYWRGLTTRGAVIGGMLGLITAVVLTVLSPTVWVQVLGHAHALYPYEYPALFSMAVAFAGIVVISVADNSARARQERARFDTQLVECELGGTRHG

SEQ ID NO: 44532 - DNA, 1695 bp, Burkholderia sp. 383
  CDS (1)..(1695): transl_table=11
atgcgacgactctcgatcgcgcccggcgcgcttgctgttcccttcgctctcgcttcttccgccgcgcatgccgtatcggtcgcgggcccgatgcccgacaaggtcgaactgaacccggtcgcgatcgggatgttcttcgcgttcgtgttcgcgacgctcgcgctcacgcgctgggccgcacggcgcacacgctcgacgcgcgacttctacacggccggcggcggcatcaccgggctgcagaacgggctcgcgatcgcgggcgactacatgtcggccgcgtcgttcctcgggctgtccgggatggtgttcatgttcggcttcgacgggctgatctactcgatcggctttctggtcggctggccgttcgtgatgttcctgatcgccgaaccgctgcgcaacctcggcaagttcacgttcgtcgacgtcgttgcgtaccgcttcgcgcagcggccgatccggctgctgacgtccgcgaattcgctgaccatcgtcgtgctgtacctcgtcgtgcagatggtcggcgcgggcaagctgatccagctgctgttcgggctgtcgtacggcacggccgagctgatcgtcggcgtgctgatggtcgtctacgtgttcttcggcgggatgaccgcgaccacctgggtgcaggtgatcaaggccgtgctgctgctgtgcggcgcaacgctgctcgtcgtgctcgcgctcggcgaattcggcttcagcatcgacgagatgttccgccgcgcggtggccgtgcatccgggcgcgctgtcgatcatgggcccgggcaagctgatccgcgatccggccaacgcgctgtcgctcgggatcgcgctgatgttcggcacggccggcttcccgcacatcctgatgcgcttcttcacggtgccgaacgcgaaggaggcgcgcaagtcggtgctctacgcgaccggcttcatcggctacttctacctgctgaccttcgtgatcggcttctcggcgatcgtgctgctcgcgcagcatccggagttcttcaagctcggcgcgaacggcacgttcaacctgacgcacgacctgctcggcggctcgaacatggtcgcggtgaagcttgcgcaggcggtcggcgggaactggttctacggcttcatcgcggccgtcacgttcgcgacgatcctcgcggtggtcgcgggcctgacgctcgccggcgcgacgacgatctcgcacgacctgtatgcgcagatgtgggcgcgcggcaagcccgacgaacgcgtcgagatgcgcatctcgcgcgcggcgacgatcgtgctgtcggcggtcgcgatcgggctgtcgatcctgttcgagcacgtgaacgtcgcgttcatggtcggcctcgtcgcggcggtggccgcgagcgccaatttcccggtgctcgcgatgtcgatcttctggcgcgggatgacgacgcgcggcgcggtgctcggcggcagcctcggccttgtgtcggcggtcacgctcacggtgctgtcgaagtcggtgtgggtcgacgtgctgcaccacgcgcacgcgccggtgttcctcgacaacccggcgctcgtgtcggtgccgcttgcgttcatcgggatcgtcgtcggctcgctcgcggatcgcggcgagcgtgcgcggcgcgagcgcgaggccttcgcgcagcaggagttctacgcgcagacgggcgtgctggccggccgcgccgtgcagcactga

SEQ ID NO: 44533 - protein, 564 aa, Burkholderia sp. 383
MRRLSIAPGALAVPFALASSAAHAVSVAGPMPDKVELNPVAIGMFFAFVFATLALTRWAARRTRSTRDFYTAGGGITGLQNGLAIAGDYMSAASFLGLSGMVFMFGFDGLIYSIGFLVGWPFVMFLIAEPLRNLGKFTFVDVVAYRFAQRPIRLLTSANSLTIVVLYLVVQMVGAGKLIQLLFGLSYGTAELIVGVLMVVYVFFGGMTATTWVQVIKAVLLLCGATLLVVLALGEFGFSIDEMFRRAVAVHPGALSIMGPGKLIRDPANALSLGIALMFGTAGFPHILMRFFTVPNAKEARKSVLYATGFIGYFYLLTFVIGFSAIVLLAQHPEFFKLGANGTFNLTHDLLGGSNMVAVKLAQAVGGNWFYGFIAAVTFATILAVVAGLTLAGATTISHDLYAQMWARGKPDERVEMRISRAATIVLSAVAIGLSILFEHVNVAFMVGLVAAVAASANFPVLAMSIFWRGMTTRGAVLGGSLGLVSAVTLTVLSKSVWVDVLHHAHAPVFLDNPALVSVPLAFIGIVVGSLADRGERARREREAFAQQEFYAQTGVLAGRAVQH

SEQ ID NO: 44534 - DNA, 1731 bp, Burkholderia sp. 383
  CDS (1)..(1731): transl_table=11
atgaagaagactctttcgatgacgctggtcgcgctgctggcagtaggcgcgtgcggcatggccgtcgcgggcggcggcgatgtcgggcagaccgccaagcaggcaaccaacaccacggccatcgtcctgttcgcgctgttcgtcgcagggacgttgtggatcaccaagtgggcggcttcgcgcacgcgttccgccgcggatttctacaccgccggcggcggcattaccggatttcagaacggtctggcgatctcgggcgactacatgtcggccgcatccttcctcggcatttccgccgcggtgatgacgtcgggttacgacggcctgatctactcgatcggcttcctggtcggctggccgatcatcacgttcctgatggccgagcggctgcgcaacctcggcaagttcaccttcgccgacgtcgcgggctaccgcttcgagcaagggccgatccgcagtttcgccgcaatcggtacgctggtggtggtggcgttctacctgatcgcgcagatggtgggcgcggggcagctcatcaagctgctgttcggtctcgactactgggtggcggtggtcatcgtcggcgcgctgatgatggtctacgtgctgttcggcggcatgacggccaccacctgggtgcagatcatcaaggcgtgcatgttgctcgcgggtgtgacgttcatggcgatcatggtgctcgcgcagtacggcttcagcccggaggcgctgttcgcccatgcggtggaagtcaagaccgcgattgccgcgaatgccggcaaagcgccggacgacgcgacccggatcgggctgtcggtgatgtcgccgggcgggttcatcaaggatccgatctcggcgatctcgttcggcatggcgctgatgttcggcaccgccggcctgccgcacatcctgatgcgcttcttcacggtgccggatgcgaaggaagcgcgcaagtccgtgttctgggcgaccacgtggatcggctacttctacgtgctgatcttcatcatcggcttcggtgcgatcacgctggtgctgaccaatccggaactggccgacgtcgcgaagggcgtgatcaagggcggcgcgggcacggccaacatggcggcggtgctggtggccaagacggtgggcggcgacgtgttctacggcttcatctcggccgtggcgttcgcgacgattctggcggtggtcgccgggctcacgctgtcgggcgcgtccgcggtgtcgcacgacctctacgccaccgtcttcaagaacggcaacgcgaatagtgccgacgagctgagggtgtcgcgcatcacgacgctggtgctcggcgtgatcgccgtgctgctgggcatcgcgttcgagaagcagaacgtcgcgttcatggtgtcgctggcgtttgcggtggccgcgtcggccaacttcccggtgctgttcctgtcgatgatgtggaagggttgcaccacgcgcggcgcggtcatcggcggctttctggggctggtctcgtcggtggggctgacgatcgtgtcgccgtcggtgtgggaagcgacgctgggttatccgaagggttcggcgtggtttccgtacacgtcgcccgcgctgttctcgatgacgatcggcttcgtcggcgtgtggctgttctcggtactcgacacgagcctgcgcgcgaaggcggagaagggcgcgttcgccgcgcagcaggtgcgttcggaaacggggctgggggcgactcgcgccagcagccactga

SEQ ID NO: 44535 - protein, 576 aa, Burkholderia sp. 383
MKKTLSMTLVALLAVGACGMAVAGGGDVGQTAKQATNTTAIVLFALFVAGTLWITKWAASRTRSAADFYTAGGGITGFQNGLAISGDYMSAASFLGISAAVMTSGYDGLIYSIGFLVGWPIITFLMAERLRNLGKFTFADVAGYRFEQGPIRSFAAIGTLVVVAFYLIAQMVGAGQLIKLLFGLDYWVAVVIVGALMMVYVLFGGMTATTWVQIIKACMLLAGVTFMAIMVLAQYGFSPEALFAHAVEVKTAIAANAGKAPDDATRIGLSVMSPGGFIKDPISAISFGMALMFGTAGLPHILMRFFTVPDAKEARKSVFWATTWIGYFYVLIFIIGFGAITLVLTNPELADVAKGVIKGGAGTANMAAVLVAKTVGGDVFYGFISAVAFATILAVVAGLTLSGASAVSHDLYATVFKNGNANSADELRVSRITTLVLGVIAVLLGIAFEKQNVAFMVSLAFAVAASANFPVLFLSMMWKGCTTRGAVIGGFLGLVSSVGLTIVSPSVWEATLGYPKGSAWFPYTSPALFSMTIGFVGVWLFSVLDTSLRAKAEKGAFAAQQVRSETGLGATRASSH

SEQ ID NO: 44536 - DNA, 1755 bp, Geobacter metallireducens GS-15
  CDS (1)..(1755): transl_table=11
atggtcaccatcccgatctttttgatcatcatcgccgtgaccatggccgtcgtcgtctggtcggccaagcggaccaagtcggctgccgacttctacaccgcgggcggcggcatcaccggcacccagaacggctgggccatcgccggcgactacatgtcggccgcctccttcctggggatttccggcatgatctccctctacggctatgacggcttcatgtactcggtgggatggctcgtggcctacatcacggtgctcctcatcgtggccgagccgtgccgcaacgccggcaagtacaccctgggggacatcctctccttccgtaccgagccgaaagtggtccgggccgtctgcgccctctccgtcgtggccgtctccaccttctatctcaccgcccagatggtcggcgccgggaaactcatgcagctgctgatcggcatcccctacaagttcgccatcatcggcgtcggcatcctcatggtcggctacgtcgtcttcggtggcatgaccgccaccacctgggtccagatcatcaaggccggcctcctcatgaccggtgcattcgttctctccatcctcgtgggcatcaagtcgggcatgaacccgttccagttcttcaacgacatcgccaccagccccaacatcatcgagcacgtgcagaaggtggtcctgaaggatcccgtggccgtggccggcttcgactacgggcagcggttccttgaaccgggtctcttcatgaagaatcctcttgaccagatatccctcggcatggccctcgtgctcggcactgctggcatgccccacatcctgatgcgcttcttcaccgtgccgaccgcccaggcagcccgcaagtccgttatcgttgccatgttcatcatcggcttcttctacatcctgacgacgctcctcggcttcggcgccgccatccacgtgaccccgcaagggatctccgccgtggataaaggcggaaacatggccgccatgatgcttgcccagaagctgggcggcgacatctccccgttcctgggcgacctgctcctggccttcctctgcgccgttgccttcgccaccatcctcgccgtcgtgtcgggcctcgttctggctgcctccgccgccatcgcccacgacatctacgtgaacgttatcaaggacggccacgccgaccagcatgagcaggtcatggccgcccggatcacctccctctgcgtcggcgccgccggcatcctgatcggcatcgccgccgagaagcagaacgtcgcccacctggtggccctggcctttgccgttgcctcctcgggcaacctgccggtcgtcgtcatgtccctcttctggcgcaagttcaacaccgccggcgtcgtgtcgggcctcgtggtcggcaccatcgcctcaatcgccctggtgatggtctcccccaacatgacctatccgaagaaggttgccgccgacgccaagaaggtggtcgtgaagcttgaagagaagcaagccaccggcgcgctcctctccgataaggaaatgaaggatctcgacaaggccaagaaggattacgaaaccaacaaggacggcaagtccttcatcggcctcgacaagcccctcatcgacctgaagaacccaggcatcatctctatcccgctcggcttcatcgccgccatcatcggctgcctcgccttcccgagccgccgctccgaggagatgttcgacgagatctacgtccgccagaacaccggcatcggcatggccaaggccatcgaccactag

SEQ ID NO: 44537 - protein, 584 aa, Geobacter metallireducens GS-15
MVTIPIFLIIIAVTMAVVVWSAKRTKSAADFYTAGGGITGTQNGWAIAGDYMSAASFLGISGMISLYGYDGFMYSVGWLVAYITVLLIVAEPCRNAGKYTLGDILSFRTEPKVVRAVCALSVVAVSTFYLTAQMVGAGKLMQLLIGIPYKFAIIGVGILMVGYVVFGGMTATTWVQIIKAGLLMTGAFVLSILVGIKSGMNPFQFFNDIATSPNIIEHVQKVVLKDPVAVAGFDYGQRFLEPGLFMKNPLDQISLGMALVLGTAGMPHILMRFFTVPTAQAARKSVIVAMFIIGFFYILTTLLGFGAAIHVTPQGISAVDKGGNMAAMMLAQKLGGDISPFLGDLLLAFLCAVAFATILAVVSGLVLAASAAIAHDIYVNVIKDGHADQHEQVMAARITSLCVGAAGILIGIAAEKQNVAHLVALAFAVASSGNLPVVVMSLFWRKFNTAGVVSGLVVGTIASIALVMVSPNMTYPKKVAADAKKVVVKLEEKQATGALLSDKEMKDLDKAKKDYETNKDGKSFIGLDKPLIDLKNPGIISIPLGFIAAIIGCLAFPSRRSEEMFDEIYVRQNTGIGMAKAIDH

SEQ ID NO: 44538 - DNA, 1680 bp, Rhodospirillum rubrum ATCC 11170
  CDS (1)..(1680): transl_table=11
atggatcgtttgcgccattcccgagcggcggccgccgcctttcttgcccctctcgcctttccggccctcgccctcgccgcgcccgccgtggaaggcccggtggaaaagcaggcggtgaacgtaaccgccatcgccatgttcgtggctttcgtcatcggcacgcttttcatcacctattgggcggcgcgccgcaccaaatcggccaaagacttctatgccgccggcggcggcatcaccggcttccagaacggcctcgccatcgccggcgactacatgtcggcggcctcgttcctcggcatcgccggtctggtgttcacctcgggcttcgacgggctgatctattcgatcggcttcctggtgggctggccggtgatcatgttcctggtggccgaacgcctgcgcaaccttggcaaatacaccttcgccgacgtcgcctcgttccgcttgggccagggaccgatccgctcgatggcggcttcgggcacgctggtcgtggtcatcttgtacctgatcgcccagatggtcggcgccggcaagctgatcgaactgctgttcggcctggattactccaccgccgtggtgctggtcggtgtgctgatggtctcctatgtgatgttcggcggcatgctggccaccacctgggtgcagatcatcaaggccgtgctgctgctctcgggcgcctcgttcatggccatcatggttttggtgtctttcggcttctcgcccgaggccctgttcgccaaggccgtcgaggtccacgccaagaagaccctgttgatggccccgggcggtttggtgtccgatccgatcgacgccatttcgctgggtatcgccctgatgttcggcaccgccggccttccccacatcctgatgcgcttcttcacggtgtccgacgccaaggaagcccgtaaatcggtgttctatgccaccggcttcatcggctacttctatatcctgaccttcatcatcggcttcggcgccatcgtcatggtgctgaaccagcccgaattcatggcggccgacggcaagggtatcgccggcggatccaacatggcggccatccatctcgcccatgccgtgggcggcaacatcttcctcggcttcatttcggccgtggccttcgccaccatcctggccgtggtgtcggggctgaccctgtcgggcgcctcggcggtgtcccacgacctttacgcctcggtctggcgcaagggccgggtctcggaacgcgacgaaatccgcgtctccaagatcaccaccgtcggcctgggcgtcgtcgccatccttcttggcatcgcctttgaaagccagaacatcgccttcatggtcggattggccttcgccatcgccgcctcggccaacttcccgatcctgttcatgtcgatgttctggaaaggcctgaccacgcggggcgctttcattggcggcttcgccgggctgatcagcgccacggtgctggtgatccttggtccgccgatctggaagaccgtgctcggccaccccgaagcgatcttcccctattccaacccggcgatcttctcgatgccgctggccttcctggtgacgtggctggtgtccaaggccgactcgtcgatgggcagccggtcggaagccatcgccttcgaagatcaatacgtgcgctcgcagaccggcctgggcgccgaaggcgcggccgaccactaa

SEQ ID NO: 44539 - protein, 559 aa, Rhodospirillum rubrum ATCC 11170
MDRLRHSRAAAAAFLAPLAFPALALAAPAVEGPVEKQAVNVTAIAMFVAFVIGTLFITYWAARRTKSAKDFYAAGGGITGFQNGLAIAGDYMSAASFLGIAGLVFTSGFDGLIYSIGFLVGWPVIMFLVAERLRNLGKYTFADVASFRLGQGPIRSMAASGTLVVVILYLIAQMVGAGKLIELLFGLDYSTAVVLVGVLMVSYVMFGGMLATTWVQIIKAVLLLSGASFMAIMVLVSFGFSPEALFAKAVEVHAKKTLLMAPGGLVSDPIDAISLGIALMFGTAGLPHILMRFFTVSDAKEARKSVFYATGFIGYFYILTFIIGFGAIVMVLNQPEFMAADGKGIAGGSNMAAIHLAHAVGGNIFLGFISAVAFATILAVVSGLTLSGASAVSHDLYASVWRKGRVSERDEIRVSKITTVGLGVVAILLGIAFESQNIAFMVGLAFAIAASANFPILFMSMFWKGLTTRGAFIGGFAGLISATVLVILGPPIWKTVLGHPEAIFPYSNPAIFSMPLAFLVTWLVSKADSSMGSRSEAIAFEDQYVRSQTGLGAEGAADH

SEQ ID NO: 44540 - DNA, 1716 bp, Burkholderia thailandensis E264
  CDS (1)..(1716): transl_table=11
atgctgcgtcaatcgatcgcgcgcgccgcgcgtctcatgccggccgcgctctttgcgtgcgcggcgcttgcttgcgcgcccgcgcacgcgatgggcgtcgccgccgcgccgatgcccgacaaggtcgcgctgaaccccgtggcgatcggcatgttcttcgtcttcgtgttcgcgacgctcgcgctcacgcgctgggccgcgcgccgcacccgcagcgcgcgcgacttctacacggcgggcggcggcatcaccggcctgcagaacggcctggcgatcgcgggcgactacatgtccgccgcgtcgtttctcggcttgtcgggcatggtgttcatgttcggcttcgacgggctcatctactcgatcggctttctcgtcggctggccgttcgtgatgttcctgatcgccgagccgctgcgcaatctcggcaagttcacgttcgtcgacgtcgtcgcgtaccgcttcgcgcagcggccgatccggcttctcacgtccgcgaacgcgctgacgatcgtcgtgctgtacctcgtcgtgcagatggtcggcgcgggcaagctgatccagttgctgttcgggctgtcgtacggcaccgcggagctgatcgtcggcgcgctgatggtcgtctacgtattcttcggcggaatgaccgcgacgacctgggtgcagatgatcaaggccgtgctgctgctcgccggcgcgacgctgctcgccgcgctcgcgctcggcgagttcggcttcagcgttgacgagatgtttcgccgcgcggtggccgtgcatccgggcgcgctcggcatcatggggcccggcaagctgatccgcgatccggcgaacgcgctgtcgctcggcatcgcgctgatgttcggcaccgcgggctttccgcacatcctgatgcgcttcttcacggtgccgaatgcaaaggaggcgcgcaaatcggtgctgtacgcgacgggcttcatcggctacttctatctgctcacgttcgtgatcggcttctcggcgatcgtgctgctcgcgcagcacccggagttcttccgccacgacgcggcgggcgcgttcaacctgacgcgcgatctcgtcggcggctcgaacatggtcgcggtgaagctcgcgcaggcggtcggcggcaactggttctacggcttcatcgcggccgtcacgttcgcgacgatcctcgccgtcgtcgcgggcctgacgctcgccggcgcgacgacgatctcgcacgatctctacgcgcagatgtgggcgcgcggcaggccggacgagcggctcgagatgcgcatttcgcgcgcggcgacgctcgcgctctccgcggtcgcgatcggcctgtcgattctgttcgagcatgtgaacgtcgcgttcatggtcgggctcgtcgcggcggtggcggcgagcgcgaacttcccggtgctcgcgacgtcgatcttctggcgcgggatgacgacgcgcggcgcggtgctgggcggcgggctcggcctcgcgtcggccgtcgcgctcacgttgctgtcgaaatcggtatgggtcgacgtgctgcatcacgcgcacgcgccggtgttcctcgacaacccggcgctcgtgtcggtgccgctcgcgttcgcgggcatcgtgatcggctcgctgaccgatcgcagcgagcgcgcgcggcgcgagcgcgacgcgttcgcgcggcaggagttctacgcgcaaacgggcgtgctcgccgcgcaggccgccacgcactga

SEQ ID NO: 44541 - protein, 571 aa, Burkholderia thailandensis E264
MLRQSIARAARLMPAALFACAALACAPAHAMGVAAAPMPDKVALNPVAIGMFFVFVFATLALTRWAARRTRSARDFYTAGGGITGLQNGLAIAGDYMSAASFLGLSGMVFMFGFDGLIYSIGFLVGWPFVMFLIAEPLRNLGKFTFVDVVAYRFAQRPIRLLTSANALTIVVLYLVVQMVGAGKLIQLLFGLSYGTAELIVGALMVVYVFFGGMTATTWVQMIKAVLLLAGATLLAALALGEFGFSVDEMFRRAVAVHPGALGIMGPGKLIRDPANALSLGIALMFGTAGFPHILMRFFTVPNAKEARKSVLYATGFIGYFYLLTFVIGFSAIVLLAQHPEFFRHDAAGAFNLTRDLVGGSNMVAVKLAQAVGGNWFYGFIAAVTFATILAVVAGLTLAGATTISHDLYAQMWARGRPDERLEMRISRAATLALSAVAIGLSILFEHVNVAFMVGLVAAVAASANFPVLATSIFWRGMTTRGAVLGGGLGLASAVALTLLSKSVWVDVLHHAHAPVFLDNPALVSVPLAFAGIVIGSLTDRSERARRERDAFARQEFYAQTGVLAAQAATH

SEQ ID NO: 44542 - DNA, 1572 bp, Burkholderia xenovorans LB400
  CDS (1)..(1572): transl_table=11
atgaaaggaaacggaatcctgacaatggctgtgttcgccggtctcgtgctctgcatgttgttcatcattgcgcgcgcggcacgcaggaccaagacctcggcagactttctcgccgctggacgcagcatctcggcagcacaaaatggcctggcgatagctggcgactttatgtctgccggcacgttcctcggaaccacaggcctgatctatctgtatggatttgatggcacgctcatactcgtggccgcactcttcggcttcctgccgttactgctgattgccgagcgcctgcgcaatgccggcgcattcacgctcagcgagctgttgtcgaggcgctttcatgaccaggcgctgcgcggagtcaccgcgctcacatcacttgccgtgagcctgctctacctcgtcgcgcaactggtcggcgcgggcatcctgctgcaggctctgaccggtctgccgtacgcactggcagtggtgatcaccggcattctgatgacgatctatgtcgcatacggcggcatgctcggcgcctcctgggtcatgatcgtgaaggccatcatcctactgatcgttggcatcgcaatgtcgactgcgattcttgcgttgagcggctggaatatcggcgcgctgatgcagctcgcggctaacgggcataccaagggacttgcatatctgaagcctggtctgcttctgtcgcctagccatcccatcgataccctgtcgttcggtctcatttacatgcttggcacggcgggccttccgcacgtactgatccgcttctttaccgtgaaggacggcaatgccgcgcggcgctcgttgggctgggccgtagcggtgatgggcgcgtttttcctgatgatcgtcgtgctgggtatgggtgcccgcgctgtgctgcacggcaacgacgccaatgccgccgccgccgtaggcggcaacctcgtcgcgccgattctcgctggcgtacttgcaggtggcaacgggacggtgggcggcgcgctggcgatggcgtttatctccggcgtctgcttcctgacgattctcgcggtcgtgtcaggcctgctgatttccgcctccggcactgttgcgcacgacctctttgcgggcattatctggcgcaaccgccctgacgttgaacgtctggagcgcagaatggcgcgcctgtcctcggtactcgtcggaatcatcgcgacgctgttcagcatcgccgtcggaacgggcttcaacatcacgttcctgctcggactcgcgttcctcgtcgccgccagcgcgaacctccctgcactggtgtgcacactgttctggagacgattctctcggggtggcgcattcgccgggctcgccggcggcctcgtggtgtccattgccgtcatcctgctatcgccgatggtgatgggcaccgcagcgctgattccgctcaagtaccccggaatcatcagcatgccgctcggttttgtactgtgctggctcggcaccctattgcgcccggacaaggatgccgagacccgctacgccgtgttgcgcctccacaccgagatcggcctgggcgcacagagtgatgccgtagccggccactga

SEQ ID NO: 44543 - protein, 523 aa, Burkholderia xenovorans LB400
MKGNGILTMAVFAGLVLCMLFIIARAARRTKTSADFLAAGRSISAAQNGLAIAGDFMSAGTFLGTTGLIYLYGFDGTLILVAALFGFLPLLLIAERLRNAGAFTLSELLSRRFHDQALRGVTALTSLAVSLLYLVAQLVGAGILLQALTGLPYALAVVITGILMTIYVAYGGMLGASWVMIVKAIILLIVGIAMSTAILALSGWNIGALMQLAANGHTKGLAYLKPGLLLSPSHPIDTLSFGLIYMLGTAGLPHVLIRFFTVKDGNAARRSLGWAVAVMGAFFLMIVVLGMGARAVLHGNDANAAAAVGGNLVAPILAGVLAGGNGTVGGALAMAFISGVCFLTILAVVSGLLISASGTVAHDLFAGIIWRNRPDVERLERRMARLSSVLVGIIATLFSIAVGTGFNITFLLGLAFLVAASANLPALVCTLFWRRFSRGGAFAGLAGGLVVSIAVILLSPMVMGTAALIPLKYPGIISMPLGFVLCWLGTLLRPDKDAETRYAVLRLHTEIGLGAQSDAVAGH

SEQ ID NO: 44544 - DNA, 1662 bp, Ralstonia metallidurans CH34
  CDS (1)..(1662): transl_table=11
atgaaaacgcatcacgttatcgccgcaggcggcgcattgctgttgtcgacggccgcgctggccgcgggtggtgatcttggacaggccgtcaaacagcccaccaactggacggccatcggcatgttcgtcgtgttcgtcatcggcacgctgttcatcaccaaatgggcggccaagcggaccacgtccgcggcggcgttctatacgggcggtggtggcatcaccggcttccagaacggcctggccatcgctggcgactacatgtcggcagcatcgttcctcggcatttccgccgccgtgttcgcaaacggctacgacggcctgatctactcgatcggcttcctggtcggctggccaatcatcacgttcctgatggcggagcgcctgcgcaacctcggccgtttcacgtttgccgatgtggccgcctaccgcttcaagcagggcccgatccgcgcgttcgcggcgtcgggcacgctggtggtggtggcgttctacctgatcgcgcagatggtgggcgccgggcaactgatcaagctgctgttcgggctcgagtactggatcgcggtggtgatcgttggcgcgctgatgatggtgtacgtgctgttcggcggcatgacggcaaccacctgggtgcagatcatcaaggctggcctgctgctgggcggcgcatcattcatggccttcatggtcatggcgcagttccacttcagccccgaagcactgttcgccaaggccgttgaagtccatgccaagaaggacgcgatcatgggcccgggcacattcatcaaggacccgatttcggcgatctcattcggcatcgcgctgatgttcggcacggccggcctgccgcacgtcctgatgcgattcttcaccgtgcccaatgccaaggaagcgcgcaagtccgtgttctgggccaccacgtggatcggctacttctacatcctgacgttcatcatcggcttcggcgccatcgtgctggtgagcaccaacccgacgttccaggacggtagcggcaagctgctcggcggcctcaacatggcggccgttcacctggccactgcagtgggcggcaacgtgttcctcgggttcatctcggcggtggcgttcgcgacaatcctggccgtggtggccggcctcacgctggccggcgcgtcggcggtgtcgcacgacctgtactccacggtcttcatgcacggcaaggcaaccagttcgatggaactgcgcgtgtcgcgcatcaccacgatcatcctcggcatcatcgccgtggtgctcggcatcgtcttcgagaagcagaacatcgcgttcatggtgtcgctggcgttcgccgtggcggcatcggccaacttcccggtcctgttcatgtcggtgctgtggaagaactgcaccacgcgcggcgcgatggttggcggcttcctcggcctgctgtcagccgtgattctgacggtcctgtcccaggcggtgtgggtcgacgtgttccacttcaagaatgcgccattcccgtacacgtctccggcgctgttctcaatgacgatcggcttcgtcggcatctggttcttctcgatcaccgacaggtcaccccgggcacgtatcgaccgtgccggcttcgaggcacaggaactgcgttccgagaccggcatcggcgccgtcggggccgcaagccactga

SEQ ID NO: 44545 - protein, 553 aa, Ralstonia metallidurans CH34
MKTHHVIAAGGALLLSTAALAAGGDLGQAVKQPTNWTAIGMFVVFVIGTLFITKWAAKRTTSAAAFYTGGGGITGFQNGLAIAGDYMSAASFLGISAAVFANGYDGLIYSIGFLVGWPIITFLMAERLRNLGRFTFADVAAYRFKQGPIRAFAASGTLVVVAFYLIAQMVGAGQLIKLLFGLEYWIAVVIVGALMMVYVLFGGMTATTWVQIIKAGLLLGGASFMAFMVMAQFHFSPEALFAKAVEVHAKKDAIMGPGTFIKDPISAISFGIALMFGTAGLPHVLMRFFTVPNAKEARKSVFWATTWIGYFYILTFIIGFGAIVLVSTNPTFQDGSGKLLGGLNMAAVHLATAVGGNVFLGFISAVAFATILAVVAGLTLAGASAVSHDLYSTVFMHGKATSSMELRVSRITTIILGIIAVVLGIVFEKQNIAFMVSLAFAVAASANFPVLFMSVLWKNCTTRGAMVGGFLGLLSAVILTVLSQAVWVDVFHFKNAPFPYTSPALFSMTIGFVGIWFFSITDRSPRARIDRAGFEAQELRSETGIGAVGAASH

SEQ ID NO: 44546 - DNA, 1635 bp, Myxococcus xanthus DK 1622
  CDS (1)..(1635): transl_table=11
atgaaccccgcagaaacgacgacgcagctcggccagccgaacgcgacggccatcctgttcttcctcctcttcgtcggcgtcaccctggcgattacgtactgggcggcgcgcaagacgaagacgacctcggagttcttcgccgcgggcggcggcgtgagcgcggcgcagaacggcttcgcgctcgcgggcgactacatgagcgccgccagcttcctgggcatcgcgggcctggtggccacgtccggcttcgacgggctcatctactccgttggctggctggtgggttggccggtcgtgacgttcctcatcgccgagcccctgcgcaacctgggcaagtacaccttcgcggacgtggtggcctaccggctgaagcagacgccggtgcgcctgtccgcggcggtgggcacgctcaccgtggtcagcttctacctgattgcgcagatggtgggcgccggcaacctcatccacctgctgttcggcctgtcctatgaggcggcggtcgtcatcgtgggcgcggtgatgattctctacgtcctcttcggcgggatgattgccaccacgtgggtgcagatcgtcaaggcggtgctgctgctggcgggcgccacggggctcgcgggcatggtgctgtccaagttcggcttcagcccactgcggctcttcaacgaggccgccacccaatacggcgcggaggtgctggcacccgggaagctggtgaacaacccgctggaggccatctccctgggcgtggcgctgatgttcggcaccgcgggcctgccgcacatcctgatgcgcttctacacggtgccggacgcgaaggcggcgcgcagcagcgtcttctacgccacggggctcatcggctacttctacctggtgacgttcatcctgggcttcggcgcgtccgtgctggtgggccgtcaggcgattaccggcgtggacaagggcggcaacatggcggcgcccatgctcgccgaagtcgtgggtggcacgggcttcctgggcttcatctccgccgtcgccttcgccacgattctggcggtggtggccggcctgacgctgtccggcgcggcggcgctgtcccatgacttgtggtccagcgtggtgcgcaaggggcaggcccccgaggcggagcagctcaaggtggcccggctggccagcctcttcctgggcgtcctggccatcatcctgggcgtggccttcaaggggcagaacgtggccttcatggtgggtctggccttcgccatcgcggcgagcgccaacttcccggcgctgctcctgtccatggcctggaagaagttcaccacgaatggcgcggtggccagcatgctgacgggcgccatcagctcggtgctcttcatcttcctgtcccccacggtgcaggtggacctcctgggcaacacgtccgcgctgttccccctgcgcaacccgggcgtcatcaccattcccctggccttcatcgtgggcgcggcggtgtcgctgctcttccccgagcacgagtccgccgcccgcttcgccgaagtgaagcaccggatgcacgtgggggtgccccagccggcccccgcggtggccaccgtggcatcgaagcccgcggatgagccgtcccgccccgccgccacgggcagcgaggccaaggcctga

SEQ ID NO: 44547 - protein, 544 aa, Myxococcus xanthus DK 1622
MNPAETTTQLGQPNATAILFFLLFVGVTLAITYWAARKTKTTSEFFAAGGGVSAAQNGFALAGDYMSAASFLGIAGLVATSGFDGLIYSVGWLVGWPVVTFLIAEPLRNLGKYTFADVVAYRLKQTPVRLSAAVGTLTVVSFYLIAQMVGAGNLIHLLFGLSYEAAVVIVGAVMILYVLFGGMIATTWVQIVKAVLLLAGATGLAGMVLSKFGFSPLRLFNEAATQYGAEVLAPGKLVNNPLEAISLGVALMFGTAGLPHILMRFYTVPDAKAARSSVFYATGLIGYFYLVTFILGFGASVLVGRQAITGVDKGGNMAAPMLAEVVGGTGFLGFISAVAFATILAVVAGLTLSGAAALSHDLWSSVVRKGQAPEAEQLKVARLASLFLGVLAIILGVAFKGQNVAFMVGLAFAIAASANFPALLLSMAWKKFTTNGAVASMLTGAISSVLFIFLSPTVQVDLLGNTSALFPLRNPGVITIPLAFIVGAAVSLLFPEHESAARFAEVKHRMHVGVPQPAPAVATVASKPADEPSRPAATGSEAKA

SEQ ID NO: 44548 - DNA, 1626 bp, Mycobacterium sp. MCS
  CDS (1)..(1626): transl_table=11
gtgaccgtgctcgccgccgagaccatcggcaaccccgtcgccaacatgtcgatcttcgccctgttcgtcctggtgacgctcttcatcgtcatcaaggcgagtaagaagaacgccaccgccaccgagttcttcaccgcgggccgcgccttcaccggtccgcagaacggcatcgcgatcagcggtgactacctgtcggccgcgagcttcctcggcatcgccggcgccatcgccgtctacggctacgacgggttcctgtactcgatcggattcctggtcgcctggctggtggcgctgctgctggtcgccgaactgctgcgcaacacgggaaaattcaccatggccgacgtgctgagcttccggctcaaacaacgtccggtgcggttggccgcggccaccaacaccctggcggtgtcgttgttctacctgctcgcccagatggccggcgccggcgtgctggtcgcactgctgctcaacatcgaaagcgacctcggacagtcgatcgtgatcgccgtcgtgggcgtgctgatgatcgtctacgtcctggtcggcgggatgaagggcaccacctgggtgcagatcatcaaggcggtcctgctgatcggcggcgcggggatcatgacgatcatggtgctggcgaagttcaacttcaacttctccgagatcctcggcagcgcacaggcgatggtgagcagcagcgaggacgccaaggtcgcctcgcgcgacgtgcttgcccccggcgcgcagtacggcgcgtcgctgaccacgcagatcaacttcatctcgctggcgctggccctggtgctcggcaccgccggcctgccgcacgtgctgatgcgcttctacacggtgcccaccgccaaggaggcccgccggtcggtggtctgggcgatcgcgctcatcggcgcgttctacctgttcaccctggccctgggttacggcgccgcggccctggtcggacccgaccgcatcctggccgcccccggtggcgtgaattccgctgcgccgcaactggcgttcgaactcggcggcgtagtgctgctgggcgtcatctccgcggtggcgttcgcgacgatcctcgcggtcgtcgccggtctgaccatcaccgcgtcggcgtccttcgcgcacgacatctacgccagcgtgatgaagagccatcaggtcaccgagagcgagcaggtcaagatctcgcggatcaccgcggtggtgctgggcacgctggcgatcgggttgggcatcctggcccgcgagcagaacgtcgcgttcctggtggcgctcgcgttcgcggtggccgccgcggcgaatctgccgaccatcctctactcgctgtactggcggcgtttcaacacccgcggtgcgctgtggagcatgtacggcgggttgatctcgacgatcgtgctgatcgtattctcgcccgcggtctcgggcacggcgacctcgatgatcaagggcgccgacttcgcctggttcccgctggccaacccgggcatcgtgtcgatcccgctggcgttcatcctcggcatcgtcggcaccctgacctcaccagacgacgaggatccgacgatcgccgccgagatggaggtgcgctcgctgaccggggtgggtgcggaaaaggccgtctcgcactga

SEQ ID NO: 44549 - protein, 541 aa, Mycobacterium sp. MCS
MTVLAAETIGNPVANMSIFALFVLVTLFIVIKASKKNATATEFFTAGRAFTGPQNGIAISGDYLSAASFLGIAGAIAVYGYDGFLYSIGFLVAWLVALLLVAELLRNTGKFTMADVLSFRLKQRPVRLAAATNTLAVSLFYLLAQMAGAGVLVALLLNIESDLGQSIVIAVVGVLMIVYVLVGGMKGTTWVQIIKAVLLIGGAGIMTIMVLAKFNFNFSEILGSAQAMVSSSEDAKVASRDVLAPGAQYGASLTTQINFISLALALVLGTAGLPHVLMRFYTVPTAKEARRSVVWAIALIGAFYLFTLALGYGAAALVGPDRILAAPGGVNSAAPQLAFELGGVVLLGVISAVAFATILAVVAGLTITASASFAHDIYASVMKSHQVTESEQVKISRITAVVLGTLAIGLGILAREQNVAFLVALAFAVAAAANLPTILYSLYWRRFNTRGALWSMYGGLISTIVLIVFSPAVSGTATSMIKGADFAWFPLANPGIVSIPLAFILGIVGTLTSPDDEDPTIAAEMEVRSLTGVGAEKAVSH

SEQ ID NO: 44550 - DNA, 1575 bp, Rubrobacter xylanophilus DSM 9941
  CDS (1)..(1575): transl_table=11
atgagcgaccgggcgatagcgaccatcttcttcgtcctcatcatagtgctcaccctcgggataaccgcctgggccgcccgccgcaacaaggacaccgcccaccactacgtcgccggcggcgagataaagggctggcagaacgggctcgccatctccggcgactacctctcggcggccagctttctcgggatagccggttcgatcgcgttgacggggttctccggcttctacctctcgatcggattcctggttgcttatctggtggtgctgctgctcgtcgccgagcccctgaggaacctcggcaagtacaccttcgccgacatgctagcggcccgcttcaacctgcgcagcgtccgttcggcggcggcgctctccaccatcgccataagcaccttctacatgatcgcccagatggtgggcgctggggcgctcatagagcttctgctcgggctcccctacgtggcctcggtcgtgatcatcggggtgctgatgaccatctacatcgcggccgggggcatggtggcgaccacctggatccagatcgtcaaggcggtcctgctgatctccggaacccttgccctgagcatcgccgtgctcgcccagttcggcttcaacccggtggccatcttcgaccgggtagaggcagagctggggccggagatggtcctcccgccgcccccggagggcttcgtctccggcatagacgtcgtctcgctcaacatcgcgctcgtcttcggcaccgccgggctgccgcacatcctcatgcggttcctcaccgtcccggacgccaagacggcccgcaactccatcatcgtcgccacctggatcatagggctcttctacctgatgaccccgatcatgggctacggcgcggccctgctggtgggccaggacgtcatcgccgagcagaaccccgccggcaacaccgcggccccgcagctcgccggagagctcggcggccccatcttcctggcctttatctcggcggtggccttcgccaccatcgtggcggtggtggccgggctcgtgatcgcggcctccagcgccttcgcccacgacttctacaccaacgtcatccggggcggcgaggcgagcgagcaggagcagttccgcgcggcccgcatcgcggccgtcgccgtctccctgggcgcgatgttcctcgccatcttcgcccgcgacttcaacgtctcgttcttggtcgccctggcctttgcggtcgccgccagcgccaacgttccgaccatcctgttcacgatcttctggcgcaggttcaacacggcgggcgccatcgcgggcatcctcacggggctgttctcgtgcatcgtcctgatcattctcagccccaacatcctcgacgtcttcccgctggccaacccggcgatcatctccatgccgctgggcttcgccgcctgctacctgggcacgatcctcaccggcgaggccgcggagcgcgagatggccgagggcaagcagatctcctacgacgagatctacgtccgcgccaacaccggcataacccgcgtggaggaggagctgcgcgaggccgcagcggccgaggagccgcggaccacctag

SEQ ID NO: 44551 - protein, 524 aa, Rubrobacter xylanophilus DSM 9941
MSDRAIATIFFVLIIVLTLGITAWAARRNKDTAHHYVAGGEIKGWQNGLAISGDYLSAASFLGIAGSIALTGFSGFYLSIGFLVAYLVVLLLVAEPLRNLGKYTFADMLAARFNLRSVRSAAALSTIAISTFYMIAQMVGAGALIELLLGLPYVASVVIIGVLMTIYIAAGGMVATTWIQIVKAVLLISGTLALSIAVLAQFGFNPVAIFDRVEAELGPEMVLPPPPEGFVSGIDVVSLNIALVFGTAGLPHILMRFLTVPDAKTARNSIIVATWIIGLFYLMTPIMGYGAALLVGQDVIAEQNPAGNTAAPQLAGELGGPIFLAFISAVAFATIVAVVAGLVIAASSAFAHDFYTNVIRGGEASEQEQFRAARIAAVAVSLGAMFLAIFARDFNVSFLVALAFAVAASANVPTILFTIFWRRFNTAGAIAGILTGLFSCIVLIILSPNILDVFPLANPAIISMPLGFAACYLGTILTGEAAEREMAEGKQISYDEIYVRANTGITRVEEELREAAAAEEPRTT

SEQ ID NO: 44552 - DNA, 1605 bp, Rhodococcus sp. RHA1
  CDS (1)..(1605): transl_table=11
atgaccggcgacgccgatttcctcgccatcggcatctgcgctgccgttatctcactcacgctgtgggtgaccttcgccgcatcgcgccgaagccggagcgccaccgggttcttcgctgcgggacgctcgatcaccggctggcagaacggtttcgcgatcgccggcgaattcatttccgccggtagcttcctgggcaccaccggcttgatcttctacaagggcgtcgacggcgccgtcattctgtgcacgtccgtggtctccttcctccccgtcctcttcctcctcgccgagaagatgcggaacgtcggaaagttcacgctcgcggatgttctggtgttccggaccggcgcacgacgcgtccgggtggtggttgcgctcagcaccatcgtcaccggcacgttcgtgctgctcgcccagctcgtggcggcgggtgtcctgctcgagtccgtctcggggatcccgttcgggctctccgtcgtggtggccggatcactcatgggcatctacgtcttcgtcggcggaatgctggcgaccacgtgggttcaggtgatcaagtcgtccatcctgtcgatcctggcgatcgtggtgtgcctcgggatcctcgcgaagtttggcttcagcgtgcccggcatgctcggggcggcaacctcgaacgcggcagccggagacgcgatcctctcgccgggtctgatcttcgggcagaccggtgcgatcaacctgatctcgtactccctggcgttcgcgctcggcacggccggtatggcacacatcctgattcgcttcttcaccgtccccgaggccgcgacggcccggaagtcactgggctggaccgtcgcactgtgcagcatcttctatctgatcgtcatcgtcatgggcttcggcaccgccgcgcttctcggtcccgacggggcggatcgtgtcggcgccggcggcaatctcgcggcacccacgctggtcacggaactgggcggaggcgtcggcaccatcggtggttcgatagcgctggccatggtggctgccgtcgcgttcgcgagcatcgtcgccgtcgtcgcgggcgtcgtgatctcggctgcgggaacgttcgcccacgacgtgtggcccaccctcacccgccggaagtcggccgacgccggcacggagactgcggatgcccgcgaggcgaagatcgcccggtatgcggcggtcgcgttcagcgtcgtcgcgatcggactgacgatggcgatcggcgacactacaaatatcacctacttcatgggtatggccttcatggtcgccggcagtgcgcacctgcccagcctgctgctcagcctcaactggcggcggttcaacagcacaggcgccgtgtggggcatctcggtcggattggcatccaccgtggtcagcctgatgttcacggaggcgctctggctcggtagtggtccggcgccgctgaccattcagttgccggtgatcatcacgatgccgctcgggttggccgccgctgtgatcggctcactcgccggcgaacgctttcacggacgttcggtggatcgagacgagaagttcgccgagatgctggttcgagccgagaccggtatcggcgcggaactcgccgagacgcactag

SEQ ID NO: 44553 - protein, 534 aa, Rhodococcus sp. RHA1
MTGDADFLAIGICAAVISLTLWVTFAASRRSRSATGFFAAGRSITGWQNGFAIAGEFISAGSFLGTTGLIFYKGVDGAVILCTSVVSFLPVLFLLAEKMRNVGKFTLADVLVFRTGARRVRVVVALSTIVTGTFVLLAQLVAAGVLLESVSGIPFGLSVVVAGSLMGIYVFVGGMLATTWVQVIKSSILSILAIVVCLGILAKFGFSVPGMLGAATSNAAAGDAILSPGLIFGQTGAINLISYSLAFALGTAGMAHILIRFFTVPEAATARKSLGWTVALCSIFYLIVIVMGFGTAALLGPDGADRVGAGGNLAAPTLVTELGGGVGTIGGSIALAMVAAVAFASIVAVVAGVVISAAGTFAHDVWPTLTRRKSADAGTETADAREAKIARYAAVAFSVVAIGLTMAIGDTTNITYFMGMAFMVAGSAHLPSLLLSLNWRRFNSTGAVWGISVGLASTVVSLMFTEALWLGSGPAPLTIQLPVIITMPLGLAAAVIGSLAGERFHGRSVDRDEKFAEMLVRAETGIGAELAETH

SEQ ID NO: 44554 - DNA, 1635 bp, Rhodococcus sp. RHA1
  CDS (1)..(1635): transl_table=11
gtgatcaccacgctcgcagtcggcaccgacgtcggcaacccgctcctcaacatcgccatcttcgtggcattcgtcgtgatcacgatgaccatcgtgatccgggcgagccgcaccaccaagaaggcctcggacttctacaccggcggcggtcagttctccggaccgcagaacggtttcgccatcgccggcgactacctgtcggccgcctcgttcctcggcatcgccggcgccatcgccgtctacggctacgacggattcctgtactcggtcggcttcctcgtcgcctggctggtggccctgctgcttgtcgcggaactgctccgtaacaccggccggttcacgatggcggacgtgctgagcttccgcctcaagcagcgtcccgtgcggatggccgcggcgctgtccacgctggtggtctcgctgttctacctgctcgcgcagatggcaggagccggcggactcgtcgccctgctgttgaacatcgacggcaaggtcggtcagggcgtcgtcgtcgcggtcgtcggcgtgttgatgatcgtgtacgtgctcgtcggcggcatgaagggcaccacctacgtgcagatggtcaaggcggtcctgctggtcgccggtgcgggcatcatgttcttcctcgtgctgttcgcggtgcgcggcaacttctcccagctgctcgccgacgcccaggcgacggtcagcacttccacgaacgaggccatcgcgggccgcgacatcctcgctcccggcgccaagtacggcatcagctcgatgagcaagctcgacttcatctcgctcggcatcgcactcgtcctcggcacggcgggcctgccgcacgtgctgatgcggttctacaccgtccccaccgccaaggaagcccgccgctcggtcacctgggcgatcggactgatcggcgcgttctacctgttcacgctcgtcctcggctacggtgccgccaagatggtcggccccgacgtcatcctcgcagcacccggcaaggagaacgcggcggcgccgctgctcgcgttcgaactgggcggcaccatcttcctggcgatcatctccgcggtcgcgttcgcaacgatcctcgcggtcgtggcggggctggcgatcacggcgtccgcgtcgttcgcccacgacatctacgccagcgtcatcaagcgcggacacgcgtcggaggagtcccaggtgcgggtttcccggatcaccgtcgtcgtgatcggtctcgtgtcgatcgtcctcggcatcttggccatgggccagaacatcgcgttcctggtggcgctcgccttcgcggtggccgcctcggccaacctgccgacgctgctgtactcgctgttctggaagaagttcaacaccaccggcgccctgttcagcatctacggcggcctcgtcagctgcctccttctgatcgcgttctccccggccgtgtccggcaagccgtcgtcgatgttcccgaacgccgacttcgactacttcccgctcgccaacccgggcatcgtctccatcccgctggcgttcgttctcggcatcgtcggcacctatatcggccgcggcaaggcggaggatcccgccaagcaggccgagatggaggtccgctctctcaccggtgtcggtgtggagaaggccgtctcccactga

SEQ ID NO: 44555 - protein, 544 aa, Rhodococcus sp. RHA1
MITTLAVGTDVGNPLLNIAIFVAFVVITMTIVIRASRTTKKASDFYTGGGQFSGPQNGFAIAGDYLSAASFLGIAGAIAVYGYDGFLYSVGFLVAWLVALLLVAELLRNTGRFTMADVLSFRLKQRPVRMAAALSTLVVSLFYLLAQMAGAGGLVALLLNIDGKVGQGVVVAVVGVLMIVYVLVGGMKGTTYVQMVKAVLLVAGAGIMFFLVLFAVRGNFSQLLADAQATVSTSTNEAIAGRDILAPGAKYGISSMSKLDFISLGIALVLGTAGLPHVLMRFYTVPTAKEARRSVTWAIGLIGAFYLFTLVLGYGAAKMVGPDVILAAPGKENAAAPLLAFELGGTIFLAIISAVAFATILAVVAGLAITASASFAHDIYASVIKRGHASEESQVRVSRITVVVIGLVSIVLGILAMGQNIAFLVALAFAVAASANLPTLLYSLFWKKFNTTGALFSIYGGLVSCLLLIAFSPAVSGKPSSMFPNADFDYFPLANPGIVSIPLAFVLGIVGTYIGRGKAEDPAKQAEMEVRSLTGVGVEKAVSH

SEQ ID NO: 44556 - DNA, 1656 bp, Pseudomonas aeruginosa UCBPP-PA14
  CDS (1)..(1656): transl_table=11
atgatcgctcgtctccttgccgcgctcggccttgcggccttcgctccggccctctgggccgacgcgctgaccggcgacgtgcagcgccagccgctgaacgtctcggccatcgtcatgttcgtcgccttcgtcggcgcgaccctctgcatcacctactgggcatccaagcgcaaccgctcggcggccgactactatgccgcaggcggccgcatcaccggcttccagaatggcctggcgatcgccggcgactacatgtcggcggcatccttcctgggtatttcggcgctggtcttcacttccggctacgacggcctgatctactcgatcggcttcctggtcggctggccgatcatcctcttcctcatcgccgagcgcctgcgcaacctgggcaagtacaccttcgccgacgtcgcctcctaccgcctcaagcagaagcagatccgcaccctgtcggcctgcggctcgctggtggtggtggcgttctacctgatcgcgcagatggtcggcgccggcaagctgatcgagctgctgttcggcctcaactaccatgtcgcggtggtcctggtgggcatcctgatggtgctctacgtgctgttcggcggcatgctggcgaccacctgggtgcagatcatcaaggccgtgctgttgctctccggcgcctcgttcatggcgatcatggtgctcaagcacgtcaacttcgacgtcagcacgctgttctccgaagccatcaaggtgcatccgaagggcgaggcgatcatgagtccgggcggcctggtcaaggatccgatctcggcattctccctgggcttcgcgctgatgttcggcaccgccgggctgccgcacatcctgatgcgcttcttcaccgtcagtgacgccaaggaagcgcgcaagagcgtgttctacgccaccggtttcatcggctacttctacatcctgaccttcatcatcggtttcggcgcgatcctgctggtcagcaccaacccggacttcaaggacgccaccggcgccctgatcggcggcaacaacatggcggcggtgcacctggccgacgcggtgggcggcagcctgttcctcggcttcatctcggcggtggccttcgccaccatcctcgcggtggtcgccgggctgaccctggccggggcctcggccgtctcccatgacctgtacgccagcgtgttcaagggcggcaaggccaacgagaaggacgagctgcgggtctcgaagatgaccaccgtggccctgggcgtggtcgccatcgtgctcggcatcctcttcgagaagcagaacatcgccttcatggtcggcctggccttctccatcgccgccagctgcaacttcccggtgctgctgctctccatgtactggaagaagctgaccacccgcggcgccatgatcggcggctggatgggcctgatcaccgcggtgggcctgatggtcctcggcccgaccatctgggtgcagatcctcggccacgagaaagccatctacccgtacgagtacccggcgctgttctcgatgatcgtcgccttcgtcggtatctggttcttctccatcaccgacaagtcggcggcggccgacgaggagcgggcgcgcttcttcccgcagttcatccgttcccagaccggcctgggcgcctctggcgcggtggcccactaa

SEQ ID NO: 44557 - protein, 551 aa, Pseudomonas aeruginosa UCBPP-PA14
MIARLLAALGLAAFAPALWADALTGDVQRQPLNVSAIVMFVAFVGATLCITYWASKRNRSAADYYAAGGRITGFQNGLAIAGDYMSAASFLGISALVFTSGYDGLIYSIGFLVGWPIILFLIAERLRNLGKYTFADVASYRLKQKQIRTLSACGSLVVVAFYLIAQMVGAGKLIELLFGLNYHVAVVLVGILMVLYVLFGGMLATTWVQIIKAVLLLSGASFMAIMVLKHVNFDVSTLFSEAIKVHPKGEAIMSPGGLVKDPISAFSLGFALMFGTAGLPHILMRFFTVSDAKEARKSVFYATGFIGYFYILTFIIGFGAILLVSTNPDFKDATGALIGGNNMAAVHLADAVGGSLFLGFISAVAFATILAVVAGLTLAGASAVSHDLYASVFKGGKANEKDELRVSKMTTVALGVVAIVLGILFEKQNIAFMVGLAFSIAASCNFPVLLLSMYWKKLTTRGAMIGGWMGLITAVGLMVLGPTIWVQILGHEKAIYPYEYPALFSMIVAFVGIWFFSITDKSAAADEERARFFPQFIRSQTGLGASGAVAH

SEQ ID NO: 44558 - DNA, 1659 bp, Pseudomonas aeruginosa UCBPP-PA14
  CDS (1)..(1659): transl_table=11
atgaagaagctccttcccctggcgttgtcgctgcactccggcctgctgtcggcctcgcccgcgttggacgctggccagcgccagccgctcaacctgcatgccatcggcatgttcatggtgttcgtgctgttcaccctgtgcatcacctggtgggcggcgcgacggacccattcgacggcggatttctatagcgccggtggcggtatccggggctggcagaacggcctggcgctggccggcgactacatgtccgcctccacgctactgggaatcaccgcgctcatctacagctccgggatggatggctacatctatctcatcgccttcttcgcgggctggccggtactgctgctattgatgaccgagcggctgcgcaacctgggccgcttcaccttcgccgacatcacctcgtaccgtctcgaccagggcaaggtgcgcaccatggccgccatcggatcgctgaccgtggtgtgtttctacctggtggcgcagatggtcggggccgggcagttgatcaggctgctgttcggcctggactaccagatcgccctggtgatcgtcggtgcgctgatgatgctgtatgtgaccttcggcggtatggtggcaaccacctgggtgcagatcgtcaaggcattcctgctgctggtcggcggctcgctggtgctgttcctggcgatgcgcgaattcgacttcagctatgacaggctggtcagccaggcgatggatagccatgccctgggcgaacgcctgctggcccctggtggcttgctggccgacccgttgaccgcgctatcgctgagcctggggctggtgttcggcaccgccgggctgccgcacatcctgatgcgtttcttcaccgtcggcgatgcccgggaggcgcgcaagtcggtgctctacgccaccgggttcatcggctacttcttcaatgtcattttcctgctgggcctggcgtcgatcgtgatcgtcagccagcagccccggttcttcgagggcggggaagcgggaggcaagctgctgggcgggggcaacatggtggtcatgcacctggcccaggcagtgggaggcaacctgctgctgggcttcctctccgccgtgaccttcgccaccatcctggccgtggtgtcaggcctggccctggccggggcgtccgctatcgcccatgacctgtatgcgcgggtgatcatgaagggcgcggccagcgaggcgcaggagctgcgggtaaccaagctggcaaccctgggccttggcttggtggcgatagccctgggcatcgtgttcgagaacatcaacgtggccttcatggtcgccctggcctttggcatcgccgcttcggccaacttcccggtgctgttcctgtcgatgttctggtcggggctgaccacccgtggcgcgttggccggtggctacgtcgggttgttcagcgccatgggcttcgtggttttctccaggctggtgtgggtggatgtgttgcacttcgccgagccgctgttcccctatacccagcctgcgctgttctccatgccgttggcgttcctggtggcgtatggcgtttcccgcctggaccggaccacgcgggccatggcggaaagggcagccttcgccgaccagtacgtacgaggccagaccggccttggtgccagcggagccatagaccactga

SEQ ID NO: 44559 - protein, 552 aa, Pseudomonas aeruginosa UCBPP-PA14
MKKLLPLALSLHSGLLSASPALDAGQRQPLNLHAIGMFMVFVLFTLCITWWAARRTHSTADFYSAGGGIRGWQNGLALAGDYMSASTLLGITALIYSSGMDGYIYLIAFFAGWPVLLLLMTERLRNLGRFTFADITSYRLDQGKVRTMAAIGSLTVVCFYLVAQMVGAGQLIRLLFGLDYQIALVIVGALMMLYVTFGGMVATTWVQIVKAFLLLVGGSLVLFLAMREFDFSYDRLVSQAMDSHALGERLLAPGGLLADPLTALSLSLGLVFGTAGLPHILMRFFTVGDAREARKSVLYATGFIGYFFNVIFLLGLASIVIVSQQPRFFEGGEAGGKLLGGGNMVVMHLAQAVGGNLLLGFLSAVTFATILAVVSGLALAGASAIAHDLYARVIMKGAASEAQELRVTKLATLGLGLVAIALGIVFENINVAFMVALAFGIAASANFPVLFLSMFWSGLTTRGALAGGYVGLFSAMGFVVFSRLVWVDVLHFAEPLFPYTQPALFSMPLAFLVAYGVSRLDRTTRAMAERAAFADQYVRGQTGLGASGAIDH

SEQ ID NO: 44560 - DNA, 1632 bp, Mycobacterium smegmatis str. MC2 155
  CDS (1)..(1632): transl_table=11
gtgaacgtgaccctgcatgccgccgagaccgtcggcaacccggcagccaacatcggcatcttcagcctcttcgtcgtcgtcacgctgttcgtggtgatccgcgccagcaagcgcaacgccaccgccaccgagttcttcaccggcggtcgcggtttctccggcccgcagaacggaatcgcgatcgccggtgactacctgtcggcggcgagcttcctcggcatcgcgggcgccatcgccgtctacggctacgacggcttcctgtactcgatcggcttcctggtggcgtggcttgtcgccctgctgcttgtcgccgaattgttgcgcaacacaggcaaattcacgatggccgatgtgctgagctttcggctcaagcagcgcccggtccgcatggcggcggccacctccacgctgacggtgtcgctgttctacctgctggcccagatggcgggcgccggtggtctggtcgcactgctgctcgacgtcaacagccggtccggccagtcgctggtgatcgccgtcgtcggcgtcctgatgatcgtctacgtcctggtgggcggcatgaagggcaccacgtgggtgcagatcatcaaagccgtgctgctgatcgcgggcgccggcctcatgacggtcatggtgctcgtgaagttcgggatcaacctctccgacatcctcggctccgcccagaccgcgatctcggaatccaccacgcagggtgtcgcaagccgcgacgtgctggccccgggtgcccagtacggcggatcgttcacctcgcagatcaacttcatctcgctggcgctggcgctcgtgctcggcaccgcgggcctgccgcacgtgctgatgcggttctacaccgtgccgaccgccaaggaagcccgccgctcggtggtgtgggcgatcgcgctgatcggcgccttctacctgttcaccctggtgctgggctacggtgcggcggcgctcgtcggccccgaccgcatcctcggtgcggccggtggtgtgaactcggcggccccgctgctagcgttcgaactcggcggcgtgatcctgctcggcatcatctccgcggtcgcgttcgccacgatcctcgcggtggtcgcgggcctgaccatcacggcgtcggcgtcgttcgcccacgacgtgtacgccagcgtgctgaagtcgcacaaggtgaccgaggacgagcaggtgcgggtctcgcgcatcaccgcggtggtgctgggcgtcctcgcgatcgggctgggcatcctggccaacgggcagaacatcgcgttcctggtggcgctggcgttcgcggtcgcggccgcggccaacctgccgaccatcgtgtactcgctgtactggaagcggttcaacacccgcggcgccctgtggagcatgtacggcggcctgatctcgacgatcgtgctgatcgtgttctcccccgcggtgtcgggttcgaagaccgcgatgatccccggcgcggacttcgacttcttcccgctggccaacccgggcatcgtgtcgatcccgctggcgttcatcctgggcatcgtcggcacgctgacctcgccggatgacgaggatcccgccatcgccgccgagatggaggtccgctcgctgaccggtgtcggcgctgaaaaagcaatttcacactga

SEQ ID NO: 44561 - protein, 543 aa, Mycobacterium smegmatis str. MC2 155
MNVTLHAAETVGNPAANIGIFSLFVVVTLFVVIRASKRNATATEFFTGGRGFSGPQNGIAIAGDYLSAASFLGIAGAIAVYGYDGFLYSIGFLVAWLVALLLVAELLRNTGKFTMADVLSFRLKQRPVRMAAATSTLTVSLFYLLAQMAGAGGLVALLLDVNSRSGQSLVIAVVGVLMIVYVLVGGMKGTTWVQIIKAVLLIAGAGLMTVMVLVKFGINLSDILGSAQTAISESTTQGVASRDVLAPGAQYGGSFTSQINFISLALALVLGTAGLPHVLMRFYTVPTAKEARRSVVWAIALIGAFYLFTLVLGYGAAALVGPDRILGAAGGVNSAAPLLAFELGGVILLGIISAVAFATILAVVAGLTITASASFAHDVYASVLKSHKVTEDEQVRVSRITAVVLGVLAIGLGILANGQNIAFLVALAFAVAAAANLPTIVYSLYWKRFNTRGALWSMYGGLISTIVLIVFSPAVSGSKTAMIPGADFDFFPLANPGIVSIPLAFILGIVGTLTSPDDEDPAIAAEMEVRSLTGVGAEKAISH

SEQ ID NO: 44562 - DNA, 1680 bp, Azoarcus sp. BH72
  CDS (1)..(1680): transl_table=11
atgaacgcatcccgcctgtcccgcctggccctcggcctggcctcgctgccactgtcggccgccgccctggccgccggccccgcgatggaagccgcgcagaagcagccgctcaacctgcacgccatcggcatgttcttcgtgttcgtgctgatgaccctcgggatcacctactgggcggccagccgcaccaagtcggcgtccgatttctacaccgccggcggtggcatcaccggcttccagaacggcctcgcgatcgccggcgactacatgtccgccgccacgctgctcggccttaccgcgatgatgtacgcgcagggtgtggatgcctacatctacatgatcgcgttcttcgtcggctggccgatcatcctgttcctgatggccgaacgcctgcgcaacctgggcaagttcaccttcgccgacatcaccgcctaccgcctcgaccagggcaaggtgcgcacgatggcggcggtcagctcgctgaccgtggtgtgcttctacctcgtcgcgcagatggtcggcgccggccagctgatcaagctgctgttcggtctggactacaccgtcgcgctgttcgtcgtcggcgcgctgatgatggtctacgtcaccttcggcggcatggtcgccaccacctgggtgcagatcatcaaggcctgcatgctgctgctcggcggcaccaccgtgatgctgctggcgctgagccagttcggcttcagcttcgaggcgctggccacccgcgcgatggaagtgcataagctcggacccaagctgttcaacccgggcagcctgctcgccgatccggtcaccgcgatctcgctcggcctcggcctgatgttcggcaccgcgggcctgccgcacatcctgatgcgcttcttcaccgtgaccgacgccaaggaagcgcgcaagtcggtgctctacgcctcgggcatcatcgcctacttcttcaacgtgatcgcgctgatgggcctggccgccatcctgatcgtcggccagaacccgcagtacttcgaaggcggcgacctcgccggcaagatcgtcggcggcggcaacatggtggcgatgcacctggcgcacgcggtgggcggcaacctgctgctcggcttcctgtcggcggtggccttcgcgaccatcctcgcggtggtggccggcctggcgctggctggtgcctcggcgatctcccacgacatctacgcccgcgtgatcatgaagggccgcgcctcggaaaccaccgagatccgcgtctccaagttcgccaccatcggcctcggcgtggtcgcggtgctgctcggcatcgtgttcgagaagatgaacgtcgccttcatggttgcgctcgccttcggtgtcgccgcgtccgccaacttcccggtgctgatcctgtcgatgtactggaagggcctgaccacccgcggcgcgcttgccggcggctacctcggcctgttcagcgcggtgaccttcgtggtgctgtcgaagtcggtgtgggtggatgtgctcggcaacgccgcgccgatcttcccctggacgcagccggcgctgttctcgatgccgctcgccttcctcgccaccatcgtggtgtcgctgctcgactccagccacaaggcgcgcagcgagcgcgaggccttcgaagaccagtacgtgcgtgcgcagaccggtgtcggcgccgccagcgccgccgcgcactaa

SEQ ID NO: 44563 - protein, 559 aa, Azoarcus sp. BH72
MNASRLSRLALGLASLPLSAAALAAGPAMEAAQKQPLNLHAIGMFFVFVLMTLGITYWAASRTKSASDFYTAGGGITGFQNGLAIAGDYMSAATLLGLTAMMYAQGVDAYIYMIAFFVGWPIILFLMAERLRNLGKFTFADITAYRLDQGKVRTMAAVSSLTVVCFYLVAQMVGAGQLIKLLFGLDYTVALFVVGALMMVYVTFGGMVATTWVQIIKACMLLLGGTTVMLLALSQFGFSFEALATRAMEVHKLGPKLFNPGSLLADPVTAISLGLGLMFGTAGLPHILMRFFTVTDAKEARKSVLYASGIIAYFFNVIALMGLAAILIVGQNPQYFEGGDLAGKIVGGGNMVAMHLAHAVGGNLLLGFLSAVAFATILAVVAGLALAGASAISHDIYARVIMKGRASETTEIRVSKFATIGLGVVAVLLGIVFEKMNVAFMVALAFGVAASANFPVLILSMYWKGLTTRGALAGGYLGLFSAVTFVVLSKSVWVDVLGNAAPIFPWTQPALFSMPLAFLATIVVSLLDSSHKARSEREAFEDQYVRAQTGVGAASAAAH

SEQ ID NO: 44564 - DNA, 1719 bp, Azoarcus sp. BH72
  CDS (1)..(1719): transl_table=11
atgatcggtcgtttcgctcgcatttccggcggccttgcgctcgccaccctgtctgccgcggcgctcgcggcgggcgccgatctcggccaggccgagaagcaggccaccaactggaccgcgatcatcatgttcgcggtgttcgtcgtggcgaccctgttcatcaccaagtgggctgctgccaagaccaaatccgcggctgatttctacaccgcgggcggcggcatcaccggcttccagaacggcctggcgatcgctggcgactacatgtcggcggcgtccttcctcggtatttccgccgcggtgatgatgaacggctacgacggcctgatctactcgatcggcttcctggtcggctggccggtcatcaccttcctgatggcggaacgcctgcgcaacctcggcaagttcaccttcgccgacgtggccgcctaccgcttcaagcagaccccgatccgcgccttcgctgcctccggcacgctggtcgtggtggccttctacctgatcgcgcagatggtcggtgccggccagctcatcaagctgctgttcggcctcgagtactggatggctgtggtcatcgtcggtgcgctgatgatggtctacgtgctgttcggcggcatgaccgcgaccacgtgggtgcagatcatcaaggcctgcctgctgctcggcggtgcgagcttcatggccttcatggtgctgctgaactacggcttctcgcccgaaaagctgtttgccgccgcggttgaagtgaaggctggcgtggccacggctgccggcaagacgccggaagaggctgcaaccctcggccaggcgatcatgggccccggctcgttcatcaaggacccgatctcggcgatctccttcggcatggcgctgatgttcggtaccgccggcctgccgcacatcctgatgcgcttcttcaccgtgccggacgccaaggaagcccgcaagtcggtgttctgggccaccacctggatcggctacttctacatcctgaccttcatcatcggcttcggcgcgatcgtgctggtgtccaccaacccgcagttcctcgatgccaagggcggcctgctcggcggtggcaacatggcggcgatccacctcgccaacgcggtcggcggcaacatcttcctcggcttcatctcggcggtggcgttcgcgaccatcctcgcggtggtggcgggcctgacgctgtccggtgcctcggcggtgtcgcatgacctctacgccacggtgttcaagaacggcaacgcggattcggctgccgaactgcgtgtctcgcgcatcaccacgatctgcctcggcgtcatcgcggttgtgctgggcatcgccttcgagaagcagaacatcgccttcatggtgtcgctggccttcgcgatcgcggcttcggccaacttcccggtgctgttcatgtcggtgctgtggaaggattgcaccacccgcggtgcatgctggggcggcttcctcggcctgatcaccgccgtcgggctgaccgtcgtgtcgccctcggtgtgggaagccacgctgggtaacccgaagggttcggcgctgttcccctacacctcgccggccctgttctcgatggcggcgggcttcctcggcatctggctgttctccatcctggataacagcgcccgcgccaaggaagaccgtgcaggctacctcgcccagtcggtgcgttccgaaaccggtatcggtgcggctgcggcttcggcccactaa

SEQ ID NO: 44565 - protein, 572 aa, Azoarcus sp. BH72
MIGRFARISGGLALATLSAAALAAGADLGQAEKQATNWTAIIMFAVFVVATLFITKWAAAKTKSAADFYTAGGGITGFQNGLAIAGDYMSAASFLGISAAVMMNGYDGLIYSIGFLVGWPVITFLMAERLRNLGKFTFADVAAYRFKQTPIRAFAASGTLVVVAFYLIAQMVGAGQLIKLLFGLEYWMAVVIVGALMMVYVLFGGMTATTWVQIIKACLLLGGASFMAFMVLLNYGFSPEKLFAAAVEVKAGVATAAGKTPEEAATLGQAIMGPGSFIKDPISAISFGMALMFGTAGLPHILMRFFTVPDAKEARKSVFWATTWIGYFYILTFIIGFGAIVLVSTNPQFLDAKGGLLGGGNMAAIHLANAVGGNIFLGFISAVAFATILAVVAGLTLSGASAVSHDLYATVFKNGNADSAAELRVSRITTICLGVIAVVLGIAFEKQNIAFMVSLAFAIAASANFPVLFMSVLWKDCTTRGACWGGFLGLITAVGLTVVSPSVWEATLGNPKGSALFPYTSPALFSMAAGFLGIWLFSILDNSARAKEDRAGYLAQSVRSETGIGAAAASAH

SEQ ID NO: 44566 - DNA, 1569 bp, Nostoc punctiforme PCC 73102
  CDS (1)..(1569): transl_table=11
atgaatagtgtgtggttggatctgccattagcggcggatattaccagtcttggtaagtttaacccgttggcgatcgctttcttctttctctttgttgtaagttctctaggcattacctattgggcggcaaagctgaccaaaaataccgcccacttctatacagccggcggcaaaatcagtggtttccaaaatgggctagccctagcaggagactttatgagtgcagctagctttttaggtattgctggactggtagcactcaacggctttgacggcttaatttattctattggcttcctggtaggctggccaattgtgatgtttttgattgcggaaccactacgtaacttaggcaaatacacctttgccgatgtggtggcttatcgcttacagcaaaaacctgtacgcatcgcatctgccattggaacgttagcagtaattagcttttacttaattgcccagatggtaggggctggggagctaattaagctactgtttggctttgattatgagttagccgtggtcatcgtcggttgtgtaatgatggcttatgtgatttttggtgggatgattgccaccacttgggtgcaaattattaaagcagttctgttgctcggcggaaccatcttgctagctattttggtattggcacgatttggttttaacccacttgctcttttcgctgcggccgcagataaatatacaggtgtattagctccaggtaaacaggtttccgatccctttgatgccatctcattgggaatgtcattgatgttcggcactgccggattaccccacatcctgatgcgtttttacacagtaccggacgctaaagcagcacgggtctctgttacttatgctacggctattattggcgttttttatctccttaccttcatcctgggctttggagcgatggtgctagtagggcaagatgccatcaagcaaattgggactggtggtaacatggctgcaccgatgttggcagaatttctcggtggtgatgctttcttaggctttatttctgctgtttcctttgcaacgattttggcggttgtagcaggtttgacactttcaggagcggctgcactgtctcatgatttgtgggtgaatgtggtgcgttctggtcatgctgacgagtcagaacaactgaaggtagctcgcggtgcgacaatgattttggggttagtggcgatatttttaggtatcttgtttaaagggcaaaacgtcgcttatatggtgggtttagcatttgcgatcgcagctagtgccaactttccagcgttactactatcaatgctttggcgacgctttaccactagcggggcagttgcaagtatgttagtcggtactttctcctcgttactgctgatttatttatcacctactattcaggtgacaattctcaagcacgcttctgcacctttcccactgaaaaatccgggattaattactattcccctagcgtttattgtggcgattgttgtttcactattgactactgagcagcaggcacaagaaaaatttgcggaagtagaagatcgcatccacataggctctgggatgtga

SEQ ID NO: 44567 - protein, 522 aa, Nostoc punctiforme PCC 73102
MNSVWLDLPLAADITSLGKFNPLAIAFFFLFVVSSLGITYWAAKLTKNTAHFYTAGGKISGFQNGLALAGDFMSAASFLGIAGLVALNGFDGLIYSIGFLVGWPIVMFLIAEPLRNLGKYTFADVVAYRLQQKPVRIASAIGTLAVISFYLIAQMVGAGELIKLLFGFDYELAVVIVGCVMMAYVIFGGMIATTWVQIIKAVLLLGGTILLAILVLARFGFNPLALFAAAADKYTGVLAPGKQVSDPFDAISLGMSLMFGTAGLPHILMRFYTVPDAKAARVSVTYATAIIGVFYLLTFILGFGAMVLVGQDAIKQIGTGGNMAAPMLAEFLGGDAFLGFISAVSFATILAVVAGLTLSGAAALSHDLWVNVVRSGHADESEQLKVARGATMILGLVAIFLGILFKGQNVAYMVGLAFAIAASANFPALLLSMLWRRFTTSGAVASMLVGTFSSLLLIYLSPTIQVTILKHASAPFPLKNPGLITIPLAFIVAIVVSLLTTEQQAQEKFAEVEDRIHIGSGM

SEQ ID NO: 44568 - DNA, 1674 bp, Burkholderia vietnamiensis G4
  CDS (1)..(1674): transl_table=11
atgaagcgcgccgccaccatcgctgcgtcgatcgtcgcggcggccggcgcaacgcccgcatgcgcggccgcaccggccgtgcatgcgcccgcgcacgatccgctcgcgatcggcatgttcatgctgttcgtcgccgcgacgctcgtcatcacgcgctgggccgcgcgccacaaccacagcgtcgccgatcactacgcggccggcggccgcatcaccgcgctgcagaacggctgggcgatcgccggcgactacatgtcggccgcgtcgctgctcggcatctccgcgctcgtgttcacgagcggctacgacgggctgatctattcggtcggcttcctcgcgagctggccgatcatcctgttcctgatcgccgagccgttgcgcaacctcggcaagtacacgctcgccgacgtcgtgtcgtaccggctgcagcaacgcccgatccgcgcgttcgcggcgtcgagctcgatcgtcatcgtgctgctgtacctggtgtcgcagatggtcggcgccggcaagctggtcgagctgctgttcgggctgaactacacggtcgcggtcgtgatcgtcggcgtgttgatggtcgtctacgtgttcttcggcggcatgctcgcgaccacgtggatccagatcgtcaaggccgtgctgctgctcgccggcgcggccttcatggcggtcatggtgctgagccgcttcggcttcagcctcgacgcgctgttcgcgcaggcgatgcgcatccatccgaagcacgcggcgatcatgcggccgggcgggctcgtgtccgatccggtgtccgcggtatcgctcgggctcgcgctgatcttcggcacggccggcctgccgcacatcctgatgcgcttcttcaccgtcggcgacgtcggcgccgcgcgcaagagcattctctatgcgaccggcatcgtcggcgccggctatgcgctgatcatcgtgatcggcttcggcacgatcgcgctcgtcgccgcggacccgcagtatcacgacgcaagcggcgcgatcgcgggtggcgcgaacatggtcgcgatccatctcgcgcacgcggtcggcggcgacctgtttctcggcttcatctgcgcggtcgcgttctcgaccattctcgcggtggtcgccgggctgacgctggccggctcgtcggcgatctcgcacgacctctacgcgaacgtgctgcgccgcggccgcgccaccgaccgcgacgaaatgcgcgtcgcgcgcgcgacgacgctggtgctcggcgtgctcgcgatcgtgctgggcatcgcgtttcagaagcagaacatcgcgttcatcgtcagcctgacgttctcgatcgcggccagctccaatttcccggtgctgctgctgtcgatctactggcgcgggctcaccacgcgcggcgcggtagtcggcggcgcggtcggcctcgtcaccgcggtcgcgctgaccgtgctgagcccgaccgtctgggtgcaggtgctcggccacgcgcatgcgccctacccgtacgagtatccggcgctgttctcgatggcggcggcgttcgtcgcgatcgtcgcggtgtcggtgaccgaccggtcggcccgcgcgcgccgcgaacgcgagctgttcgatctgcagctcgtcgcatgcgagttgggcgtcgtgccgtcgcagtacgaccatcacaacctggagacgacacgatga

SEQ ID NO: 44569 - protein, 557 aa, Burkholderia vietnamiensis G4
MKRAATIAASIVAAAGATPACAAAPAVHAPAHDPLAIGMFMLFVAATLVITRWAARHNHSVADHYAAGGRITALQNGWAIAGDYMSAASLLGISALVFTSGYDGLIYSVGFLASWPIILFLIAEPLRNLGKYTLADVVSYRLQQRPIRAFAASSSIVIVLLYLVSQMVGAGKLVELLFGLNYTVAVVIVGVLMVVYVFFGGMLATTWIQIVKAVLLLAGAAFMAVMVLSRFGFSLDALFAQAMRIHPKHAAIMRPGGLVSDPVSAVSLGLALIFGTAGLPHILMRFFTVGDVGAARKSILYATGIVGAGYALIIVIGFGTIALVAADPQYHDASGAIAGGANMVAIHLAHAVGGDLFLGFICAVAFSTILAVVAGLTLAGSSAISHDLYANVLRRGRATDRDEMRVARATTLVLGVLAIVLGIAFQKQNIAFIVSLTFSIAASSNFPVLLLSIYWRGLTTRGAVVGGAVGLVTAVALTVLSPTVWVQVLGHAHAPYPYEYPALFSMAAAFVAIVAVSVTDRSARARRERELFDLQLVACELGVVPSQYDHHNLETTR

SEQ ID NO: 44570 - DNA, 1725 bp, Xylella fastidiosa Dixon
  CDS (1)..(1725): transl_table=11
atgaacataggcaggcatcttttgttggtgttgtttgggtggttgccggtgagattggggtttgctgcagatgcgataagtgtcgtcgataagcagccggtaaattgggtggcgatcaccatgttcgctgtttttgtgctgattacgttatggatcactcagtgggccgcgaagaagacgcgatcatctgcggacttttatacggctggggggacagtcaccggtttccaaaatggtttagcgatggcgggtgattacatgtctgctgctgcgtttcttggcattacctcggcggtgatgatcagtgggtatgatggaatgctctatgcgattggctctttagtcggttggccggttctggtttttctagtcgctgagcgactgcgtaatcttggtaaatatactttttctgatgtggtggcttaccgtttcgcggcggtgccagttcggttgttcacttctgcgagtacgctggtggtggtgttgtgttccctagttgcacaaatggttggggccggtgcgcttattaagttgctatttggtttggattattgggttgcagtgatttttgttggtggactgatgatggtgtatgtgatgtttggtgggatggctgcggccacttgggtacagattattaaggcggtgttgctgttgacttgtttgactttcatggcagtcatgatcatgtggaggttcggttttaattttgagggcttgtttgcgagtgcggtggaggtcaagactcaaattgcgatggcgggcggtaaatctggggaggatgctaaagcgttagggctatcgatcatggcgccgggtagttttatcaaggatccaatttcggcgatttcattgggcatcgcattggtattcggtactgcggggttaccacatattttaatgcgtttcttcaccgtgcctgacgccagacaggcgcgtcattcggtgttgtgggcgattacctggatcggttattgctacatcttgatgtttatcattggattcggtgcgattgtgcttgtgttagcgaatccgcagtatgccgatatcgcttctggcaccatccgcggtggtcagggtgcagccaatatggctgcggtgcttgtcgccaaagtagtcgggggtaatgtgttcatggggtttgtctctgctgtggcatttgcgacgattctggcggtggtagcagggttggcgttgtctggtgcatcggcggtgtcacatgatgtgtatgcgatggtgattaagcagggtaagccatcttcggatactgagttgttggtctcgcgtgtgaccacggcagtattgggtgtggttgcggtgttgctggggatcgtgtttcagaagcagaatgttgcgttcatggtgtcattagcatttgcgattgcagcgtcggctaatttccctgtactggttctgtcgctgttttggaagaattgtacgacgtggggtgcggtgatcggtggttttctcggtttgatttcttcgttggtgttgacggtgttatcaccttcggtgtgggtcgatacgttgggtcattcggtagattcggtgcgattcccttacacgtcgccggcattgttttccatgaccataggatttgtcggtatttggttgttttcggtgctggatcgtagtggccgggcggcgaaggagcgcattgcgtttaaggcgcagcaggtacgtgctgaaactggattaggtgcttccaaaatgtcacccaattga

SEQ ID NO: 44571 - protein, 574 aa, Xylella fastidiosa Dixon
MNIGRHLLLVLFGWLPVRLGFAADAISVVDKQPVNWVAITMFAVFVLITLWITQWAAKKTRSSADFYTAGGTVTGFQNGLAMAGDYMSAAAFLGITSAVMISGYDGMLYAIGSLVGWPVLVFLVAERLRNLGKYTFSDVVAYRFAAVPVRLFTSASTLVVVLCSLVAQMVGAGALIKLLFGLDYWVAVIFVGGLMMVYVMFGGMAAATWVQIIKAVLLLTCLTFMAVMIMWRFGFNFEGLFASAVEVKTQIAMAGGKSGEDAKALGLSIMAPGSFIKDPISAISLGIALVFGTAGLPHILMRFFTVPDARQARHSVLWAITWIGYCYILMFIIGFGAIVLVLANPQYADIASGTIRGGQGAANMAAVLVAKVVGGNVFMGFVSAVAFATILAVVAGLALSGASAVSHDVYAMVIKQGKPSSDTELLVSRVTTAVLGVVAVLLGIVFQKQNVAFMVSLAFAIAASANFPVLVLSLFWKNCTTWGAVIGGFLGLISSLVLTVLSPSVWVDTLGHSVDSVRFPYTSPALFSMTIGFVGIWLFSVLDRSGRAAKERIAFKAQQVRAETGLGASKMSPN

SEQ ID NO: 44572 - DNA, 1725 bp, Xylella fastidiosa Ann-1
  CDS (1)..(1725): transl_table=11
atgaacataggcaggcatcttttgttggtgttgtttgggtggttgccggtgagattgggggttgctgcagatgcgataagtgttgtcgataagcagccggtaaattgggtggcgatcaccatgttcgctgtttttgtgctgattacgttatggatcactcagtgggccgcgaagaagacgcgatcatctgcggacttttatacggctggggggacagtcaccggtttccaaaatggtttagcgattgccggtgactacgtgtccgctgcttcgtttcttggtattacttcggcagtgatggccaatggctatgatggaatgctctatgcaattggctttttagttggttggccgattctgacttttttgattgctgagcggctgcgcaatcttggcaaatatacttttgctgatgtggtggcttaccgttttgcggcgacgtcagttcggttgtttgcttccttcagtacgttggtggtggtgttgtgttatctgattgcacagatggttggggccggtgcgctgattaggttgttgtttggtttagattattgggttgcaatggtgctggttggcggactgatgatggtgtacgtgttgtttggtgggatggctgcaaccacctgggtacagattattaaggcggtgctgttgctgattggtgcgactttcatggcagtcatgatcatgcgcaggttcggttttaattttgaggggttgtttgcgagtgcggtggaggtcaagactcaaattgcgatggcgggcggtaaatctggggaggaggctaaagcgttagggctatcgatcatggcgccgggtagttttatcaaggatccaatttcggcgatttcattgggcatcgcattggtattcggtactgcggggttaccacatattttaatgcgcttcttcaccgtgcctgacgccagacaggcgcgtcattcggtgttgtgggcgattacctggatcggttattgctacatcttgatgtttatcattggattcgctgcgattgtgcttgtgttagcgaatccgcagtatgccgatatcgcttctggcaccatccgcggtggtcagggtgcagccaatatggctgcggtgcttgtcgccaaagtagtcgggggtaatgtgttcatggggtttatctctgctgtggcatttgcgacgattctggcggtggtagcagggttggcgttgtctggtgcatcggcggtgtcacatgatgtgtatgcgatggtgattaagcagggtaagccatcttcggatactgagttgttggtctcgcgtgtgaccacggcagtattgggtgtggttgcggtgttgctggggatcgtgtttcagaagcagaatgttgcgttcatggtgtcattagcatttgcgattgcagcgtcggctaatttccctgtactggttctgtcgctgttttggaagaattgtacggcatggggtgcggtgatcggtggttttctcggtttgatttcttcgttggtgttgacggtgttatcaccttcggtgtgggtcgatacgttgggtcattcggtggattcggtgcgattcccttacacgtcgccggcattgttttccatgaccataggatttgtcggtatttggttgttttcggtgctggatcgtagtggccgggcggcgaaggagcgcgttgcgtttaaggcgcagcaggtacgtgctgaaactggattaggtgcttccaaaatgtcacccaattga

SEQ ID NO: 44573 - protein, 574 aa, Xylella fastidiosa Ann-1
MNIGRHLLLVLFGWLPVRLGVAADAISVVDKQPVNWVAITMFAVFVLITLWITQWAAKKTRSSADFYTAGGTVTGFQNGLAIAGDYVSAASFLGITSAVMANGYDGMLYAIGFLVGWPILTFLIAERLRNLGKYTFADVVAYRFAATSVRLFASFSTLVVVLCYLIAQMVGAGALIRLLFGLDYWVAMVLVGGLMMVYVLFGGMAATTWVQIIKAVLLLIGATFMAVMIMRRFGFNFEGLFASAVEVKTQIAMAGGKSGEEAKALGLSIMAPGSFIKDPISAISLGIALVFGTAGLPHILMRFFTVPDARQARHSVLWAITWIGYCYILMFIIGFAAIVLVLANPQYADIASGTIRGGQGAANMAAVLVAKVVGGNVFMGFISAVAFATILAVVAGLALSGASAVSHDVYAMVIKQGKPSSDTELLVSRVTTAVLGVVAVLLGIVFQKQNVAFMVSLAFAIAASANFPVLVLSLFWKNCTAWGAVIGGFLGLISSLVLTVLSPSVWVDTLGHSVDSVRFPYTSPALFSMTIGFVGIWLFSVLDRSGRAAKERVAFKAQQVRAETGLGASKMSPN

SEQ ID NO: 44574 - DNA, 1734 bp, Xanthobacter autotrophicus Py2
  CDS (1)..(1734): transl_table=11
atgtcgacgcatgctttcatcggcaaggcggcgcgccttgcgggcctcgccgcccttgcgcttgtccccacggcggccttcgcggccgaggccatcggcgcctcggagaagcaggccaccaactggaccgcgatcgccatgttcgcgatcttcgtggtcggcaccctcttcatcaccaagtgggcggcctcgaagaccaagtcggcggccgacttctacaccgccggcggcggcatcaccggcttccagaacggcctcgccatcgccggtgactacatgtccgcggcctcgttcctcggcatctccgcggcggtgatgagctccggcttcgacggcctcatctactccatcggcttccttgtcggctggcccatcctcaccttcctgatggcggagcgcctgcgcaacctcggcaagttcaccttcgccgacgtggccgccttccgcttcgcccagacccccgtgcgcgtgttcgcggcgtccggcacgctggtggtggtggccttctatctcatcgcccagatggtgggcgccggccagctgatcaagctgctgttcggcctcgactactggatcgcggtggtgatcgtcggcgcgctgatgatggtctacgtgctgttcggcggcatgaccgccaccacctgggtgcagatcatcaaggcctgcctgctgctcggcggcgccaccttcatggccatcatggtcatgtggcgctacggcttcagcccggagaacctgttcgcggcggcggttggcatcaagacgcagcttgcggcggccaagcccggcatcacccccgaggcggcggccgcggccggccagtccatcatggggccgggcaccttcatcaaggacccgatctcggccatctccttcggcatggcgctgatgttcggcaccgccggcctgccccatatcctgatgcgcttcttcaccgtgccgagcgccaaggaagcgcgcaagtcagtgatgtgggccaccgggtggatcggctacttctacctgctcaccttcatcatcggcttcggcgccatcaccttcgtgctgaccaatccggaattcctggatgccaagggcggcctcgtgggcggctccaacatggcggcggtgcacctggcccgcgcggtcggcggcaacatcttcctcggcttcatctcggcggtggcgttcgcgaccatcctcgcggtggtggccggcctgacgctctcgggcgcctcggcggtgtcgcacgacctctattcgaccgtgatcaagaagggcaaggccgacagcgcctcggagctgaaggtctcgcgcgtcaccaccatctgcctcggcatcctggcggtgctgctgggcatcgccttcgagaagcagaacatcgccttcatggtgtccctggccttcgcggtggcggcctcggccaacttcccggtgctgttcatgtcggtgctgtggaaggactgcaccaccaagggcgccgtggtcggcggcttcctgggccttgcggcctcggtgatcctgaccatcctgtcgccctcggtgtgggaagcgaccctgggcaacccggccggttccgcgccgttcccctacacctcgccggcgctgttctccatgacgctgggcttcatcggcatctggctggtctcgatcctcgacaacagccagcgggcgaagatcgaccgggcaggcttcccggcgcagcaggtgcgctccgaaaccggcatcggggcgtcggaagcctcgggtcactga

SEQ ID NO: 44575 - protein, 577 aa, Xanthobacter autotrophicus Py2
MSTHAFIGKAARLAGLAALALVPTAAFAAEAIGASEKQATNWTAIAMFAIFVVGTLFITKWAASKTKSAADFYTAGGGITGFQNGLAIAGDYMSAASFLGISAAVMSSGFDGLIYSIGFLVGWPILTFLMAERLRNLGKFTFADVAAFRFAQTPVRVFAASGTLVVVAFYLIAQMVGAGQLIKLLFGLDYWIAVVIVGALMMVYVLFGGMTATTWVQIIKACLLLGGATFMAIMVMWRYGFSPENLFAAAVGIKTQLAAAKPGITPEAAAAAGQSIMGPGTFIKDPISAISFGMALMFGTAGLPHILMRFFTVPSAKEARKSVMWATGWIGYFYLLTFIIGFGAITFVLTNPEFLDAKGGLVGGSNMAAVHLARAVGGNIFLGFISAVAFATILAVVAGLTLSGASAVSHDLYSTVIKKGKADSASELKVSRVTTICLGILAVLLGIAFEKQNIAFMVSLAFAVAASANFPVLFMSVLWKDCTTKGAVVGGFLGLAASVILTILSPSVWEATLGNPAGSAPFPYTSPALFSMTLGFIGIWLVSILDNSQRAKIDRAGFPAQQVRSETGIGASEASGH

SEQ ID NO: 44576 - DNA, 1614 bp, Xanthobacter autotrophicus Py2
  CDS (1)..(1614): transl_table=11
atgaccgcgggcaaatttgccaagaccctctcggtcgtcatcccggcgctgatggccggaacctccgccatggcggccgagccggcgggcggcggcgccaatcccactgccatcggcatgtttatcgctatcgtgctggtcacgctggggattacggcgtgggccgcgaaacgcacccggtcagcctccgacttctacacggccggcggtcacatctccgggttccagaatggcatcgcgctggccggcgatttcatctcggccggcgcgctgctcggcctcgcgggcctggtctacgcttcgggcttcgacggcctgatcttcgccgtgggctattccacggggctgccgctggtggtgttcctggtggcggagcggctgaggaagctcgggcgcttcaccatcgccgacgtgctcgccacacggctggacgagcggcccatccgcatgttcaccgccttcgcgacgctggtgatcgtggtcttctacctcatcgcgcagatggtgggggcggggcagctgatccggctcctgttcgggctcgactatgtctatgcccagatcatcgtgggcgccctgatgatctgctacgtcgtgttcggcgggatgatggccacgacctgggtgcagatcatcaaggccgtcatgctgatcggcgcgggcatcgtgatggccttggcggtgctggtccatttcggcttcagctatgacgccatcatctcgcgcgccatcgccgtgcatccccgccacgaggcgatcatgctgccgcaggtgttctccggaagcccactgcagaccatctccctcggcctcaccctgatgctcggcacggccggcctgccgcacgttctcatgcgcttcttcaccgttcccgacacaagggcggcgcgggtgtccgtgttctgggggacgctcggcgtgagcggcttcttcgccctcatcttcatcctcggcttcggcgccctcgccatcatcggcggcgacccgacctatgtggatgcgaagggcgccctgcgcggcggcggcaacatggcgaccatccacctcgcccacgccctgggcggcagcccgctgatgggcttcgtctcggcggtgtcgttcgccaccatcctcgcggtggtctcgggcctgaccctcgccggcgcctcgtccgtctcgcacgatctctatgcccggaccttccgccgcggccgggcgagtgaagccagcgagatccgggtctcccgcctcgcgacgatcgggctgggcgtactgtcggtgctgctcggcatcgtgttccagacgcagaacgtcgcctacatgatcagcctcgcctatgccatcgcctgcagctcgaccctgccgctgctgctgctgaccctctactggggcgggctgacgacgcggggcgccatcaccggcggcatggtcggcctcatcgcggcggtgacgctcaccatcctcggcccgccggtgtgggtgaaggtgctcggcaatgccgcgcccatcttccccatcgatccgccgaccatcgtctccatgccgctcgccttcttcacggcctggctcgtctcggttctggaccggtcgcgcgcgccggcgggcttggccagcggcgtgggcgctgccgagtaa

SEQ ID NO: 44577 - protein, 537 aa, Xanthobacter autotrophicus Py2
MTAGKFAKTLSVVIPALMAGTSAMAAEPAGGGANPTAIGMFIAIVLVTLGITAWAAKRTRSASDFYTAGGHISGFQNGIALAGDFISAGALLGLAGLVYASGFDGLIFAVGYSTGLPLVVFLVAERLRKLGRFTIADVLATRLDERPIRMFTAFATLVIVVFYLIAQMVGAGQLIRLLFGLDYVYAQIIVGALMICYVVFGGMMATTWVQIIKAVMLIGAGIVMALAVLVHFGFSYDAIISRAIAVHPRHEAIMLPQVFSGSPLQTISLGLTLMLGTAGLPHVLMRFFTVPDTRAARVSVFWGTLGVSGFFALIFILGFGALAIIGGDPTYVDAKGALRGGGNMATIHLAHALGGSPLMGFVSAVSFATILAVVSGLTLAGASSVSHDLYARTFRRGRASEASEIRVSRLATIGLGVLSVLLGIVFQTQNVAYMISLAYAIACSSTLPLLLLTLYWGGLTTRGAITGGMVGLIAAVTLTILGPPVWVKVLGNAAPIFPIDPPTIVSMPLAFFTAWLVSVLDRSRAPAGLASGVGAAE

SEQ ID NO: 44578 - DNA, 1668 bp, marine gamma proteobacterium HTCC2080
  CDS (1)..(1668): transl_table=11
atgcagcgcttaatatttcaagtaacgccggggattgcgctgcttctctggtctgattttatagtggctgctggtgctatcgaaggggcgtctggacgtcaagcggtaaaccctattgccattggtatgtttctgctattcgttgccttcaccctttacgtgacttggtgggctgcaaaatcaacaaaaaccagctcaactttttataacgccggcggtcaaataacaggcgctcaaaatggtctcgctattgctggcgattttatgtctgcagcatcttttttgggtatcacaggcttgatgtatgtagggggctttgacggattgattttgtctttaggcgcctttggtgcttggcccgtgttcatgtttttgtttgctaagcgtgtccgcaatcttggcaactttacctttatcgatgttatttctcagcggctcgatcgcgaccccatacgactcgtcacagcgtttagcactattttgattgtcattatgtacctcattgcacaaatggtcggggcgggcacactcattcagttcctgtttgggctgccttatgaatgggctcttctgctcgttagcgtgctcgtgcttgcctacgttgcttttggtggcatgttggctacgacatgggtgcagattatcaaggcaggcctgttgcttacaggggtcacgttaatagctgcgttactgttggcagattctgggttcagtttttctaatttactaggcaaggcagcagtaaatcatcccagcggtgaaggcatattgcgtgctggctcgatctttgacgatcctgtacaaatattgactattcaggtttcgatgttgtttggcaccgtaggtctaccacatattttaatgcgcttgttcacggttcctgatatgcgccaagccaaactatctgcttactacgcgtcgttgtttattggatatttttatatcgcactgctagtactcgggttcggctccatagcctatgttgctggaaatccggagtttctcaacgagcaaggcaagcttattggtggtagtaacatggctgcgatccacgtggcgaccgccatgggtggtgatattttgacggggtttatgtcggcggtgtgttttgcaaccattttggcggtggttgctgggctgaccctctcgggtgcagcggccatttctcacgacgtgtacgcggaggtgcttaagaaagggaagcccgacccaaagacagagctgcgactaacccgtatcagcgttttgctcataggtttcgccgcggtctcattgggtattgctttccaacatgaaaacattgcgtttatcgcgacgatacctatggtggtttcggcgtcagtgaccttccctattctttttctttcgctgttctggaaggattttaccactcggggtgctatgtatggtgccggggtaggcctgatttcttcaattgtcctcattgtgttgggaccacaggtttgggtgtctctactgggtaacgccgaggcgcttttcccttatgactatcccgcgttgttcacgatgcctgcttcggtgtcaattatggtttgggtttcactgagggatcgtagcgatcgcggtgctgtagatcgagacaactacttgcgtttgttggtgcgctcagagtttggtccgtcagaaaaggaaatggcccagtcatga

SEQ ID NO: 44579 - protein, 555 aa, marine gamma proteobacterium HTCC2080
MQRLIFQVTPGIALLLWSDFIVAAGAIEGASGRQAVNPIAIGMFLLFVAFTLYVTWWAAKSTKTSSTFYNAGGQITGAQNGLAIAGDFMSAASFLGITGLMYVGGFDGLILSLGAFGAWPVFMFLFAKRVRNLGNFTFIDVISQRLDRDPIRLVTAFSTILIVIMYLIAQMVGAGTLIQFLFGLPYEWALLLVSVLVLAYVAFGGMLATTWVQIIKAGLLLTGVTLIAALLLADSGFSFSNLLGKAAVNHPSGEGILRAGSIFDDPVQILTIQVSMLFGTVGLPHILMRLFTVPDMRQAKLSAYYASLFIGYFYIALLVLGFGSIAYVAGNPEFLNEQGKLIGGSNMAAIHVATAMGGDILTGFMSAVCFATILAVVAGLTLSGAAAISHDVYAEVLKKGKPDPKTELRLTRISVLLIGFAAVSLGIAFQHENIAFIATIPMVVSASVTFPILFLSLFWKDFTTRGAMYGAGVGLISSIVLIVLGPQVWVSLLGNAEALFPYDYPALFTMPASVSIMVWVSLRDRSDRGAVDRDNYLRLLVRSEFGPSEKEMAQS

SEQ ID NO: 44580 - DNA, 1563 bp, Pseudomonas putida
  CDS (1)..(1563): transl_table=11
atgaactggaccgccatctcgatgttcatggtgttcgtctgcttcaccctgctggtcacccgctgggcggccttgcgcacccgttcggccagcgacttctataccgccggtgggggcctgaccggcatgcagaacggcctggcgattgccggcgacatgatcagcgccgcctccttcctgggcatttccgcgatgatgttcatgaacggctatgacggcctgttgtatgccctgggcgtgctggccggctggccgatcattctgttcctgatcgccgaacgcctgcgcaacctgggcaagtacacctttgccgacgtagtcagttaccgcctggcacaaaccccggtgcgcctgacttcggcgttcggcaccctggtcgtggcgctgatgtacctggtggcgcagatggtcggcgccggcaagctgatcgagctgctgttcggcatcagctacctgtacgccgtgatgctggtcggtgtactgatggttgcctatgtcaccttcggcggcatgctcgccaccacctgggtgcagatcatcaaggcggtgatgttgctgtcgggcaccagcttcatggccttcatggtgctcaagcacttcggcttcagcaccgaagccatgttcgccagcgccgtcgccgtgcatgccaagggccaggccatcatggccccggggggcttgctgtccaatccggtggatgccatttccctgggcttgggcatgatgttcggcaccgccggcctgccgcatatcctgatgcgcttctttaccgtcagtgacgccaaggaagcccgcaagagcgtgttctacgccactggtttcatcggttacttctacctgctgctgatcgtcatcggctttggtgccatcgtgatggtcggcaccgagccgtcctaccgcgacgcgaccggtgcaatcattggcggcggcaacatgatcgccgtgcacctggcccaggctgtcggtggcaacctgttccttggcttcatctccgctgtggcctttgccaccatcctagccgtggtcgccggcctggcgctgtccggcgcatcggcggtctcccacgacctgtatgcctgcgtgatccgccaaggcaaggccaccgagcaggaagaaatgcgcgtatcgcgtatcgccaccctgctgatcggcctgctggcggtgctgcttggcctgatgttcgagtcgcagaacatcgccttcctgtccggcctggtgctggcggtggctgcctcggtcaacttcccggtactgctcctttcgatgttctggaagggcctgaccactcgcggcgcggtgtgcggcagcatggccggcctggcgtcggcggtgctgctggtggtattgggcccggcagtgtgggtcaacgtgctgcatcacgagaaagcgctgttcccgtacagcaacccggcgttgttctccatgagcctggcattcctcagtgcgtgggtgttctcggttaccgacagctccgaacgtgccagtgaagaacgaggccgctacctggcccagttcatccgctccatgaccggtatcggcgctgccggcgccagcaagcactga

SEQ ID NO: 44581 - protein, 520 aa, Pseudomonas putida
MNWTAISMFMVFVCFTLLVTRWAALRTRSASDFYTAGGGLTGMQNGLAIAGDMISAASFLGISAMMFMNGYDGLLYALGVLAGWPIILFLIAERLRNLGKYTFADVVSYRLAQTPVRLTSAFGTLVVALMYLVAQMVGAGKLIELLFGISYLYAVMLVGVLMVAYVTFGGMLATTWVQIIKAVMLLSGTSFMAFMVLKHFGFSTEAMFASAVAVHAKGQAIMAPGGLLSNPVDAISLGLGMMFGTAGLPHILMRFFTVSDAKEARKSVFYATGFIGYFYLLLIVIGFGAIVMVGTEPSYRDATGAIIGGGNMIAVHLAQAVGGNLFLGFISAVAFATILAVVAGLALSGASAVSHDLYACVIRQGKATEQEEMRVSRIATLLIGLLAVLLGLMFESQNIAFLSGLVLAVAASVNFPVLLLSMFWKGLTTRGAVCGSMAGLASAVLLVVLGPAVWVNVLHHEKALFPYSNPALFSMSLAFLSAWVFSVTDSSERASEERGRYLAQFIRSMTGIGAAGASKH

SEQ ID NO: 44582 - DNA, 1737 bp, Rhodobacter capsulatus
  CDS (1)..(1737): transl_table=11
atgagcccggtcacgaccttcacccgccttgcggcggtctcggcgctgagcctgacgcccggccttgcccttgcggcgggcgcgatcgagggggcggtgcaaaagcagcccacgaactggaccgcgatcgcgatgttcggctttttcgtggtggcgacgctgttcatcacgaaatgggcggccgggcggacgaaatcggcggccgatttctacaccgcgggcggcggcatcaccggctttcagaacgggctggcgatcgcgggcgattacatgtcggcggcgtcctttctggggatttcggcggcggtgatgctgcagggctatgacgggctgatctattcgatcggctttctggtcggctggccgatcctgaccttcctgatggccgagcggctgcgcaaccttggcaagttcaccttcgccgatgtggcggccttcccgttcgcgcagacgccggtgcgggtctttgcggcgatgtcgacgctggtcgtcgtggccttttacctgatcgcccagatggtgggcgcggggcagctgatcaagctgctgttcgggctggaatatctttatgcggtgatcgtcgtcggcatcctgatgatggtctatgtgctgtttggcggcatgaccgcgacgacctgggtgcagatcatcaaggcctgtctgctgctgggcggggccagcttcatggcgctgatggtgatggtgcattacggcttcagcctggaaagcctgtttgcggactcggtcaaggtgaagaccgatctggcgctggcggcgggcaagacccccgaggaggcggcggctgcggggatctcgatcatggggccgggcaccttcgtgaaagacccgatctcggcgatttccttcggcatggcgctgatgttcggcaccgccggtctgccgcatatcctgatgcgcttcttcaccgtgccttcggccaaggaagcgcgcaagtcggtgatgtgggcgacggtctggatcggctatttctacatgctgaccttcatcatcggctttggcgccatcgtctatgtcctgaccaacccgggtctggtcagctatgatgccaagggcgcgctgacgctggtgggcggcaacaacatggcggcgatccatctggcgcaggcggtgggcggcaacatcttcctcggcttcatctcggcggtggcctttgccacgatcctggccgtggtcgccggtctgacgctctcgggcgcctcggcggtgtcgcatgacctttattcgaccgtgttcaagaacggcaaggccgacagcgcctcggagctgcgggtctcgcgcatcaccacgatctgccttggcatcgtcgcggtggttctgggtctggcgtttgaaaagcagaacatcgccttcatggtgtcgctggcctttgccatcgccgcttcggcgaacttcccggtgctcttcatgtcgcttctgtggaagggcatgacgacgcgcggcgcggtgatcggcggttccctcgggctgatcagctcggtggcgctgaccgtgatctcgccctcggtctgggaggccacgctcggctttgaaaagggctcggcgcccttcccctatacctcgcccgcgctcttctcgatggtgctgggctttgcggggatctggctcttttcgatcaccgacaagagccggcgcggcgatcaggaccgggacggctatctggcgcaggagatccgttcggaaaccggcatcggcgccgccgaagcctcggcgcattga

SEQ ID NO: 44583 - protein, 578 aa, Rhodobacter capsulatus
MSPVTTFTRLAAVSALSLTPGLALAAGAIEGAVQKQPTNWTAIAMFGFFVVATLFITKWAAGRTKSAADFYTAGGGITGFQNGLAIAGDYMSAASFLGISAAVMLQGYDGLIYSIGFLVGWPILTFLMAERLRNLGKFTFADVAAFPFAQTPVRVFAAMSTLVVVAFYLIAQMVGAGQLIKLLFGLEYLYAVIVVGILMMVYVLFGGMTATTWVQIIKACLLLGGASFMALMVMVHYGFSLESLFADSVKVKTDLALAAGKTPEEAAAAGISIMGPGTFVKDPISAISFGMALMFGTAGLPHILMRFFTVPSAKEARKSVMWATVWIGYFYMLTFIIGFGAIVYVLTNPGLVSYDAKGALTLVGGNNMAAIHLAQAVGGNIFLGFISAVAFATILAVVAGLTLSGASAVSHDLYSTVFKNGKADSASELRVSRITTICLGIVAVVLGLAFEKQNIAFMVSLAFAIAASANFPVLFMSLLWKGMTTRGAVIGGSLGLISSVALTVISPSVWEATLGFEKGSAPFPYTSPALFSMVLGFAGIWLFSITDKSRRGDQDRDGYLAQEIRSETGIGAAEASAH

SEQ ID NO: 44584 - DNA, 1647 bp, Pseudomonas fluorescens
  CDS (1)..(1647): transl_table=11
atgacaaccctgcgctccttcaccttggtcggcggcctgctgctgagcagcactgcgctggctgccgagcacttggcgcgccccttgaactggcacgctatcggcatgttcatggtgttcgtcgtgtttaccctcggcatcacccggtgggccgcgctgcgcacgcgctcggccagcgatttctatacagccggtggcggcatcagcggcctgcagaacggcctggcgatcgctggcgacatgatcagtgcggcttccttcctcggcatctcggcgatgatcttcatggccggcttcgatgggcttctctactccctgggcatcgtggcggcctggccgatcatcctgttcctgatagccgaacggctgcgcaacctcggcaaatacaccttcgccgacgtggtgtcgtatcgcctggaacagacgccaatccgcatcaccgcagcgttcggcaccctggtcgtggccttgatgtacctcatggcgcagatggtcggcgctggcaagctgatcgagttgctgttcggcatgtcctacttccagtccgtgatgctggtgggcgtgctgatcatctgctacgtcaccttcggcggcatgctcgcaaccacctgggtacagatcatcaaagcggtaatgctgctgtccggcgccaccttcatggccttcatggtgctcaggcacttcaacttcagtaccgaggcgatgttcgccggagcagccgaggtacacgccaagggcatgtcggtcatggtgcccggcggcatgctgagcaaccccattgataccatttccctggcggtcggcatgatgttcggcactgccggcctgccgcatatcctaatgcgcttcttcacggtcaaggacgctaacgaggcgcgcaagagcgtgctctacgccaccggcttcatcggctacttctacttgctgttgatcgccatcggcttcggcaccatcgtcatggtcggcaccgatccggcgttccgcgacgcggccggtgccatcatcggcggtggcaacatggtcgccgtgcacctggcccaggcggtgggtggcagcctgttcctcggcttcatctcggccgtggccttcgccaccatcctcgccgtggtcgccggcctggcactgtccggcgcctccgccgtggcccatgacctgtacgcctgcgtgattcgcaagggccaagccaccgagaaagaggaaatgcgcatgtcgcgcatcgccaccctggtgatcggtgttctggcggtgatcctcggcctcctgttcgagtcgcagaacatcgctttcctctccggcctggtattggccatcgccgcctcggtcaacttcccggtgctgttcctgtcgatgttctggaaagggctgaccacccgcggcgccgtggccggcagcgtctttggcctgttctcggcggtgatcctgctggtgctcagcccggtggtatgggtcaacctgctgcactacgaccgtgcgctgttcccctactccaacccggcgctgttctccatgacgctggccttcctcggcgcctggatgttctcggtaaccgacgcttccgagcgcgccaagcaggagcgcggccgctacctggcccagttcatccgctccatgaccggcattggcgcggccaaggccagcaaccactaa

SEQ ID NO: 44585 - protein, 548 aa, Pseudomonas fluorescens
MTTLRSFTLVGGLLLSSTALAAEHLARPLNWHAIGMFMVFVVFTLGITRWAALRTRSASDFYTAGGGISGLQNGLAIAGDMISAASFLGISAMIFMAGFDGLLYSLGIVAAWPIILFLIAERLRNLGKYTFADVVSYRLEQTPIRITAAFGTLVVALMYLMAQMVGAGKLIELLFGMSYFQSVMLVGVLIICYVTFGGMLATTWVQIIKAVMLLSGATFMAFMVLRHFNFSTEAMFAGAAEVHAKGMSVMVPGGMLSNPIDTISLAVGMMFGTAGLPHILMRFFTVKDANEARKSVLYATGFIGYFYLLLIAIGFGTIVMVGTDPAFRDAAGAIIGGGNMVAVHLAQAVGGSLFLGFISAVAFATILAVVAGLALSGASAVAHDLYACVIRKGQATEKEEMRMSRIATLVIGVLAVILGLLFESQNIAFLSGLVLAIAASVNFPVLFLSMFWKGLTTRGAVAGSVFGLFSAVILLVLSPVVWVNLLHYDRALFPYSNPALFSMTLAFLGAWMFSVTDASERAKQERGRYLAQFIRSMTGIGAAKASNH

SEQ ID NO: 44586 - DNA, 1650 bp, Escherichia coli O157
  CDS (1)..(1650): transl_table=11
atgaaaagagttctgacggcgcttgccgccacactccctttcgcagctaacgccgcggatgctattagcggggccgtagagcgccagccaacgaactggcaggcgattattatgttcctgattttcgtcgtgtttacgctcggcattacctactgggcgtcaaaacgcgtacgttcgcgtaatgactattacaccgcaggcggcaatatcaccggttttcagaacgggctggcgattgccggtgactatatgtccgccgcctcatttttggggatctccgcactggtgtttacctccggctatgacggcttaatttactcgctgggcttcctggtgggctggccgatcattttgttcctgattgccgaacgtctgcgtaacctggggcgttacacctttgccgatgtagcctcttatcgtctgaaacaagggccgattcgtattctttcggcctgtggttctctggtggtggtggcgctttaccttatcgcccagatggtgggtgcaggtaaactgatcgagctgctgtttggccttaactatcacattgcagtggtgctggtcggcgtgctgatgatgatgtacgtcctgttcggcggcatgctggcgaccacctgggtacagattatcaaagctgtgctgttgctgttcggtgccagctttatggcctttatggtgatgaaacacgtcggctttagcttcaacaatctgttcagcgaagcgatggcggtacacccgaaaggtgtcgacatcatgaaaccgggcggactggtgaaagatccgatctccgcactctctctggggctaggactgatgtttggtacggctggcttgccgcacattctgatgcgcttctttacggtcagcgatgcccgcgaagcgcgtaaaagcgtgttctacgctaccggatttatgggctacttctatatcctgacctttattatcggcttcggcgcgatcatgctggtcggtgcgaatccggaatataaagacgcggcgggccatctgattggtggtaacaacatggcagcagttcacctggccaatgcggtgggcggcaacctgttcctcggctttatttcagcggttgctttcgccactatcctcgcggtggttgcgggtctgacgctggcgggcgcatcagcggtttcgcatgacctgtacgctaacgtcttcaaaaaaggcgcgaccgaacgtgaagagctgcgggtatcgaaaatcaccgtcctgattttgggtgtgattgcgattatcctcggcgtgctgtttgagaatcagaacatcgcctttatggtggggctggcgtttgccatcgcggcgagctgtaacttcccgatcattctgctttctatgtactggtcgaaactgaccacgcgtggcgcgatgatgggtggctggctggggctgattaccgcagtggtactgatgatcctcggcccgacgatttgggtacagatcctcggtcacgaaaaagccatcttcccgtatgaatacccggcgctgttctctatcaccgtggcattcctcggcatctggttcttctcggcaaccgataactcagcggaaggcgcgcgtgagcgtgaactgttccgcgcgcagtttatccgctcccagaccggctttggcgttgagcaaggccgcgcgcattaa

SEQ ID NO: 44587 - protein, 549 aa, Escherichia coli O157
MKRVLTALAATLPFAANAADAISGAVERQPTNWQAIIMFLIFVVFTLGITYWASKRVRSRNDYYTAGGNITGFQNGLAIAGDYMSAASFLGISALVFTSGYDGLIYSLGFLVGWPIILFLIAERLRNLGRYTFADVASYRLKQGPIRILSACGSLVVVALYLIAQMVGAGKLIELLFGLNYHIAVVLVGVLMMMYVLFGGMLATTWVQIIKAVLLLFGASFMAFMVMKHVGFSFNNLFSEAMAVHPKGVDIMKPGGLVKDPISALSLGLGLMFGTAGLPHILMRFFTVSDAREARKSVFYATGFMGYFYILTFIIGFGAIMLVGANPEYKDAAGHLIGGNNMAAVHLANAVGGNLFLGFISAVAFATILAVVAGLTLAGASAVSHDLYANVFKKGATEREELRVSKITVLILGVIAIILGVLFENQNIAFMVGLAFAIAASCNFPIILLSMYWSKLTTRGAMMGGWLGLITAVVLMILGPTIWVQILGHEKAIFPYEYPALFSITVAFLGIWFFSATDNSAEGARERELFRAQFIRSQTGFGVEQGRAH

SEQ ID NO: 44588 - DNA, 1650 bp, Escherichia coli O6
  CDS (1)..(1650): transl_table=11
atgaaaagagttctgacggcgcttgccgccacactccctttcgcagctaacgccgcggatgctattagcggggccgtagagcgtcagccaacgaactggcaggcgattattatgttcctgattttcgtcgtgtttacgctcggcattacctactgggcgtcaaaacgcgtacgttcgcgtaatgactactacaccgcaggcggcaatatcaccggttttcagaacgggctggcgattgccggggactatatgtccgccgcctcattcttggggatctccgcgctggtgtttacctccggctatgacggcttaatttactcgctaggcttcctggtaggctggccgatcattttgttcctgattgccgaacgtctgcgtaacctcggtcgctacacctttgccgatgtggcctcttaccgtctgaaacaagggccgattcgtattctttcggcctgtggttctctggtggtggtggcgctttaccttatcgcccagatggtgggcgcaggtaaactgatcgagctgctgtttggccttaactatcacattgcggtagtgctggtcggcgtgctgatgatgatgtacgtcctgttcggcggcatgctggcgaccacctgggtacaaattattaaagccgtgctgttgctgttcggtgccagctttatggcctttatggtgatgaaacacgtcggctttagcttcaacaatctgttcagcgaagcgatggcggtacacccgaaaggtgtcgacatcatgaagccgggcgggctggtgaaagatcctatctccgcgctctctttggggctaggactgatgtttggtacggcgggcttgccgcatattctgatgcacttctttacggtcagcgatgcccgcgaagcacgtaagagcgtgttctacgccaccggatttatgggctacttctacatcctgacctttattatcggctttggcgcgatcatgctggtcggtgcgaatccggaatataaagacgcggcgggccatctgattggtggtaacaacatggcagcagttcacctggccaatgcggtgggcggcaacctgttcctcggctttatttcagcggttgctttcgccaccattcttgcggtggttgcgggtctgacgctggcgggcgcatcggcggtgtctcacgacctgtacgctaacgtcttcaaaaaaggtgcgaccgaacgtgaagagctgcgggtatcgaaaatcaccgtactgatcctcggtgtgattgccattatcctcggcgtgctgtttgagaatcagaacatcgcctttatggtggggctggcgtttgccatcgcggcgagctgtaacttcccgatcattctgctttccatgtactggtcgaaactgactacccgtggcgcaatgctgggcggctggttaggactgattactgcggtggtgctgatgatcctcggcccgactatttgggtacagatcctcggtcacgaaaaagccatcttcccgtatgaatacccggcgctgttctctatcagcgtggcattcctcggtatctggttattctcggcaacggataattcagcggaaggtgcgcgcgagcgtgaactgttccgtgcgcagtttatccgttcccagactggctttggcgttgagcagggccgcgcgcattaa

SEQ ID NO: 44589 - protein, 549 aa, Escherichia coli O6
MKRVLTALAATLPFAANAADAISGAVERQPTNWQAIIMFLIFVVFTLGITYWASKRVRSRNDYYTAGGNITGFQNGLAIAGDYMSAASFLGISALVFTSGYDGLIYSLGFLVGWPIILFLIAERLRNLGRYTFADVASYRLKQGPIRILSACGSLVVVALYLIAQMVGAGKLIELLFGLNYHIAVVLVGVLMMMYVLFGGMLATTWVQIIKAVLLLFGASFMAFMVMKHVGFSFNNLFSEAMAVHPKGVDIMKPGGLVKDPISALSLGLGLMFGTAGLPHILMHFFTVSDAREARKSVFYATGFMGYFYILTFIIGFGAIMLVGANPEYKDAAGHLIGGNNMAAVHLANAVGGNLFLGFISAVAFATILAVVAGLTLAGASAVSHDLYANVFKKGATEREELRVSKITVLILGVIAIILGVLFENQNIAFMVGLAFAIAASCNFPIILLSMYWSKLTTRGAMLGGWLGLITAVVLMILGPTIWVQILGHEKAIFPYEYPALFSISVAFLGIWLFSATDNSAEGARERELFRAQFIRSQTGFGVEQGRAH

SEQ ID NO: 44590 - DNA, 1650 bp, Salmonella paratyphi
  CDS (1)..(1650): transl_table=11
atgaagagagttctgacggcgctcgccgccgcactccccttcgccgctcatgcggcggatgccattagcggcgcggttgaacgccagcccaccaactggcaggcgattatcatgtttttgattttcgtcgtgtttacgctcggtattacctactgggcctctaaacgcgtacgttcccgtagcgactactacaccgctggcggcaatatcaccgggttccagaacggcctggcgattgccggcgactatatgtccgccgcgtcatttctcggcatttccgcgctggtgtttacctccggttatgacgggctgatctattcgctgggcttccttgtcggctggccaattatcctgtttttgattgccgagcgcctgcgtaatctgggacgttatacttttgctgacgttgcctcttatcgcctgaaacaggggccaatccgtattctttcggcctgtggctccctggtagtggtggcgctttatctcatcgcccaaatggtcggcgccggtaaactgattgaactgctgttcggcctcaactatcacatcgccgtggtgctggtcggcgtgctgatgatgatgtacgtgctgttcggcgggatgctggcgacaacgtgggtgcaaattatcaaagccgtcctgttgctgtttggcgccagttttatggcctttatggtgatgaaacacgtcggctttagcttcaataatctgtttaccgaagccatggcggtacacccgaaaggcacggcgattatgagcccaggagggttggtgcaagatccgatttcggcgctgtcgttgggtctggggctgatgttcggcaccgccggcttgccgcatattctgatgcgtttctttacggtcagcgatgcccgcgaagcgcgcaagagcgtgttctacgccaccggttttatgggctatttctacattctgacctttattatcggcttcggcgctatcatgctggtgggggcgaatccagcctataaagatgccgcgggcgcgctgattggcggcaataacatggcggcggtacatctggccaacgcggtaggcggtaacctgttcctcggctttatttcggcagtggcgtttgccaccattctggcggtggttgctggtctgacgctggcgggcgcatcggcggtgtcgcatgatttgtacgccaacgtgttccgcaaaggcgcaaccgaacgtgaagagctgaaggtgtcgaaaatcaccgtcctggtgctgggcgtgatcgccattatcctcggcgtcctgtttgaaaatcagaacatcgcctttatggtgggcctggcgtttgctatcgccgcgagctgcaacttccccatcattctgctttccatgtactggtcaaaactgaccacgcgcggcgctatgctgggcggctggttaggtttactgacagcggtggtgctgatgattcttggccctaccatttgggtgcagatcctcggccacgaaaaagcgatcttcccgtatgagtatccggcgctgttctctatcagcgtggcgttcctggggatctggttcttctcggccaccgataactcggcagaaggcaaccgtgaacgtgagcagttccgcgctcagtttatccgctcccaaacgggattcggcgtacaacaagggcgtgcgcattaa

SEQ ID NO: 44591 - protein, 549 aa, Salmonella paratyphi
MKRVLTALAAALPFAAHAADAISGAVERQPTNWQAIIMFLIFVVFTLGITYWASKRVRSRSDYYTAGGNITGFQNGLAIAGDYMSAASFLGISALVFTSGYDGLIYSLGFLVGWPIILFLIAERLRNLGRYTFADVASYRLKQGPIRILSACGSLVVVALYLIAQMVGAGKLIELLFGLNYHIAVVLVGVLMMMYVLFGGMLATTWVQIIKAVLLLFGASFMAFMVMKHVGFSFNNLFTEAMAVHPKGTAIMSPGGLVQDPISALSLGLGLMFGTAGLPHILMRFFTVSDAREARKSVFYATGFMGYFYILTFIIGFGAIMLVGANPAYKDAAGALIGGNNMAAVHLANAVGGNLFLGFISAVAFATILAVVAGLTLAGASAVSHDLYANVFRKGATEREELKVSKITVLVLGVIAIILGVLFENQNIAFMVGLAFAIAASCNFPIILLSMYWSKLTTRGAMLGGWLGLLTAVVLMILGPTIWVQILGHEKAIFPYEYPALFSISVAFLGIWFFSATDNSAEGNREREQFRAQFIRSQTGFGVQQGRAH

SEQ ID NO: 44592 - DNA, 1650 bp, Shigella flexneri
  CDS (1)..(1650): transl_table=11
atgaaaagagttctgacggcgcttgccgccacactccctttcgcagctaacgccgcggatgctattagcggggccgtagagcgccagccaacgaactggcaggcgattattatgttcctgattttcgtcgtgtttacgctcggcattacctactgggcatcaaaacgcgtacgttctcgtagcgactactacaccgcaggcggcaatatcactggcttccagaacgggctggcgattgccggggactatatgtccgccgcctcattcttggggatctccgcgctggtgtttacctccggctatgacgggctgatctactcgttgggcttcctggtgggctggccaatcattctgtttctgattgccgaacgtctgcgtaacctgggacgctacacctctgccgatgtggcctcttatcgtctgaaacaagggccgattcgtattctttcggcctgtggttctctggtagtggtggcgctttaccttatcgctcagatggtaggcgcaggtaaactgatcgagctgctgtttggccttaactatcacattgcggtggtgctggtcggcgtgctgatgatgatgtacgtcctgttcggcggcatgctggcgaccacctgggtacaaattatcaaagctgtgctgttgctgttcggtgccagctttatggcctttatggtgatgaaacacgtcggctttagcttcaacaatctgttcagcgaagcgatggcggtacacccgaaaggtgtcgacatcatgaaaccgggcggactggtgaaagatccgatctccgcgctctctctggggctgggactgatgtttggtacggcgggcttgccgcacattctgatgcgcttctttacagtcagcgatgcccgcgaagcacgtaagagcgtgttctacgccaccggatttatgggctacttctatattctgacctttattatcggcttcggcgcgatcatgcttgttggtgcgaatccggaatataaagacgcggcgggccatctgattggtggtaacaacatggcggccgttcacctggcgaatgcagtgggcggcaacctattcctcggttttatttcagcggttgctttcgccactatcctcgcggtggttgcggatctgacgctggcgggcgcatcggcggtttcgcatgacttgtacgctaacgtcttcaaaaaaggcgcgaccgaacgtgaagagctgcgggtatcaaaaatcaccgtactgatcctcggcgtgattgcgattatcctcggcgtgctgtttgagaatcagaacatcgcctttatggtaggccttgcgtttgccatcgcggcgagctgtaacttcccgatcattctgctttccatgtactggtcgaaactgactacccgtggcgcgatgctgggcggctggctggggctgattaccgcagtggtgctgatgatcctcggcccgactatttgggtacagatcctcggtcacgaaaaagccatcttcccgtatgaatacccggcgctgttctctatcagcgtggcattcctcggcatctggttcttctcggcaaccgataactcagcggaaggggcgcgcgagcgtgaactgttccgcgcgcagtttatccgctcccagaccggctttggcgttgagcaaggccgcgcacattaa

SEQ ID NO: 44593 - protein, 549 aa, Shigella flexneri
MKRVLTALAATLPFAANAADAISGAVERQPTNWQAIIMFLIFVVFTLGITYWASKRVRSRSDYYTAGGNITGFQNGLAIAGDYMSAASFLGISALVFTSGYDGLIYSLGFLVGWPIILFLIAERLRNLGRYTSADVASYRLKQGPIRILSACGSLVVVALYLIAQMVGAGKLIELLFGLNYHIAVVLVGVLMMMYVLFGGMLATTWVQIIKAVLLLFGASFMAFMVMKHVGFSFNNLFSEAMAVHPKGVDIMKPGGLVKDPISALSLGLGLMFGTAGLPHILMRFFTVSDAREARKSVFYATGFMGYFYILTFIIGFGAIMLVGANPEYKDAAGHLIGGNNMAAVHLANAVGGNLFLGFISAVAFATILAVVADLTLAGASAVSHDLYANVFKKGATEREELRVSKITVLILGVIAIILGVLFENQNIAFMVGLAFAIAASCNFPIILLSMYWSKLTTRGAMLGGWLGLITAVVLMILGPTIWVQILGHEKAIFPYEYPALFSISVAFLGIWFFSATDNSAEGARERELFRAQFIRSQTGFGVEQGRAH

SEQ ID NO: 44594 - DNA, 1656 bp, Yersinia pestis
  CDS (1)..(1656): transl_table=11
atgaagatccgccattggtctgcactttctttattcgttttgcctgcgctggcacaggcggaagcacttaccggcgaggtccatcgccaaccccttaatattcaggcgatcgtcatgtttttgctgtttgttggcggaaccttgtatatcacctattgggcatcaaaacgtactcgctcccggcaagattattacacggctggcgggcgaattactggctttcaaaatggtttagccatcgctggggattatatgtccgcagcatcattcctcggtatttcagccttggtttatgcttccggttacgacggtttaatttactccatcggcttcttaatcggctggcccattattctatttttaattgctgaacgcctgcgtaatttgggccgttatacctttgccgatgttgcctcttaccgcttgcaacaaagacccatacgcacattatcagcctgtggttcgttagtcgttgtcgccctgtatttgatcgctcagatggtgggggcgggtaaactcattcaacttttatttggtttgaactaccacgtcgctgtcgtattggttggtatcctgatggtgctgtacgtcctgttcggcggtatgttagcaaccacttgggtacagataatcaaagcggtcatgctactgtctggtgccacatttatggctattatggtcatgaagtcagttaattttaacttcaatacattattcagtgaggcggttaaggttcatcccaaaggcctcagcatcatgagcccaggagggttggtatctgacccgatatcagcgttatctcttgggttagccctcatgtttggcactgctggcttacctcatatcctgatgcgcttctttaccgtaagcgatgccaaagaagcacgtaaaagcgtgttctatgccacaggttttatcggctacttctacatattgacctttattattggattcggcgcgatcttactcgtcggtccaaaccagacatttaaagatgcggctggcgcattactgggtggtaacaatatggctgcggtccatttggctaatgctgtcggggggagcttcttcttaggctttatctcagcggttgccttcgcaaccattttggctgtagtggctggcttgacattagccggtgcatcggcggtatctcatgatctctatgccagcgtcattaagaaaggcaaagccaatgaacgcgatgaattgagagtctccaaaattacagtaatcatcttaggtattgtcgctatcggtttggggattttgtttgaaaaccagaatattgcctttatggtcgggttggcattctccattgcggccagttgtaacttcccaattattatcatctcaatgtattgggataaactgacaacccgtggagcaatgatcggtgggtggctcgggttatcaacggcagtgatcctgatgattttaggccctacgatctgggtaacaatccttggtcatgaaaagccaatctatccgtatgagtaccctgcattgttttcaatgatagcggcgttcgtcggtacctggttcttctcaatcacggataactcagaaaccggcaaacaggaacggttactattcaaatcacagtttgtccgttcacaaaccggcttgggggcatctaaaggcggcgctcactga

SEQ ID NO: 44595 - protein, 551 aa, Yersinia pestis
MKIRHWSALSLFVLPALAQAEALTGEVHRQPLNIQAIVMFLLFVGGTLYITYWASKRTRSRQDYYTAGGRITGFQNGLAIAGDYMSAASFLGISALVYASGYDGLIYSIGFLIGWPIILFLIAERLRNLGRYTFADVASYRLQQRPIRTLSACGSLVVVALYLIAQMVGAGKLIQLLFGLNYHVAVVLVGILMVLYVLFGGMLATTWVQIIKAVMLLSGATFMAIMVMKSVNFNFNTLFSEAVKVHPKGLSIMSPGGLVSDPISALSLGLALMFGTAGLPHILMRFFTVSDAKEARKSVFYATGFIGYFYILTFIIGFGAILLVGPNQTFKDAAGALLGGNNMAAVHLANAVGGSFFLGFISAVAFATILAVVAGLTLAGASAVSHDLYASVIKKGKANERDELRVSKITVIILGIVAIGLGILFENQNIAFMVGLAFSIAASCNFPIIIISMYWDKLTTRGAMIGGWLGLSTAVILMILGPTIWVTILGHEKPIYPYEYPALFSMIAAFVGTWFFSITDNSETGKQERLLFKSQFVRSQTGLGASKGGAH

SEQ ID NO: 44596 - DNA, 1656 bp, Yersinia pseudotuberculosis
  CDS (1)..(1656): transl_table=11
atgaagatccgccattggtctgcactttctttattcgttttgcctgcgctagcacaggcggaagcacttaccggcgaggtccaccgccaacccctcaatattcaggcgatcgtcatgtttttgctgtttgttggcggaaccttgtatatcacctattgggcatcaaaacgtactcgctcccggcaagattattacacggctggcgggcgaattactggctttcaaaatggtttagccatcgctggggattatatgtccgcagcatcattcctcggtatttcagccttggtttatgcttccggttacgacggtttaatttactccatcggcttcttaatcggctggcccattattctatttttaattgctgaacgcctgcgtaatttgggccgttataccttcgctgatgttgcctcttaccgcttgcaacaaagacccatacgcacattatcagcctgtggttcgttagtcgttgtcgccctgtatttgatcgctcagatggtgggggcaggtaaactcattcaacttttatttggtttgaactaccacgtcgctgtcgtgttggttggtatcctgatggtgctgtacgtcctgttcggcggtatgttagcaaccacttgggtacagataatcaaagcggtcatgctactgtctggtgccacatttatggctattatggtcatgaaatcagttaattttaacttcaatacgttattcagtgaggcggttaaagttcatcccaaaggccttagcatcatgagcccaggagggttggtatctgacccgatatcagcattatctcttggtttggccctcatgtttggcactgctggcttacctcatatcctgatgcgcttctttaccgtaagcgatgccaaagaagcacgtaaaagcgtgttctatgccacaggttttataggctacttctacatattgacctttattattggattcggcgcgatcttactcgtcggtccaaaccagacatttaaagatgcggctggcgcattactgggtggtaacaatatggctgcggtccatttggctaatgctgtcggggggagcttcttcttaggctttatctcagcggttgccttcgcaaccattttggctgtagtggctggcttgacattagccggtgcatcggcggtatctcatgatctctatgccagcgtcattaagaaaggcaaagccaatgaacgcgatgaattgagagtctccaaaattacggtaatcatcttaggtatcgtcgctattggtttggggattttgtttgaaaaacagaatattgcctttatggtcgggttggcattctccattgcggccagttgtaacttcccaattattatcatctcaatgtattgggataaactgacaacccgtggagcaatgatcggtgggtggctcgggttatcaacggcagtgatcctgatgattttaggccctacgatctgggtaacaatccttggtcatgaaaagccaatctatccgtatgagtaccctgcattgttttcaatgatagcggcgttcgtcggtacctggttcttctcaatcacggataactcagaaaccggcaaacaggaacggttactattcaaatcacagtttgtccgttcacaaaccggcttgggggcatctaaaggcggcgctcactga

SEQ ID NO: 44597 - protein, 551 aa, Yersinia pseudotuberculosis
MKIRHWSALSLFVLPALAQAEALTGEVHRQPLNIQAIVMFLLFVGGTLYITYWASKRTRSRQDYYTAGGRITGFQNGLAIAGDYMSAASFLGISALVYASGYDGLIYSIGFLIGWPIILFLIAERLRNLGRYTFADVASYRLQQRPIRTLSACGSLVVVALYLIAQMVGAGKLIQLLFGLNYHVAVVLVGILMVLYVLFGGMLATTWVQIIKAVMLLSGATFMAIMVMKSVNFNFNTLFSEAVKVHPKGLSIMSPGGLVSDPISALSLGLALMFGTAGLPHILMRFFTVSDAKEARKSVFYATGFIGYFYILTFIIGFGAILLVGPNQTFKDAAGALLGGNNMAAVHLANAVGGSFFLGFISAVAFATILAVVAGLTLAGASAVSHDLYASVIKKGKANERDELRVSKITVIILGIVAIGLGILFEKQNIAFMVGLAFSIAASCNFPIIIISMYWDKLTTRGAMIGGWLGLSTAVILMILGPTIWVTILGHEKPIYPYEYPALFSMIAAFVGTWFFSITDNSETGKQERLLFKSQFVRSQTGLGASKGGAH

SEQ ID NO: 44598 - DNA, 22 bp, Artificial sequence
  primer
atgaaaagagttctgacggcgc

SEQ ID NO: 44599 - DNA, 21 bp, Artificial sequence
  primer
ttaatgcgcgcggccttgctc

SEQ ID NO: 44600 - protein, 619 aa, Artificial sequence
  consensus sequence
  Variant (3)..(4): Xaa in position 3 to 4 is any amino acid
  Variant (6)..(7): Xaa in position 6 to 7 is any amino acid
  Variant (10)..(11): Xaa in position 10 to 11 is any amino acid
  Variant (14)..(15): Xaa in position 14 to 15 is any amino acid
  Variant (17)..(17): Xaa in position 17 is any amino acid
  Variant (20)..(29): Xaa in position 20 to 29 is any amino acid
  Variant (30)..(30): Xaa in position 30 is any or no amino acid
  Variant (32)..(32): Xaa in position 32 is any amino acid
  Variant (36)..(38): Xaa in position 36 to 38 is any amino acid
  Variant (40)..(40): Xaa in position 40 is any amino acid
  Variant (51)..(51): Xaa in position 51 is any amino acid
  Variant (60)..(66): Xaa in position 60 to 66 is any amino acid
  Variant (68)..(68): Xaa in position 68 is any amino acid
  Variant (71)..(72): Xaa in position 71 to 72 is any amino acid
  Variant (74)..(75): Xaa in position 74 to 75 is any amino acid
  Variant (77)..(80): Xaa in position 77 to 80 is any amino acid
  Variant (83)..(85): Xaa in position 83 to 85 is any amino acid
  Variant (88)..(88): Xaa in position 88 is any amino acid
  Variant (91)..(91): Xaa in position 91 is any amino acid
  Variant (97)..(98): Xaa in position 97 to 98 is any amino acid
  Variant (100)..(100): Xaa in position 100 is any amino acid
  Variant (104)..(106): Xaa in position 104 to 106 is any amino acid
  Variant (108)..(113): Xaa in position 108 to 113 is any amino acid
  Variant (115)..(117): Xaa in position 115 to 117 is any amino acid
  Variant (119)..(121): Xaa in position 119 to 121 is any amino acid
  Variant (123)..(127): Xaa in position 123 to 127 is any amino acid
  Variant (130)..(130): Xaa in position 130 is any amino acid
  Variant (138)..(138): Xaa in position 138 is any amino acid
  Variant (140)..(141): Xaa in position 140 to 141 is any amino acid
  Variant (146)..(147): Xaa in position 146 to 147 is any amino acid
  Variant (148)..(152): Xaa in position 148 to 152 is any or no amino acid
  Variant (154)..(155): Xaa in position 154 to 155 is any amino acid
  Variant (157)..(159): Xaa in position 157 to 159 is any amino acid
  Variant (162)..(162): Xaa in position 162 is any amino acid
  Variant (165)..(166): Xaa in position 165 to 166 is any amino acid
  Variant (169)..(169): Xaa in position 169 is any amino acid
  Variant (174)..(174): Xaa in position 174 is any amino acid
  Variant (185)..(186): Xaa in position 185 to 186 is any amino acid
  Variant (189)..(189): Xaa in position 189 is any amino acid
  Variant (191)..(203): Xaa in position 191 to 203 is any amino acid
  Variant (205)..(205): Xaa in position 205 is any amino acid
  Variant (206)..(222): Xaa in position 206 to 222 is any or no amino acid
  Variant (224)..(232): Xaa in position 224 to 232 is any amino acid
  Variant (233)..(251): Xaa in position 233 to 251 is any or no amino acid
  Variant (254)..(255): Xaa in position 254 to 255 is any amino acid
  Variant (256)..(262): Xaa in position 256 to 262 is any or no amino acid
  Variant (264)..(267): Xaa in position 264 to 267 is any amino acid
  Variant (269)..(269): Xaa in position 269 is any amino acid
  Variant (271)..(272): Xaa in position 271 to 272 is any amino acid
  Variant (274)..(274): Xaa in position 274 is any amino acid
  Variant (291)..(292): Xaa in position 291 to 292 is any amino acid
  Variant (294)..(295): Xaa in position 294 to 295 is any amino acid
  Variant (298)..(298): Xaa in position 298 is any amino acid
  Variant (301)..(302): Xaa in position 301 to 302 is any amino acid
  Variant (304)..(307): Xaa in position 304 to 307 is any amino acid
  Variant (309)..(309): Xaa in position 309 is any amino acid
  Variant (312)..(317): Xaa in position 312 to 317 is any amino acid
  Variant (322)..(324): Xaa in position 322 to 324 is any amino acid
  Variant (326)..(334): Xaa in position 326 to 334 is any amino acid
  Variant (335)..(348): Xaa in position 335 to 348 is any or no amino acid
  Variant (350)..(351): Xaa in position 350 to 351 is any amino acid
  Variant (354)..(354): Xaa in position 354 is any amino acid
  Variant (356)..(357): Xaa in position 356 to 357 is any amino acid
  Variant (360)..(362): Xaa in position 360 to 362 is any amino acid
  Variant (365)..(368): Xaa in position 365 to 368 is any amino acid
  Variant (369)..(375): Xaa in position 369 to 375 is any or no amino acid
  Variant (378)..(379): Xaa in position 378 to 379 is any amino acid
  Variant (394)..(394): Xaa in position 394 is any amino acid
  Variant (396)..(396): Xaa in position 396 is any amino acid
  Variant (399)..(402): Xaa in position 399 to 402 is any amino acid
  Variant (405)..(405): Xaa in position 405 is any amino acid
  Variant (408)..(408): Xaa in position 408 is any amino acid
  Variant (410)..(412): Xaa in position 410 to 412 is any amino acid
  Variant (414)..(418): Xaa in position 414 to 418 is any amino acid
  Variant (419)..(419): Xaa in position 419 is any or no amino acid
  Variant (421)..(431): Xaa in position 421 to 431 is any amino acid
  Variant (432)..(437): Xaa in position 432 to 437 is any or no amino acid
  Variant (439)..(440): Xaa in position 439 to 440 is any amino acid
  Variant (442)..(443): Xaa in position 442 to 443 is any amino acid
  Variant (446)..(447): Xaa in position 446 to 447 is any amino acid
  Variant (449)..(451): Xaa in position 449 to 451 is any amino acid
  Variant (452)..(452): Xaa in position 452 is any or no amino acid
  Variant (454)..(454): Xaa in position 454 is any amino acid
  Variant (457)..(457): Xaa in position 457 is any amino acid
  Variant (459)..(459): Xaa in position 459 is any amino acid
  Variant (463)..(464): Xaa in position 463 to 464 is any amino acid
  Variant (468)..(468): Xaa in position 468 is any amino acid
  Variant (470)..(470): Xaa in position 470 is any amino acid
  Variant (472)..(475): Xaa in position 472 to 475 is any amino acid
  Variant (477)..(478): Xaa in position 477 to 478 is any amino acid
  Variant (480)..(482): Xaa in position 480 to 482 is any amino acid
  Variant (485)..(485): Xaa in position 485 is any amino acid
  Variant (488)..(489): Xaa in position 488 to 489 is any amino acid
  Variant (491)..(493): Xaa in position 491 to 493 is any amino acid
  Variant (496)..(500): Xaa in position 496 to 500 is any amino acid
  Variant (502)..(512): Xaa in position 502 to 512 is any amino acid
  Variant (513)..(567): Xaa in position 513 to 567 is any or no amino acid
  Variant (569)..(571): Xaa in position 569 to 571 is any amino acid
  Variant (573)..(575): Xaa in position 573 to 575 is any amino acid
  Variant (577)..(580): Xaa in position 577 to 580 is any amino acid
  Variant (582)..(587): Xaa in position 582 to 587 is any amino acid
  Variant (589)..(598): Xaa in position 589 to 598 is any amino acid
  Variant (599)..(612): Xaa in position 599 to 612 is any or no amino acid
  Variant (614)..(615): Xaa in position 614 to 615 is any amino acid
  Variant (618)..(618): Xaa in position 618 is any amino acid
AIXXFXXFVXXTLXXTXWAXXXXXXXXXXXYXAGGXXXGXQNGLAIAGDYXSAASFLGIXXXXXXXGXDGXXYXXGXXXXWPXXXFLXAEXLRNLGXXTXADVXXXRXXXXXXRXXXAXXXLXXXXXYLXAQMVGAGXLXXLLFGXXXXXXXYXXAXXXVGXLMXXYVXFGGMXATTWVQIIKAXXLLXGXXXXXXXXXXXXXFXXXXXXXXXXXXXXXXXXAXXXXXXXXXXXXXXXXXXXXXXXXXXXXPGXXXXXXXXXPXXXXSXGXXLXFGTAGLPHILMRFFTVXXAXXARXSVXXAXXXXGXFYXXXXXXGFGAXXXVXXXXXXXXXXXXXXXXXXXXXXXGXXNMXAXXLAXXXGGXXXXXXXXXXXGFXXAVAFATILAVVAGLXLXGAXXXXHDXYAXVXXXGXXXXXXEXXXXXXXXXXXXXXXXXGXXAXXLGXXFXXXXNXAFXVXLAFXXAASXNXPXXXXSXXWXXXTTXGAXXGXXXGLXXXXXLXXXXXXXXXXXXXXXXXXXXXXXXXXXXXXXXXXXXXXXXXXXXXXXXXXXXXXXXXXXXXXXXXXPXXXPXXXSXXXXFXXXXXXSXXXXXXXXXXXXXXXXXXXXXXXXRXXTGXG

SEQ ID NO: 44601 - protein, 38 aa, Artificial sequence
  protein pattern
  Variant (8)..(8): Xaa in position 8 is Ile or Val
  Variant (11)..(11): Xaa in position 11 is His or Arg
  Variant (13)..(13): Xaa in position 13 is any amino acid
  Variant (16)..(16): Xaa in position 16 is any amino acid
  Variant (17)..(17): Xaa in position 17 is Asp, Asn, Ser or Thr
  Variant (18)..(18): Xaa in position 18 is Ala, Thr or Val
  Variant (19)..(19): Xaa in position 19 is any amino acid
  Variant (20)..(20): Xaa in position 20 is Ala, Glu, Gln or Thr
  Variant (23)..(23): Xaa in position 23 is any amino acid
  Variant (25)..(25): Xaa in position 25 is Ile or Val
  Variant (26)..(27): Xaa in position 26 to 27 is any amino acid
  Variant (28)..(28): Xaa in position 28 is Ala or Gly
  Variant (29)..(31): Xaa in position 29 to 31 is any amino acid
  Variant (32)..(32): Xaa in position 32 is Ile, Met or Val
  Variant (33)..(33): Xaa in position 33 is Ala, Gly or Ser
  Variant (34)..(35): Xaa in position 34 to 35 is any amino acid
  Variant (36)..(36): Xaa in position 36 is Phe or Tyr
  Variant (37)..(37): Xaa in position 37 is any amino acid
  Variant (38)..(38): Xaa in position 38 is Phe, Leu, Met or Val
GTAGLPHXLMXFXTVXXXXXARXSXXXXXXXXXXXXXX

SEQ ID NO: 44602 - protein, 40 aa, Artificial sequence
  protein pattern
  Variant (4)..(4): Xaa in position 4 is any amino acid
  Variant (6)..(6): Xaa in position 6 is Ile, Leu or Met
  Variant (10)..(10): Xaa in position 10 is any amino acid
  Variant (11)..(11): Xaa in position 11 is Ile, Leu, Met or Val
  Variant (15)..(15): Xaa in position 15 is Ala, Ser or Thr
  Variant (16)..(16): Xaa in position 16 is Phe or Leu
  Variant (19)..(19): Xaa in position 19 is Ile or Leu
  Variant (20)..(20): Xaa in position 20 is Ala, Ser, Thr or Val
  Variant (21)..(21): Xaa in position 21 is Ala, Gly or Ser
  Variant (22)..(22): Xaa in position 22 is any amino acid
  Variant (23)..(23): Xaa in position 23 is Ile, Met or Val
  Variant (24)..(26): Xaa in position 24 to 26 is any amino acid
  Variant (28)..(28): Xaa in position 28 is Phe or Tyr
  Variant (31)..(35): Xaa in position 31 to 35 is any amino acid
  Variant (36)..(39): Xaa in position 36 to 39 is any or no amino acid
QNGXAXAGDXXSAAXXLGXXXXXXXXGXDGXXXXXXXXXG

SEQ ID NO: 44603 - protein, 55 aa, Artificial sequence
  protein pattern
  Variant (2)..(2): Xaa in position 2 is any or no amino acid
  Variant (5)..(5): Xaa in position 5 is any amino acid
  Variant (7)..(7): Xaa in position 7 is any amino acid
  Variant (8)..(8): Xaa in position 8 is Phe or Tyr
  Variant (10)..(10): Xaa in position 10 is any amino acid
  Variant (11)..(11): Xaa in position 11 is Ala, Gly, Ser or Val
  Variant (13)..(13): Xaa in position 13 is Ile, Met or Val
  Variant (14)..(14): Xaa in position 14 is any amino acid
  Variant (15)..(15): Xaa in position 15 is Ala, Gly or Ser
  Variant (16)..(16): Xaa in position 16 is any amino acid
  Variant (18)..(18): Xaa in position 18 is Phe, Leu or Met
  Variant (19)..(22): Xaa in position 19 to 22 is any amino acid
  Variant (23)..(23): Xaa in position 23 is Ile or Val
  Variant (25)..(26): Xaa in position 25 to 26 is any amino acid
  Variant (27)..(27): Xaa in position 27 is Ala, Ser or Thr
  Variant (28)..(28): Xaa in position 28 is Ala, Gly or Ser
  Variant (29)..(29): Xaa in position 29 is any amino acid
  Variant (30)..(30): Xaa in position 30 is Ala, Gly, Asn or Ser
  Variant (31)..(31): Xaa in position 31 is Ala, Ser or Thr
  Variant (32)..(32): Xaa in position 32 is Ile, Leu or Val
  Variant (33)..(37): Xaa in position 33 to 37 is any amino acid
  Variant (39)..(39): Xaa in position 39 is Leu or Met
  Variant (40)..(40): Xaa in position 40 is Ile, Leu, Met or Val
  Variant (41)..(41): Xaa in position 41 is Ala, Ser or Val
  Variant (44)..(44): Xaa in position 44 is Ala or Val
  Variant (46)..(46): Xaa in position 46 is Ala or Ser
  Variant (48)..(48): Xaa in position 48 is any amino acid
  Variant (50)..(50): Xaa in position 50 is Ile or Val
  Variant (51)..(51): Xaa in position 51 is any amino acid
  Variant (52)..(52): Xaa in position 52 is Leu or Val
  Variant (53)..(53): Xaa in position 53 is Leu or Met
  Variant (54)..(54): Xaa in position 54 is Phe or Leu
  Variant (55)..(55): Xaa in position 55 is Asp, Gly or Asn
LXRNXGXXTXXDXXXXRXXXXXXRXXXXXXXXXXXXXYXXXQMXGXGXLXXXXXX

SEQ ID NO: 44604 - protein, 34 aa, Artificial sequence
  protein pattern
  Variant (2)..(2): Xaa in position 2 is Phe, Ile or Val
  Variant (3)..(3): Xaa in position 3 is Ile, Leu, Met or Val
  Variant (4)..(4): Xaa in position 4 is Ala, Cys or Ser
  Variant (7)..(8): Xaa in position 7 to 8 is any or no amino acid
  Variant (10)..(11): Xaa in position 10 to 11 is any or no amino acid
  Variant (18)..(18): Xaa in position 18 is Ala or Ser
  Variant (21)..(21): Xaa in position 21 is Ala or Thr
  Variant (22)..(22): Xaa in position 22 is Ile or Leu
  Variant (23)..(23): Xaa in position 23 is Ala, Ser or Thr
  Variant (24)..(24): Xaa in position 24 is Ala or Gly
  Variant (25)..(25): Xaa in position 25 is Ala or Ser
  Variant (26)..(26): Xaa in position 26 is Ala, Gly, Ser or Thr
  Variant (27)..(27): Xaa in position 27 is Ala, Ser or Thr
  Variant (28)..(28): Xaa in position 28 is Phe, Ile, Leu or Val
  Variant (29)..(29): Xaa in position 29 is Ala or Ser
  Variant (32)..(32): Xaa in position 32 is Ile, Leu or Val
  Variant (33)..(33): Xaa in position 33 is Phe, Trp or Tyr
  Variant (34)..(34): Xaa in position 34 is Ala, Gly, Ser or Val
GXXXAVXXAXXTILAVVXGLXXXXXXXXXHDXXX

SEQ ID NO: 44605 - protein, 43 aa, Artificial sequence
  protein pattern
  Variant (2)..(5): Xaa in position 2 to 5 is any amino acid
  Variant (6)..(7): Xaa in position 6 to 7 is any or no amino acid
  Variant (9)..(9): Xaa in position 9 is any amino acid
  Variant (10)..(11): Xaa in position 10 to 11 is any or no amino acid
  Variant (13)..(13): Xaa in position 13 is any amino acid
  Variant (14)..(14): Xaa in position 14 is Ile, Leu or Met
  Variant (15)..(15): Xaa in position 15 is Ser or Val
  Variant (16)..(16): Xaa in position 16 is any amino acid
  Variant (18)..(18): Xaa in position 18 is Ala, Thr or Val
  Variant (19)..(19): Xaa in position 19 is Phe or Leu
  Variant (20)..(20): Xaa in position 20 is Ala, Gly, Ser or Val
  Variant (21)..(21): Xaa in position 21 is Ile or Val
  Variant (23)..(24): Xaa in position 23 to 24 is Ala, Cys or Ser
  Variant (25)..(25): Xaa in position 25 is Ala, Cys, Gly, Ser or Val
  Variant (27)..(27): Xaa in position 27 is Phe or Leu
  Variant (29)..(29): Xaa in position 29 is any amino acid
  Variant (30)..(30): Xaa in position 30 is Ile, Leu or Val
  Variant (31)..(31): Xaa in position 31 is Phe, Ile, Leu, Met or Val
  Variant (32)..(32): Xaa in position 32 is any amino acid
  Variant (34)..(34): Xaa in position 34 is Ile, Leu, Met or Val
  Variant (35)..(35): Xaa in position 35 is any amino acid
  Variant (37)..(39): Xaa in position 37 to 39 is any amino acid
  Variant (40)..(40): Xaa in position 40 is Asn, Ser or Thr
  Variant (41)..(41): Xaa in position 41 is Ala or Thr
  Variant (42)..(42): Xaa in position 42 is any amino acid
GXXXXXXNXXXAXXXXLXXXXAXXXNXPXXXXSXXWXXXXXXG

SEQ ID NO: 44606 - protein, 40 aa, Artificial sequence
  protein pattern
  Variant (2)..(2): Xaa in position 2 is any or no amino acid
  Variant (4)..(4): Xaa in position 4 is any amino acid
  Variant (7)..(8): Xaa in position 7 to 8 is any amino acid
  Variant (11)..(11): Xaa in position 11 is any amino acid
  Variant (12)..(12): Xaa in position 12 is Phe, Ile, Met or Val
  Variant (16)..(16): Xaa in position 16 is any amino acid
  Variant (17)..(17): Xaa in position 17 is Ala or Gly
  Variant (21)..(21): Xaa in position 21 is Ile or Val
  Variant (23)..(23): Xaa in position 23 is Ile, Met or Val
  Variant (24)..(24): Xaa in position 24 is Ile or Val
  Variant (26)..(26): Xaa in position 26 is Ala or Ser
  Variant (27)..(27): Xaa in position 27 is any amino acid
  Variant (28)..(28): Xaa in position 28 is Ile, Leu or Met
  Variant (30)..(35): Xaa in position 30 to 35 is any amino acid
  Variant (36)..(36): Xaa in position 36 is Leu, Met or Val
  Variant (37)..(39): Xaa in position 37 to 39 is any amino acid
  Variant (40)..(40): Xaa in position 40 is Ala, Ile or Val
VXGXLMXXYVXXGGMXXTTWXQXXKXXXLXXXXXXXXXXX

SEQ ID NO: 44607 - protein, 14 aa, Artificial sequence
  protein pattern
  Variant (2)..(4): Xaa in position 2 to 4 is any amino acid
  Variant (6)..(6): Xaa in position 6 is Ala or Gly
  Variant (7)..(7): Xaa in position 7 is Ile or Leu
  Variant (8)..(8): Xaa in position 8 is Phe, Ile, Leu or Val
  Variant (9)..(9): Xaa in position 9 is Ala, Ser or Thr
  Variant (10)..(10): Xaa in position 10 is Ile, Met or Val
  Variant (11)..(11): Xaa in position 11 is any amino acid
  Variant (12)..(12): Xaa in position 12 is Ala, Ile, Leu or Val
  Variant (13)..(13): Xaa in position 13 is Ala, Gly, Ser or Thr
PXXXPXXXXXXXXF

SEQ ID NO: 44608 - protein, 15 aa, Artificial sequence
  protein pattern
  Variant (2)..(2): Xaa in position 2 is any amino acid
  Variant (3)..(3): Xaa in position 3 is Phe, Ile, Leu or Met
  Variant (5)..(6): Xaa in position 5 to 6 is any amino acid
  Variant (9)..(11): Xaa in position 9 to 11 is any or no amino acid
  Variant (13)..(13): Xaa in position 13 is any amino acid
  Variant (14)..(14): Xaa in position 14 is Ile, Leu or Val
  Variant (15)..(15): Xaa in position 15 is Thr or Val
IXXFXXFVXXXLXXX

SEQ ID NO: 44609 - DNA, 630 bp, Escherichia coli
  CDS (1)..(630): transl_table=11
atgacccgcacactcaagccgttaattcttaacaccagcgcactgacgctaacgttaatcctgatttataccggcatttcggcccatgacaaactcacctggctgatggaagtgacaccggtgattattgtcgtgcagctactgcttgccaccgccagacgttatccgttaacgccgctgctctatacgctcattttccttcacgccatcatcctgatggtcggcggacaatacacctacgcgaaagtccccgttggttttgaggtgcaggaatggctggggttgagtcgtaatccgtatgacaagctggggcactttttccaggggctggtgcctgcactggtggcacgagaaattctcgttcgcgggatgtacgtgcgcggacgtaaaatggtggcgttcctggtctgctgcgtggcgctggcgataagcgcgatgtatgaattaatcgagtggtgggcagcgctggcaatgggtcagggagcggatgattttctcggcacccagggcgaccagtgggacacgcaatccgatatgttctgcgcgctgcttggcgcattaacgacggtgatattcctcgctcgctttcattgccgccagctacggcgctttggcttgataaccggataa

SEQ ID NO: 44610 - protein, 209 aa, Escherichia coli
MTRTLKPLILNTSALTLTLILIYTGISAHDKLTWLMEVTPVIIVVQLLLATARRYPLTPLLYTLIFLHAIILMVGGQYTYAKVPVGFEVQEWLGLSRNPYDKLGHFFQGLVPALVAREILVRGMYVRGRKMVAFLVCCVALAISAMYELIEWWAALAMGQGADDFLGTQGDQWDTQSDMFCALLGALTTVIFLARFHCRQLRRFGLITG

SEQ ID NO: 44611 - DNA, 588 bp, Vibrio cholerae O1 biovar eltor str. N16961
  CDS (1)..(588): transl_table=11
atgcccttgtcgcgacctctcatcggattgacccttttttatagcttaatttttgttttttcagccatagcacctacttcacgtgcggtttggtttgccgaaatcatccccgccattctggttctggccacaatttggtgggtctcattgcgctggtcaatgagcacgaccgcctatgtcttgatgtttgtttggctctgcttgcataccataggcgcaaaatacaccttcgctgaagtcccttttgactggttcaataccttgatcggctctacacgcaatcaattcgatcgcgtcgcccacttttccatcggtctttatgcttaccctattgcggaatggctgttacgtaagcaacaaacgaaaccttggctagcttacagctttgcactatttagcttgatgagtcttgcagcggcttacgaaattatcgagtggtggtacgccgcgctcgctggcggcgaagaagggatcgcatttttgggctcacaaggggatatttgggatgctcagaaagatatgctgtgcgataccttaggtgccatcaccgcactttgcctacttgcgtggcagcgagccagaggctaa

SEQ ID NO: 44612 - protein, 195 aa, Vibrio cholerae O1 biovar eltor str. N16961
MPLSRPLIGLTLFYSLIFVFSAIAPTSRAVWFAEIIPAILVLATIWWVSLRWSMSTTAYVLMFVWLCLHTIGAKYTFAEVPFDWFNTLIGSTRNQFDRVAHFSIGLYAYPIAEWLLRKQQTKPWLAYSFALFSLMSLAAAYEIIEWWYAALAGGEEGIAFLGSQGDIWDAQKDMLCDTLGAITALCLLAWQRARG

SEQ ID NO: 44613 - DNA, 618 bp, Pasteurella multocida subsp. multocida str. Pm70
  CDS (1)..(618): transl_table=11
atgtccttgaccaccaaacaggtatttccttggctgttagcactcgttgtgcttgtcatcgcgatttggtcgagcattgaacctgtttctcgggcagtgtggtatgctgaagtattacccatttttttggtctttttggctttagtcgtgagctattctcgttttcagttcagcaaccttgcatatttcttaatgagcttatggatggttttacatcttattggtgctcactatacgtttgaacaggtaccttttgagtgggcaaatcgactactcgccccttggttaggcgaaggacgtaatcattttgatcgcgtagcacattatgttattggtttttacagttttcctatggcggaatggttgttacgtcgtcgattatgtggtccgatcttagcgggcttttttgccctattttttattatgagtattgcggcgggctatgagttgattgagtggcaatatgcggtgattgctggtggtgaagagggaattgcctttttaggatcgcagggcgatcagtgggatgcgcaaaaagatattttggcagatacattcggggcgttaagcgcgttggcattgttttatctcgtgagaacggataaaacatgcgcgtaa

SEQ ID NO: 44614 - protein, 205 aa, Pasteurella multocida subsp. multocida str. Pm70
MSLTTKQVFPWLLALVVLVIAIWSSIEPVSRAVWYAEVLPIFLVFLALVVSYSRFQFSNLAYFLMSLWMVLHLIGAHYTFEQVPFEWANRLLAPWLGEGRNHFDRVAHYVIGFYSFPMAEWLLRRRLCGPILAGFFALFFIMSIAAGYELIEWQYAVIAGGEEGIAFLGSQGDQWDAQKDILADTFGALSALALFYLVRTDKTCA

SEQ ID NO: 44615 - DNA, 606 bp, Shewanella oneidensis MR-1
  CDS (1)..(606): transl_table=11
ttgaataataaaattgcttggtgtggtatttacctctcagttttagcgtggtcggcgataaaacctgccgatccctttacttggtggctcgaagccttacccgcattagtggcggttccgctgttattttttacccgcaaacgctttgagttaacaccattagtgtattttttagtcctagttcattgctgtgtgttgtttgtcggggcgcactatacctatgccgaagtgccattatttgacacgattgcccagtggatgggcagtgagcgcaacaattacgacaaagtggggcattttgcccaaggttttattcccgcgatgttagctcgtgagattatgttacgtaatcaagcagttaaaccaggtgcttggtgtgcatttttggccacttgctttgtactcgctttcagtgccttctacgaactcattgaatggtgggtggcagtagctacaggtgaaggtgctgaagcgtttttagggactcagggttacgtttgggatacccaatcggatatgtttttagccttaattggcgccattgtggctttgttgagtttgtctcgtgtacaggataagcaaatcgctaagcttactgctcagtga

SEQ ID NO: 44616 - protein, 201 aa, Shewanella oneidensis MR-1
MNNKIAWCGIYLSVLAWSAIKPADPFTWWLEALPALVAVPLLFFTRKRFELTPLVYFLVLVHCCVLFVGAHYTYAEVPLFDTIAQWMGSERNNYDKVGHFAQGFIPAMLAREIMLRNQAVKPGAWCAFLATCFVLAFSAFYELIEWWVAVATGEGAEAFLGTQGYVWDTQSDMFLALIGAIVALLSLSRVQDKQIAKLTAQ

SEQ ID NO: 44617 - DNA, 606 bp, Clostridium tetani E88
  CDS (1)..(606): transl_table=11
atgaaagataaaactctacacttatttttaataaatagtatactaataattttaatatggtcgggtattaatccttttgataagtttacttggattttagaagttcttcctgcaataataggtggatttgtattaatcattatttattgtaaatttaaatttactaatttagtttatattttaatttgggttcatgctcttatcttaatagtaggtgggcattatacctatgctcaaatgcctttatttaatgtaataagagatgtttttaatttaaatagaaattattatgatagattaggtcatttttctcaaggttttatacctgctataattgcaagggaaatcttgataagaaataatattgtaactaaaaagaaatggttggaatttataattgtttgtatatgtttagctattagcgcatcctatgaattaattgaatttgcagtagcaaaatttacagggacagctgcggaagcctttttaggaactcaaggagatatatgggatactcaatgggacatgctttttgcattaataggttctatagtagctatacttactctttcaaaatatcataataagcagttaagtaaaaaatag

SEQ ID NO: 44618 - protein, 201 aa, Clostridium tetani E88
MKDKTLHLFLINSILIILIWSGINPFDKFTWILEVLPAIIGGFVLIIIYCKFKFTNLVYILIWVHALILIVGGHYTYAQMPLFNVIRDVFNLNRNYYDRLGHFSQGFIPAIIAREILIRNNIVTKKKWLEFIIVCICLAISASYELIEFAVAKFTGTAAEAFLGTQGDIWDTQWDMLFALIGSIVAILTLSKYHNKQLSKK

SEQ ID NO: 44619 - DNA, 675 bp, Streptomyces avermitilis MA-4680
  CDS (1)..(675): transl_table=11
atgcctgccgtcaccaccgccgcaagctcccgccccgctgaccggctcgccgtcgaccgggtcgtccgccggcggcttcccgtggccctgctcgctgtcgtcaccgtcgctctcgccatgtcggcctggcatgcgaaagaccccactacctggctgctggagaccgtgtgggcgtgggtgggtctgccgctggtcgtgctgctgcgcaggcggttcccgctcaccagcctgctgtactgtctgctcgccgcgcacgccctggtcctcgcggtgggcggccactacacctatgccgaggtgccggccggtgactgggtgcgcgactggctggacctctcccgcaacccctacgaccgtttcggccacctcatgcagggcttcgtgcccgccgtcctggtacgggagatcctcacccgcacgtcgccgctgcgcggcagccggtggcttgcgcccctgaccgtgtgcgcctgcctcgccttcagcgcggtcttcgaactcctggagtgggccgcggccgttgcgggagggcatgccgccgacgcgttcctggccacccagggcgatgtgtgggacacccagtgggacatgttctgcgcgctgatcggagccgtctgctcactgctgctgctcagccgcgcacacgaccgccgactcgcccggctcgacggccgctga

SEQ ID NO: 44620 - protein, 224 aa, Streptomyces avermitilis MA-4680
MPAVTTAASSRPADRLAVDRVVRRRLPVALLAVVTVALAMSAWHAKDPTTWLLETVWAWVGLPLVVLLRRRFPLTSLLYCLLAAHALVLAVGGHYTYAEVPAGDWVRDWLDLSRNPYDRFGHLMQGFVPAVLVREILTRTSPLRGSRWLAPLTVCACLAFSAVFELLEWAAAVAGGHAADAFLATQGDVWDTQWDMFCALIGAVCSLLLLSRAHDRRLARLDGR

SEQ ID NO: 44621 - DNA, 693 bp, Bordetella pertussis Tohama I
  CDS (1)..(693): transl_table=11
atgactgaagcgcgcgccgggctgtttgcccgccggcgctatctgccggcgctggccgtgctgtacgcggcgctgtggctggcgctggccatcgagccccatgaccgctccgactggctgctcgagaacgccctggtgctggggttcggcgtcgcgctgtatgcgacgcggcgctggttcgtgttctcgcgcgtgtcctacaccttgatcttcctttacctgtgcctgcacgctgtgggcgcgcactacacctattcgctggtgccctacgatgcctggtggcaacgcctgaccggccacagcctggaccagctgctgggctgggagcgcaaccagttcgaccggctggtgcacttctcgtatggcctgctgctggcctacccgatccgggagatcttcctgcgggtggtggatgtgcgcggcttctggggctatctgctgccgctggacgtggccttgtcgacctcggccctgtacgagctgatcgaatggggcgcggccgaattcttcggcggcgaactgggcgtggcgtacttgggcacgcagggcgacatctgggacgcgcagaaggacatggcgctggccgggctgggggcgctgatcgccatgctcctgacggcgctgttcaatcgcggcgcgcggcgcgatccggcgcgcgattgggtcgaccgcatgaagccggggcatacgtag

SEQ ID NO: 44622 - protein, 230 aa, Bordetella pertussis Tohama I
MTEARAGLFARRRYLPALAVLYAALWLALAIEPHDRSDWLLENALVLGFGVALYATRRWFVFSRVSYTLIFLYLCLHAVGAHYTYSLVPYDAWWQRLTGHSLDQLLGWERNQFDRLVHFSYGLLLAYPIREIFLRVVDVRGFWGYLLPLDVALSTSALYELIEWGAAEFFGGELGVAYLGTQGDIWDAQKDMALAGLGALIAMLLTALFNRGARRDPARDWVDRMKPGHT

SEQ ID NO: 44623 - DNA, 693 bp, Bordetella bronchiseptica RB50
  CDS (1)..(693): transl_table=11
atgactgaagcgcgcgccgggctgtttgcccgccggcgctatctgccggcgctggccgtgctgtacgcggcgctgtggctggcgctggccatcgagccccatgaccgctccgactggctgctcgagaacgccctggtgctggggttcggcgtcgcgctgtatgcgacgcggcgctggttcgtgttctcgcgcgtgtcctacaccttgatcttcctgtacctgtgcctgcacgccgtgggcgcgcactacacctattcgctggtgccctacgatgcctggtggcaacgcctgaccggccacagcctggaccagctgctgggctgggagcgcaaccagttcgaccggctggtgcacttttcgtatggcctgctgctggcctacccgatccgggagatcttcctgcgggtggtggaggtgcgcggcttctggggctatctgctgccgctggacgtggccttgtcgacctcggccctgtacgagctgatcgaatggggcgcggccgaattcttcggcggcgaactgggcgtggcatacctgggcacgcagggcgatatctgggacgcgcagaaggacatggcgctggccgggctgggggcgctgatcgccatgctcctgacggcgctgttcaatcgcggcgcgcggcgcgatccggcgcgcgattgggtcgaccgcatgaagccggggcatacgtag

SEQ ID NO: 44624 - protein, 230 aa, Bordetella bronchiseptica RB50
MTEARAGLFARRRYLPALAVLYAALWLALAIEPHDRSDWLLENALVLGFGVALYATRRWFVFSRVSYTLIFLYLCLHAVGAHYTYSLVPYDAWWQRLTGHSLDQLLGWERNQFDRLVHFSYGLLLAYPIREIFLRVVEVRGFWGYLLPLDVALSTSALYELIEWGAAEFFGGELGVAYLGTQGDIWDAQKDMALAGLGALIAMLLTALFNRGARRDPARDWVDRMKPGHT

SEQ ID NO: 44625 - DNA, 615 bp, Vibrio vulnificus YJ016
  CDS (1)..(615): transl_table=11
atgaagaaggaaaacttaatgacaaaacaaaatcctttgctgctcttgacgctcggctatgctgtcatcttcgttttctctgcggtatcgccgacctctcacgcagtgtggattgccgaaatcattccagccgttgccattcttgcgacgatcatttggctcagtcggcgctttaccttcagtcgcaccgcttacttactgatgtttgtatggctttgcctacacaccatcggggcaaaatacactttcgccgaagtgccatttgattggttcaaccaactgattggctcggaaagaaacaactatgatcgcttggcccacttttctatcggcctttacgcttatcccattgcagagtacttggtgaaacagcataagcagtcgttcacttttgcttctttgtttgccctgttcgcgattatgagcttagccgctgcctatgaaattattgaatggtggtatgctgccctcgccggtggtgacgaaggcatcgcttttctcggctctcaaggtgatatctgggacgcacagaaagacatgctgtgtgacaccctcggtgcacttacctcgttaatgcttttgcgtctccaaggtgttggccgcaatccagcttaa

SEQ ID NO: 44626 - protein, 204 aa, Vibrio vulnificus YJ016
MKKENLMTKQNPLLLLTLGYAVIFVFSAVSPTSHAVWIAEIIPAVAILATIIWLSRRFTFSRTAYLLMFVWLCLHTIGAKYTFAEVPFDWFNQLIGSERNNYDRLAHFSIGLYAYPIAEYLVKQHKQSFTFASLFALFAIMSLAAAYEIIEWWYAALAGGDEGIAFLGSQGDIWDAQKDMLCDTLGALTSLMLLRLQGVGRNPA

SEQ ID NO: 44627 - DNA, 627 bp, Desulfovibrio vulgaris subsp. vulgaris str. Hildenborough
  CDS (1)..(627): transl_table=11
atgtcacgaacgtttgcggaacgcctgccggagatgctggcatccgtctttgtcgtattcttcatcgtgctgggcatcgccccggcggacagggcggtctggattgcagaggccgtgcccgtggtcttcgtctttaccattctggtgttcacggcgcgcagataccgcttttcgaacgccgcctacctgctgatgtcattctggcttttctggcacaccgtgggtgggcacttcacctttgccgccgtgcccttcggcttcgtctcggacatcatcggtgcaagccgcaaccatttcgaccggatcggtcacttttcggtgggtttctatgcctacgccttcaccgagatcctcgtccggcggcgtctggcgggtcctgtggtctccacactgttcggcctgttcgccatcatgtcggtggcggcggggtatgagattctcgaatggtggtacgccgtgagcagcgaccccgaggcgggcatcgccgtgctgggcagtcagggtgacatatgggacgcgcagaaggacatgctctcggatacgctgggggcgctcttctcgcttgcgctcttctggacggcaggcagaaggtggggaagccacgaccccgtcccgtcagcccgatag

SEQ ID NO: 44628 - protein, 208 aa, Desulfovibrio vulgaris subsp. vulgaris str. Hildenborough
MSRTFAERLPEMLASVFVVFFIVLGIAPADRAVWIAEAVPVVFVFTILVFTARRYRFSNAAYLLMSFWLFWHTVGGHFTFAAVPFGFVSDIIGASRNHFDRIGHFSVGFYAYAFTEILVRRRLAGPVVSTLFGLFAIMSVAAGYEILEWWYAVSSDPEAGIAVLGSQGDIWDAQKDMLSDTLGALFSLALFWTAGRRWGSHDPVPSAR

SEQ ID NO: 44629 - DNA, 627 bp, Bacillus thuringiensis serovar konkukian str. 97-27
  CDS (1)..(627): transl_table=11
gtgaaaaaagtgataaaaaacaaacgtgcagctattcacttatttttattattggttgttatcgctgtttttatatggtctgttattaacccagcaaaatactcgacatgggcagctgaagctctacctgctattttcggattattcattgttattacaacgtacaataagtttcgtctcaccactctctcttatatgattatcacaatactatccatcacaatgtttatcggtggtcattacacatactcagaggtgcctctttttaattggatacaagatgtttatgatttaaaacgaaatcattacgatcgatttggacatctgataaaaggtttatttatcattgtgataaaagaaatcttattacggaaaactcaacttaccgaaggcccttggttaattacgattagtataagtatttcacttgctattgctgcattatacgaaatcatcgaatggttagcttttaaaatagcaaagggaggaaaagcagcaaaagactttttaggtatgcaaggcgatatatgggatgcacaatgggatatgtcacttgccttagtaggctcgattcttgcgttactcaccctttcgacattacataaccggctattaaaaaagaattga

SEQ ID NO: 44630 - protein, 208 aa, Bacillus thuringiensis serovar konkukian str. 97-27
MKKVIKNKRAAIHLFLLLVVIAVFIWSVINPAKYSTWAAEALPAIFGLFIVITTYNKFRLTTLSYMIITILSITMFIGGHYTYSEVPLFNWIQDVYDLKRNHYDRFGHLIKGLFIIVIKEILLRKTQLTEGPWLITISISISLAIAALYEIIEWLAFKIAKGGKAAKDFLGMQGDIWDAQWDMSLALVGSILALLTLSTLHNRLLKKN

SEQ ID NO: 44631 - DNA, 627 bp, Bacillus cereus E33L
  CDS (1)..(627): transl_table=11
gtgaaaaaagtgataagaaacaaacgtacagtgattcacctatttttattattggttgttatcgctgtttttatatggtctgttattaaccctgcaaagtactcaacatgggcagcagaagctattcctgctattttcggtttattcattataattacaacgtacaataagtttcgtctcactactctctcatatataataattacaacgttgtccattataatgtttgtcggaggccattacacatactcagaggtgcctctatttaattggatacaagatgtttttgagttaaagcgaaatcactacgatcgatttggacatttgataaaaggcttgtttatcattgtgataagagaaatcttattacggaaaacccaacttaccgaaggcccttggttagttacgattagtataagtatttcacttgctattgctgcactatacgaaatcatcgaatggttagcttttaaaatagcaaagggaggaaaagcagcaaaagactttttaggtatgcaaggcgatatatgggatgcacaatgggatatgtcacttgccttagtaggctcgattcttgcgttgctcaccctttcgacattacataaccgactattgaaaaagaattga

SEQ ID NO: 44632 - protein, 208 aa, Bacillus cereus E33L
MKKVIRNKRTVIHLFLLLVVIAVFIWSVINPAKYSTWAAEAIPAIFGLFIIITTYNKFRLTTLSYIIITTLSIIMFVGGHYTYSEVPLFNWIQDVFELKRNHYDRFGHLIKGLFIIVIREILLRKTQLTEGPWLVTISISISLAIAALYEIIEWLAFKIAKGGKAAKDFLGMQGDIWDAQWDMSLALVGSILALLTLSTLHNRLLKKN

SEQ ID NO: 44633 - DNA, 558 bp, Colwellia psychrerythraea 34H
  CDS (1)..(558): transl_table=11
gtgcttatttggtcgggaatatctcctaaagatcagttcacttggtttcttgaagtgtttcctgcattaatcggggctgctttattaacagttacataccgctcgttccgccttacttcgatgctatatttcttcatcttattacattgcattgtgttaatgattggcggtcattacacctatgctgaagtacctttttttgatggtttattcggtgcagagcgcaataactacgacaaagtgggacacttttttcaaggctttgttcctgcacttttagcgagagaaattttaatccgtaaaaatgttgtcaacggtaacgtttggcgaaatgttattattgtttctatctgcttagcattcagtgctttttatgagttaattgaatggtgggttgcgttaatgtctggtgaagatgcagaagcctttttaggaacacaaggttatgtatgggatacacagtcagatatggggttggccttgttaggtgcaatttgttctttaatggtcttatcaaaaattcataatcaccaaatacaaaaagtcactagtaattaa

SEQ ID NO: 44634 - protein, 185 aa, Colwellia psychrerythraea 34H
MLIWSGISPKDQFTWFLEVFPALIGAALLTVTYRSFRLTSMLYFFILLHCIVLMIGGHYTYAEVPFFDGLFGAERNNYDKVGHFFQGFVPALLAREILIRKNVVNGNVWRNVIIVSICLAFSAFYELIEWWVALMSGEDAEAFLGTQGYVWDTQSDMGLALLGAICSLMVLSKIHNHQIQKVTSN

SEQ ID NO: 44635 - DNA, 618 bp, Dechloromonas aromatica RCB
  CDS (1)..(618): transl_table=11
atggaacaacgcgacaagctcaacgccacgctggccgccattgtgatcgcggcgctggtcgtgtcgggtattgccccctacgagcggctgacctgggtcatggaagtcgccccggtattgattgccctgccgctgatgatagtcacacgccgaagctacccgctgacgacactgctcaccgtgctgattgctgcccacgcgctggtgctgatcgccggcggcgcctacacctatgcccgcgtgccgctcggcttctggatgcaggatgtgctcggcacggtgcgcaatccgtatgacaagctcggccacttcatgcagggcttcgttccggccatggtcgcccgcgaaatcctgatccggggcgcctacgtccggggccgcaagatgactggtttcctctgcatctgcatcgccatggcgatcagcgccgtctacgaactgatcgaatggggtgccgcgctctacctcggccagggggccgatgaattcctcggcacgcagggcgaccagtgggatactcaatcggacatgttcatggccctgattggatcgagcaccgcgatgctgttgctctcccgctggcacgacaagctgctggccaggctgcgttcggcctag

SEQ ID NO: 44636 - protein, 205 aa, Dechloromonas aromatica RCB
MEQRDKLNATLAAIVIAALVVSGIAPYERLTWVMEVAPVLIALPLMIVTRRSYPLTTLLTVLIAAHALVLIAGGAYTYARVPLGFWMQDVLGTVRNPYDKLGHFMQGFVPAMVAREILIRGAYVRGRKMTGFLCICIAMAISAVYELIEWGAALYLGQGADEFLGTQGDQWDTQSDMFMALIGSSTAMLLLSRWHDKLLARLRSA

SEQ ID NO: 44637 - DNA, 756 bp, Thiobacillus denitrificans ATCC 25259
  CDS (1)..(756): transl_table=11
atggtcagcgacaacgcagctgcaatcgacgatcctcgccgcacacaccgcaggtatctcctgatcctcagcgggctgttcgcgctgctgtggatagcgctcgcgatcgatccgctataccgcgacgactgggcgctcgagaacgccctggtcgtcgtgttcgtgctggcgatcgccctgagctacaggcggctgcccctgtcgcgcatatcgtacacgctgatatttctgttcctctgcctgcacgaggtcggcgcgcactacacctacgccgaggtgccgtacgacgactggttcatggccgtcagcggagtcagcctcaacgacgtgctggggtgggagcgcaacaatttcgaccgggtcgtgcactttctgtatggcctgctgatcgcctacccggtgcgcgaaatcttcctgcgcgtggcggcggtacggggcttctggggctacttcctgccgctcgacctgaccatgtccacgtcagcgatgttcgagctcttcgagtgggcggcagccgaactgttcggcggcggcctcggcgtcgcctacctcggcacccagggcgacgtttgggacgcgcacaaggacatggcgcttgcaagccttggcgcgttgatcgccatgctgatcacctacgccatcaaccgcacgctgcaacgcgacttcgccgaggaatgggcgcagagcctcaaggtaaaggagccgcggccgctgggcgagtatgcgctggcacgcatgctcaagcgccgcgcttga

SEQ ID NO: 44638 - protein, 251 aa, Thiobacillus denitrificans ATCC 25259
MVSDNAAAIDDPRRTHRRYLLILSGLFALLWIALAIDPLYRDDWALENALVVVFVLAIALSYRRLPLSRISYTLIFLFLCLHEVGAHYTYAEVPYDDWFMAVSGVSLNDVLGWERNNFDRVVHFLYGLLIAYPVREIFLRVAAVRGFWGYFLPLDLTMSTSAMFELFEWAAAELFGGGLGVAYLGTQGDVWDAHKDMALASLGALIAMLITYAINRTLQRDFAEEWAQSLKVKEPRPLGEYALARMLKRRA

SEQ ID NO: 44639 - DNA, 612 bp, Desulfovibrio desulfuricans G20
  CDS (1)..(612): transl_table=11
atgcgcatcaatgttacccgcgagaattttccggtggtgcttgctgccgtgtttactgttttttttgcactgctgggcattgcgcccgcttcccgcgcggtgtggattgcagaggtcattccgcttgtcagcgtgtttgtgctgctggtggtcacatacagatttttccgtttttccaatattgcttacgggcttatggctgtgtggcttttctggcatacggtgggggcgcatttcaccttcagcgaggtgcctttcggtgcggtaacggaactgctgggaggcggacgcaatcactttgaccgcatcgggcatttcagtgtcgggttttatgcctatgccatgtgcgagctttttatgcgccgcagactggccggtccggtggtgtccaccttgtttgccctctttttcatcatgtccgtggcggccggatacgaaattatcgaatggtggtatgccgcggcggaaggtggtgatgccggggttgcttttctgggtagtcagggcgacgtgtgggacgcgcagaaagacatgctggccgacacgctgggggctgttttttcgttgctgctgttctggaccatgggcagacgatggggcagccggccctga

SEQ ID NO: 44640 - protein, 203 aa, Desulfovibrio desulfuricans G20
MRINVTRENFPVVLAAVFTVFFALLGIAPASRAVWIAEVIPLVSVFVLLVVTYRFFRFSNIAYGLMAVWLFWHTVGAHFTFSEVPFGAVTELLGGGRNHFDRIGHFSVGFYAYAMCELFMRRRLAGPVVSTLFALFFIMSVAAGYEIIEWWYAAAEGGDAGVAFLGSQGDVWDAQKDMLADTLGAVFSLLLFWTMGRRWGSRP

SEQ ID NO: 44641 - DNA, 705 bp, Syntrophus aciditrophicus SB
  CDS (1)..(705): transl_table=11
ttgttttgttatcttccggaaagtcggccgcctgatattcggaagaatgaaatttcaacagagataacttgtcgtgagaaaagaccaatgttaaaacaaaaccggattctgatcctttatatcatcatcttttttcttgccctgatcctctcaggaatccatccaaaagatcaactggtctggttcctggaggtctcgccggcggtgatggctcttgccatcctggccgtcagtttcaaaaaattccgtttctcgaatctcgtttactttctcattcttgtccactccatcgttctgatgatcggggggcactggacatatgccgaagtcccttttttcaactggctaagggatatcgggatattctcccgcaataattatgacaaagttgggcatttcatgcagggttttgttcccgtcctggtcgcgagagaagtcataatccggaaggacatcgtcaatggcgggagatggacgaactttttttccatcgccgtagtcctggctgcaagtgcgtgctatgaatttatcgaatggtggatttcccttctgagtggaagcaggggcgacgcgtttctgggaacgcagggatatacctgggacactcagtccgacatgtttttctgcctgatcggcgccgttgctgcgataatgacactggccaggattcatgacaggatgattcgcgattcacagcattcatga

SEQ ID NO: 44642 - protein, 234 aa, Syntrophus aciditrophicus SB
MFCYLPESRPPDIRKNEISTEITCREKRPMLKQNRILILYIIIFFLALILSGIHPKDQLVWFLEVSPAVMALAILAVSFKKFRFSNLVYFLILVHSIVLMIGGHWTYAEVPFFNWLRDIGIFSRNNYDKVGHFMQGFVPVLVAREVIIRKDIVNGGRWTNFFSIAVVLAASACYEFIEWWISLLSGSRGDAFLGTQGYTWDTQSDMFFCLIGAVAAIMTLARIHDRMIRDSQHS

SEQ ID NO: 44643 - DNA, 609 bp, Cytophaga hutchinsonii ATCC 33406
  CDS (1)..(609): transl_table=11
atgaaatacacatccatcctactcatactttttctgcttgtacttacctggtcaggtatacaaccgaaagaaacgttcacctggctgctcgaaatttttcctgccattatcggagccattgtactgattgctacaagaaattcctttccgtttactccgcttgtctatacatgtatctgtatacatgcatgtatcctgtgtgttggcggccattatacctatgcagaagtacctgcatttgattggttaaaagaaatgctgcaccagtccaggaataattacgataaagtcggacactttgcgcaaggctttgtacctgcactgatcatccgtgaattatttatccggaaagaagttgtattcaataaaggctggctcaattttattgttgtctgcatctgcatggcaatcagcgctgcgtatgaattgctggagtggtttgtttcactgttcagcggagaagcaggcgatgcatttctcggtacacaaggctacgtgtgggatacacaatccgacatgctgtatgctactattggcgctatcactgcattgatacttttatcttctgtgcagaacaaacagataaaacaattgcaggatcaaaagtaa

SEQ ID NO: 44644 - protein, 202 aa, Cytophaga hutchinsonii ATCC 33406
MKYTSILLILFLLVLTWSGIQPKETFTWLLEIFPAIIGAIVLIATRNSFPFTPLVYTCICIHACILCVGGHYTYAEVPAFDWLKEMLHQSRNNYDKVGHFAQGFVPALIIRELFIRKEVVFNKGWLNFIVVCICMAISAAYELLEWFVSLFSGEAGDAFLGTQGYVWDTQSDMLYATIGAITALILLSSVQNKQIKQLQDQK

SEQ ID NO: 44645 - DNA, 609 bp, Shewanella sp. MR-7
  CDS (1)..(609): transl_table=11
ttgaataacaaaattgcttggtgcggtatttacctctcagttttaatatggtcggcgataaaacccgcagatccattcacttggtggctagaagccttgcccgcattagtggccgtgcccttgctcttttttacccgccagcgtttcccgttgacgcccttagtgtattttttggtactggtacattgctgtgtgttgtttgttggcgcgcactatacctacgccgaagtgccgctgtttgacactattgcccagtggatgggcagcgagcgcaataactacgacaaggttgggcattttgctcaaggctttattcctgccatgctagcccgtgagattatgttacgtaatcaagctgttaagcctggtgcttggtgtgcctttttagtcacctgctttgtgttggcctttagtgccttctatgaactgattgaatggtgggtggccgccgcgacgggcgaaggtgctgaggccttcttaggcactcagggttatgtgtgggacacgcaatcggatatgtttttagccttgattggggccgtggtggcgttgctattcttgtctcgacagcaggataagcagattgcacggctcttggctcgatcttag

SEQ ID NO: 44646 - protein, 202 aa, Shewanella sp. MR-7
MNNKIAWCGIYLSVLIWSAIKPADPFTWWLEALPALVAVPLLFFTRQRFPLTPLVYFLVLVHCCVLFVGAHYTYAEVPLFDTIAQWMGSERNNYDKVGHFAQGFIPAMLAREIMLRNQAVKPGAWCAFLVTCFVLAFSAFYELIEWWVAAATGEGAEAFLGTQGYVWDTQSDMFLALIGAVVALLFLSRQQDKQIARLLARS

SEQ ID NO: 44647 - DNA, 609 bp, Shewanella sp. ANA-3
  CDS (1)..(609): transl_table=11
ttgaataacaaaatcatttggtgcggtatttacctctcagttttaatatggtcggcgataaaacccgcagatccattcacttggtggctcgaagccctgccagcattagtggccgtgcccttgctcttttttacccgcaagcgttttccgctgacgcccttagtgtattttttggtgctagtgcattgctgtgtgttgtttgttggcgcgcactatacctatgccgaagtgccactgttcgacacgattgcccagtggatggggaccgagcgtaacaactacgacaaggtcgggcattttgcccaaggttttattccggccatgttagcccgtgagattatgttacgtaatcaagccgttaaacctggagcctggtgtgcctttctcgtcacttgctttgtgttggccttcagcgccttctacgaactgattgaatggtgggtggccgccgcgacgggcgaaggtgctgaggccttcttaggcactcaaggttatgtgtgggatacccaatcggatatgtttttggccttgattggggccattgtcgcactaatcagtttgtcccgtgtgcaggataagcaaatcgcaaaacttatcggtcaggcttag

SEQ ID NO: 44648 - protein, 202 aa, Shewanella sp. ANA-3
MNNKIIWCGIYLSVLIWSAIKPADPFTWWLEALPALVAVPLLFFTRKRFPLTPLVYFLVLVHCCVLFVGAHYTYAEVPLFDTIAQWMGTERNNYDKVGHFAQGFIPAMLAREIMLRNQAVKPGAWCAFLVTCFVLAFSAFYELIEWWVAAATGEGAEAFLGTQGYVWDTQSDMFLALIGAIVALISLSRVQDKQIAKLIGQA

SEQ ID NO: 44649 - DNA, 612 bp, Azoarcus sp. BH72
  CDS (1)..(612): transl_table=11
atgcgccttggcctgttgatcctcgtgctcgccgcgctggttgcgtccggcgtcgcgccctacgaccgcggcgtgtggctggcggaggtggcgccggtgctgatcgcgctgcccgtcctgctgatcagcgcgcgccgtttcccgctgacaccgctgacctgcggcctggtcgcgttcttcgcgctgatcctgatcggcggcggcgcctacacctacgcacgggtgccgatcggcttcgaggtgcaggagatgttcggcctcgcgcgcaatccctacgaccgcttcggccacttcttccagggggtcacgcccgccatcctcgggcgcgagctgctgctgcgcacctcgccgctgcgtccggggaaatggctgttcgcgctgctgctgctcgcctgcctcggcatcagcgccgcctacgagctggtggaatgggccgccgcggtgtggtggggtgacggttcggtcgaattcctcggcacccagggcgatccgtgggacgcgcagtgggacatgttcatggcgctgctcggcgccggcagcgcgcagttggcgctcggccgcgtgcacgaccgccagctcgccgcgctcatgcttccgccacgcggccgctga

SEQ ID NO: 44650 - protein, 203 aa, Azoarcus sp. BH72
MRLGLLILVLAALVASGVAPYDRGVWLAEVAPVLIALPVLLISARRFPLTPLTCGLVAFFALILIGGGAYTYARVPIGFEVQEMFGLARNPYDRFGHFFQGVTPAILGRELLLRTSPLRPGKWLFALLLLACLGISAAYELVEWAAAVWWGDGSVEFLGTQGDPWDAQWDMFMALLGAGSAQLALGRVHDRQLAALMLPPRGR

SEQ ID NO: 44651 - DNA, 600 bp, Photobacterium sp. SKA34
  CDS (1)..(600): transl_table=11
atgtcagaaaataaattcccattatggttagccgtttcctataccctcttttttatcattttaggaattaaccctgcttttagagcagtatggatagcagaagccattccgctgatcattatttttggatcactcattttcactttccgttactatcgttttagtaacctagcttacgctttaatggctgtatggttagtgctacacaatatcggtgctcactatacttttgcaaatgttccatttgattggtttaacgatttaattggttcccaacgtaataactttgatcgccttgcccacttttcgattggcttttatgctttccctattgctgaatatttagtgagaaaaaaccattgtaagccgcttattgccggtttatttggtttatttgctgtcatggcagttgctgctggctatgagatcgttgaatggtggtacgctgcaagtgctggcggtgaagcaggcattgaattcttaggctctcaaggagatatttgggatgctcagaaagacatgttagctgacaccttaggtgcggtgtttagtttgattttattttttattttcaaaacctataagcaaaacgaaaattaa

SEQ ID NO: 44652 - protein, 199 aa, Photobacterium sp. SKA34
MSENKFPLWLAVSYTLFFIILGINPAFRAVWIAEAIPLIIIFGSLIFTFRYYRFSNLAYALMAVWLVLHNIGAHYTFANVPFDWFNDLIGSQRNNFDRLAHFSIGFYAFPIAEYLVRKNHCKPLIAGLFGLFAVMAVAAGYEIVEWWYAASAGGEAGIEFLGSQGDIWDAQKDMLADTLGAVFSLILFFIFKTYKQNEN

SEQ ID NO: 44653 - DNA, 591 bp, Alteromonadales bacterium TW-7
  CDS (1)..(591): transl_table=11
gtgaaatttgcatggctaagccttttttgtggtgtgttaatttggtctggtattaatcctaaagatcaatttacttggttacttgaagttattcccgcaatgattggtttagcacttatagcaagcacgtacaaatactttaaattaacctctttattgtacttttttattttagtgcattgtattgtgctgatgatcggtggtcattatacctacgcagaagtacctttatttgataatttatttggcagcgaacgcaataactatgacaaagtagggcacttttttcagggatttgtacccgctttgctagcgcgcgaaacactgctacgaaagcaagttgtaaatggccgaggttggttaactttatttgttatatctgtcagtttggcgtttagtgcgttttacgaattaatagagtggtgggtagcagtactgaccggtgaaaacgctgaagcatttttagggacgcaagggtatgtgtgggatacacagtcagatatggcattagcgttatttggtgcaatttgctcgttactgctgctttcaaaactacacgatacacagttaaagtatgtaaaaaactattaa

SEQ ID NO: 44654 - protein, 196 aa, Alteromonadales bacterium TW-7
MKFAWLSLFCGVLIWSGINPKDQFTWLLEVIPAMIGLALIASTYKYFKLTSLLYFFILVHCIVLMIGGHYTYAEVPLFDNLFGSERNNYDKVGHFFQGFVPALLARETLLRKQVVNGRGWLTLFVISVSLAFSAFYELIEWWVAVLTGENAEAFLGTQGYVWDTQSDMALALFGAICSLLLLSKLHDTQLKYVKNY

SEQ ID NO: 44655 - DNA, 19 bp, Artificial sequence
  primer
atgacccgcacactcaagc

SEQ ID NO: 44656 - DNA, 23 bp, Artificial sequence
  primer
ttatccggttatcaagccaaagc

SEQ ID NO: 44657 - protein, 171 aa, Artificial sequence
  consensus sequence
  Variant (2)..(2): Xaa in position 2 is any amino acid
  Variant (4)..(8): Xaa in position 4 to 8 is any amino acid
  Variant (10)..(11): Xaa in position 10 to 11 is any amino acid
  Variant (13)..(14): Xaa in position 13 to 14 is any amino acid
  Variant (16)..(36): Xaa in position 16 to 36 is any amino acid
  Variant (38)..(49): Xaa in position 38 to 49 is any amino acid
  Variant (51)..(52): Xaa in position 51 to 52 is any amino acid
  Variant (55)..(57): Xaa in position 55 to 57 is any amino acid
  Variant (60)..(68): Xaa in position 60 to 68 is any amino acid
  Variant (69)..(79): Xaa in position 69 to 79 is any or no amino acid
  Variant (82)..(83): Xaa in position 82 to 83 is any amino acid
  Variant (85)..(87): Xaa in position 85 to 87 is any amino acid
  Variant (90)..(91): Xaa in position 90 to 91 is any amino acid
  Variant (93)..(94): Xaa in position 93 to 94 is any amino acid
  Variant (95)..(95): Xaa in position 95 is any or no amino acid
  Variant (97)..(100): Xaa in position 97 to 100 is any amino acid
  Variant (102)..(104): Xaa in position 102 to 104 is any amino acid
  Variant (106)..(126): Xaa in position 106 to 126 is any amino acid
  Variant (127)..(127): Xaa in position 127 is any or no amino acid
  Variant (129)..(129): Xaa in position 129 is any amino acid
  Variant (132)..(133): Xaa in position 132 to 133 is any amino acid
  Variant (136)..(137): Xaa in position 136 to 137 is any amino acid
  Variant (139)..(141): Xaa in position 139 to 141 is any amino acid
  Variant (142)..(143): Xaa in position 142 to 143 is any or no amino acid
  Variant (145)..(149): Xaa in position 145 to 149 is any amino acid
  Variant (153)..(153): Xaa in position 153 is any amino acid
  Variant (156)..(157): Xaa in position 156 to 157 is any amino acid
  Variant (160)..(160): Xaa in position 160 is any amino acid
  Variant (162)..(162): Xaa in position 162 is any amino acid
  Variant (165)..(169): Xaa in position 165 to 169 is any amino acid
IXPXXXXXWXXEXXPXXXXXXXXXXXXXXXXXXXXXYXXXXXXXXXXXXGXXYTXXXVPXXXXXXXXXXXXXXXXXXXXRNXXDXXXHFXXGXXXAXXXXEXXXRXXXXXXXXXXXXXXXXXXXXXXAXYEXXEWXXAXXXXXGXXXXXFLGXQGXXWDXQXDMXXXXXGA

SEQ ID NO: 44658 - protein, 29 aa, Artificial sequence
  protein pattern
  Variant (3)..(3): Xaa in position 3 is Ala, Gly or Leu
  Variant (4)..(4): Xaa in position 4 is any amino acid
  Variant (7)..(8): Xaa in position 7 to 8 is any amino acid
  Variant (11)..(11): Xaa in position 11 is Ala or Thr
  Variant (13)..(13): Xaa in position 13 is any amino acid
  Variant (15)..(15): Xaa in position 15 is Ile or Met
  Variant (16)..(17): Xaa in position 16 to 17 is any amino acid
  Variant (18)..(18): Xaa in position 18 is Ala, Cys or Asp
  Variant (19)..(19): Xaa in position 19 is any amino acid
  Variant (20)..(20): Xaa in position 20 is Phe, Ile, Leu or Val
  Variant (22)..(22): Xaa in position 22 is Ala or Ser
  Variant (23)..(24): Xaa in position 23 to 24 is any amino acid
  Variant (25)..(25): Xaa in position 25 is Ala, Ser or Thr
  Variant (26)..(28): Xaa in position 26 to 28 is any amino acid
  Variant (29)..(29): Xaa in position 29 is Phe or Leu
FLXXQGXXWDXQXDXXXXXXGXXXXXXXX

SEQ ID NO: 44659 - protein, 22 aa, Artificial sequence
  protein pattern
  Variant (2)..(2): Xaa in position 2 is any or no amino acid
  Variant (4)..(4): Xaa in position 4 is any amino acid
  Variant (5)..(5): Xaa in position 5 is any or no amino acid
  Variant (7)..(7): Xaa in position 7 is Lys or Arg
  Variant (8)..(8): Xaa in position 8 is Phe, Ile, Leu or Val
  Variant (9)..(9): Xaa in position 9 is Ala, Gly or Val
  Variant (12)..(13): Xaa in position 12 to 13 is any amino acid
  Variant (15)..(15): Xaa in position 15 is Phe, Leu or Val
  Variant (16)..(16): Xaa in position 16 is any amino acid
  Variant (17)..(17): Xaa in position 17 is Ala, Ile, Leu or Pro
  Variant (18)..(21): Xaa in position 18 to 21 is any amino acid
  Variant (22)..(22): Xaa in position 22 is Glu or Arg
RXNXXDXXXHFXXGXXXXXXXX

SEQ ID NO: 44660 - protein, 15 aa, Artificial sequence
  protein pattern
  Variant (2)..(5): Xaa in position 2 to 5 is any or no amino acid
  Variant (7)..(7): Xaa in position 7 is Ala or Gly
  Variant (8)..(8): Xaa in position 8 is any amino acid
  Variant (9)..(9): Xaa in position 9 is Phe, Trp or Tyr
  Variant (11)..(11): Xaa in position 11 is Phe or Tyr
  Variant (12)..(12): Xaa in position 12 is Ala, Glu or Ser
  Variant (13)..(13): Xaa in position 13 is any amino acid
  Variant (14)..(14): Xaa in position 14 is Met or Val
VXXXXGXXXTXXXXP

SEQ ID NO: 44661 - protein, 20 aa, Artificial sequence
  protein pattern
  Variant (2)..(3): Xaa in position 2 to 3 is any or no amino acid
  Variant (5)..(5): Xaa in position 5 is any amino acid
  Variant (6)..(6): Xaa in position 6 is Phe or Tyr
  Variant (8)..(8): Xaa in position 8 is Ile or Leu
  Variant (9)..(9): Xaa in position 9 is Phe, Ile, Leu or Val
  Variant (11)..(11): Xaa in position 11 is Phe or Trp
  Variant (12)..(13): Xaa in position 12 to 13 is any amino acid
  Variant (14)..(14): Xaa in position 14 is Ala or Ser
  Variant (15)..(17): Xaa in position 15 to 17 is any amino acid
  Variant (18)..(18): Xaa in position 18 is Asp or Gly
  Variant (19)..(19): Xaa in position 19 is any amino acid
  Variant (20)..(20): Xaa in position 20 is Ala, Asp, Glu, Gly or Asn
SXXAXXEXXEXXXXXXXXXX

SEQ ID NO: 44662 - DNA, 1518 bp, Escherichia coli
  CDS (1)..(1518): transl_table=11
atgtctgaacaagaaacacggggagccaatgaggctattgattttaacgatgaactgagaaatcgccgcgaaaaactggcggcactacgtcagcaaggtgtggcgtttcccaatgattttcgccgcgaccatacctctgaccagttgcacgaagagtttgatgcgaaggataaccaggaactggaatccttaaacattgaagtctcggttgctggccgaatgatgacccgtcgtatcatggggaaagcctcctttgtaacgttgcaggatgtcggtggccgtattcaactgtacgttgcaagagatagcctgccagaaggtgtttataacgatcagtttaaaaaatgggatctgggtgacattatcggtgcccgcggtacgctgtttaagacgcaaacgggtgagctttccattcactgtactgagctgcgcctgctgactaaagcactacgtcctttaccagataaattccatggtctgcaggatcaggaagtccgttatcgtcaacgttatctggacctcatcgctaacgataaatcccgtcaaacgtttgttgtccgttcaaaaattctggccgctatccgtcaattcatggtcgcgcgcggctttatggaagtagaaaccccgatgatgcaggtaattccaggtggggcatctgctcgcccgtttattacccatcataatgctctggatttagatatgtatctgcgtatcgcgccggagctgtatctgaaacgtctggttgtaggcggttttgaacgggtattcgaaatcaaccgtaacttccgtaatgaaggtatttctgttcgccataatcctgagttcacaatgatggaactctacatggcgtatgcggattaccacgatttgattgaactgacagagtcactgttccgcaccctggcacaagaggttctgggtaccactaaagtcacttatggcgagcatgtgtttgatttcggcaaaccgtttgaaaaactcaccatgcgcgaagcaatcaaaaaatatcgtccagaaaccgatatggccgacctggataattttgatgctgctaaagcattagctgaatctatcggtattacggtagagaaaagctgggggttgggacgtattgtcacagagatctttgatgaagtggcagaagcacatctgattcagccaacctttattacggaatatccggcagaagtgtccccgctggcacgccgtaatgatgttaacccggaaatcaccgaccgttttgaattcttcatcggtggtcgtgaaatcggtaatggttttagcgaattaaacgacgcagaagatcaggctgaacgtttccaggaacaggttaatgctaaagctgcaggtgacgacgaagccatgttctatgacgaagattacgtgactgcgctggaatatggtctgccgccaaccgctggtctgggtattggtatcgaccgaatgattatgctgtttactaacagccatactattcgcgacgttattctcttcccggcgatgcgcccacagaaataa

SEQ ID NO: 44663 - protein, 505 aa, Escherichia coli; identical to SEQ ID NO: 30320

SEQ ID NO: 44664 - DNA, 1512 bp, Idiomarina loihiensis L2TR; identical to SEQ ID NO: 30041
  CDS (1)..(1512): transl_table=11

SEQ ID NO: 44665 - protein, 503 aa, Idiomarina loihiensis L2TR; identical to SEQ ID NO: 30042

SEQ ID NO: 44666 - DNA, 1518 bp, Escherichia coli K12
  CDS (1)..(1518): transl_table=11
atgtctgaacaacacgcacagggcgctgacgcggtagtcgatcttaacaatgaactgaaaacgcgtcgtgagaagctggcgaacctgcgcgagcaggggattgccttcccgaacgatttccgtcgcgatcatacctctgaccaattgcacgcagaattcgacggcaaagagaacgaagaactggaagcgctgaacatcgaagtcgccgttgctggccgcatgatgacccgtcgtattatgggtaaagcgtctttcgttaccctgcaggacgttggcggtcgcattcagctgtacgttgcccgtgacgatctcccggaaggcgtttataacgagcagttcaaaaaatgggacctcggcgacatcctcggcgcgaaaggtaagctgttcaaaaccaaaaccggcgaactgtctatccactgcaccgagttgcgtctgctgaccaaagcactgcgtccgctgccggataaattccacggcttgcaggatcaggaagcgcgctatcgtcagcgttatctcgatctcatctccaacgatgaatcccgcaacacctttaaagtgcgctcgcagatcctctctggtattcgccagttcatggtgaaccgcggctttatggaagttgaaacgccgatgatgcaggtgatccctggcggtgccgctgcgcgtccgtttatcacccaccataacgcgctggatctcgacatgtacctgcgtatcgcgccggaactgtacctcaagcgtctggtggttggtggcttcgagcgtgtattcgaaatcaaccgtaacttccgtaacgaaggtatttccgtacgtcataacccagagttcaccatgatggaactctacatggcttacgcagattacaaagatctgatcgagctgaccgaatcgctgttccgtactctggcacaggatattctcggtaagacggaagtgacctacggcgacgtgacgctggacttcggtaaaccgttcgaaaaactgaccatgcgtgaagcgatcaagaaatatcgcccggaaaccgacatggcggatctggacaacttcgactctgcgaaagcaattgctgaatctatcggcatccacgttgagaagagctggggtctgggccgtatcgttaccgagatcttcgaagaagtggcagaagcacatctgattcagccgaccttcattactgaatatccggcagaagtttctccgctggcgcgtcgtaacgacgttaacccggaaatcacagaccgctttgagttcttcattggtggtcgtgaaatcggtaacggctttagcgagctgaatgacgcggaagatcaggcgcaacgcttcctggatcaggttgccgcgaaagacgcaggtgacgacgaagcgatgttctacgatgaagattacgtcaccgcactggaacatggcttaccgccgacagcaggtctgggaattggtatcgaccgtatggtaatgctgttcaccaacagccataccatccgcgacgttattctgttcccggcgatgcgtccggtaaaataa

SEQ ID NO: 44667 - protein, 505 aa, Escherichia coli K12; identical to SEQ ID NO: 30312

SEQ ID NO: 44668 - DNA, 1491 bp, Legionella pneumophila str. Paris
  CDS (1)..(1491): transl_table=11
atgagtgaagaacatgtacatttagatgaaagtgaagtttatcatattcgcaaacaaaaattagcggaattgcgcacaagcgggtttaattttccaaatacctttcgccgcgaacatttagccgatgctttgctgaagcaatactccgaaactgaaaaacaaacattagaacaaaagcatgtgaaagtatctgttgcaggccgaatcgttctgagaagaattatgggtaaagccagtttttttcatattcaggatgtatcaggtcggatacaagtttatcttcgttcaaatgatcttcctgacgtttatgaacagtttaaacattgggatttaggagatattgttggtgtacagggtgagttatttaaaacaaacactggtgaactgaccattaatgcagaatatgttgagttattaaccaaatctttaaggccgcttcctgataaattccatggtttggctgatcaggaattgaaatatcgtaaacgttatgttgacttgattgcaaatgaagacagtcgaaaaacttttttaatacgttcacatttaatcaaagccttcagagaatttatggatgataatcattttctggaagtagaaacaccaatgatgcatccaattcctggaggtgctttggctcgtcctttcgtaactcatcacaatacattggatatgaccatgtatttgaggatagcccccgagttgtacttaaaacgcttggttgttggtggttttgagagagtatatgaaattaatagaaatttccgtaacgaaggaatttctactcgtcataatccagagtttacgatgctggaattttaccaggcttatgccgattacaatgatttgatgaatttcactgaacaattgtttcattatctatgcgataaagtattagctactcggcaaatagaatatcaaggtcaagtcattgatttcaataaaccttttgaacggttgagcgtaaaagaagctatattaaaatatcatcctgatattaaggcgcagcagttagaaacgttagagggatgcagaacacttctgaatgatttaggtctgccttataaagaaactgatggcctgggtaaactacaaattattctttttgaggagacagtagagcaccaattatttcagcccacttttattacggaataccctacagaaatatctcctttagcgagacgttctgataccaatccggaagtcaccgatcgatttgagttttttattgctggtcgtgagattgcgaatggattctctgaattaaacgatgccgaggatcaagctgagcgctttcgaaagcaagttgaagaaaaggatgcaggtgatttagaggcaatgcattttgatagtgattatattgaagcattggaatatggcttgccgcctacagctggtgaagggattggaatcgatcgcttggtgatgttatttactaattcgcaatcaatcagagacgttattttatttccgcatttgagacagtaa

SEQ ID NO: 44669 - protein, 496 aa, Legionella pneumophila str. Paris
MSEEHVHLDESEVYHIRKQKLAELRTSGFNFPNTFRREHLADALLKQYSETEKQTLEQKHVKVSVAGRIVLRRIMGKASFFHIQDVSGRIQVYLRSNDLPDVYEQFKHWDLGDIVGVQGELFKTNTGELTINAEYVELLTKSLRPLPDKFHGLADQELKYRKRYVDLIANEDSRKTFLIRSHLIKAFREFMDDNHFLEVETPMMHPIPGGALARPFVTHHNTLDMTMYLRIAPELYLKRLVVGGFERVYEINRNFRNEGISTRHNPEFTMLEFYQAYADYNDLMNFTEQLFHYLCDKVLATRQIEYQGQVIDFNKPFERLSVKEAILKYHPDIKAQQLETLEGCRTLLNDLGLPYKETDGLGKLQIILFEETVEHQLFQPTFITEYPTEISPLARRSDTNPEVTDRFEFFIAGREIANGFSELNDAEDQAERFRKQVEEKDAGDLEAMHFDSDYIEALEYGLPPTAGEGIGIDRLVMLFTNSQSIRDVILFPHLRQ

SEQ ID NO: 44670 - DNA, 1503 bp, Azotobacter vinelandii; identical to SEQ ID NO: 30039
  CDS (1)..(1503): transl_table=11

SEQ ID NO: 44671 - protein, 500 aa, Azotobacter vinelandii; identical to SEQ ID NO: 30040

SEQ ID NO: 44672 - DNA, 1503 bp, Actinobacillus pleuropneumoniae serovar 1 str. 4074
  CDS (1)..(1503): transl_table=11
atgtccgaagttgaacatcaagaattagatcttaacggtgaaatgttagctcgccgtgagaaattagcaaaattacgtgaacaaggtaatccgttcccaaatactttccgtcgtgatgcttacgcagaaaaattacacgcacaatacgatgaagtagagggtgaagcgttaaaagaacaagatattcaagtgaaagttgccggtcgtattatgcttaaacgtgtaatgggtaaggcatctttctttaccattcaagatgtaagcggtcaaatccagctttatgttgcacgtgataaccttgcggaaggtgtttatgcggataaagtcagtatgtgggatttaggcgatatcgtcggtgttgccggtacgcttttcaaaacgaaaacgggcgaattaaccgttcgttgttcggaagtggagttattaactaaatcacttcgtccgttaccaaataaagtacaaggcttaaccgaccaagaaacacgttatcgtcagcgctatttagacttaatttctaatgaagaatctcgccgcacgtttatgattcgctcaaaagtggtttcaggcattcgtcaattcttcttagagaaagactttattgaagttgaaacgccaatgttacaagtgattccgggcggtgcggctgcaaaaccgtttatcactcaccataatgcgttagacgtagatatgtatttacgtatcgcacctgagctttacttaaaacgtttagtagttggcggttttgagcgtgtattcgaattaaaccgtaacttccgtaatgaaggtgtttcagtgcgtcacaaccctgagttcactatgatcgaatactatcaagcgtatgcggattatcacgatttaatggataacaccgaagaattattacgtaaattagcgattgatattcttggcacgacaaccgttccttacggtgaatacgtgttcgatttcggtaaaccgtttgaacgtatcacaatgcacgatgcaatcgtgaaatacggtaacggcattacacgtgaagatttagacagctttgaaaaatcagtagaaattgcaaaaggcttaggtattgaaatccaaaaatcttggggcttaggttctgtggttaatgcgatttttgaagaagttgcggaacatcaattaattcaaccgaccttcttaatggcacatccggcagaaatttcaccgcttgcgcgccgtaatgatgaaaaccctgaagtaactgatcgtttcgaattatttatcggtggtcgtgaaatcggtaacggtttctcagaattaaatgatgcggaagaccaagcagagcgttttgatgcacaagtggcagcaaaagatgcgggtgatgatgaagcgatgtttaaagatgaagacttcgttgttgcgttagaacacggtttaccgccgacagccggcgaaggtttaggtatcgaccgtttagcaatgatttttgcaaacgcaccgtcaattcgtgatgtgatcttattccctgcgatgcgtcagaaataa

SEQ ID NO: 44673 - protein, 500 aa, Actinobacillus pleuropneumoniae serovar 1 str. 4074
MSEVEHQELDLNGEMLARREKLAKLREQGNPFPNTFRRDAYAEKLHAQYDEVEGEALKEQDIQVKVAGRIMLKRVMGKASFFTIQDVSGQIQLYVARDNLAEGVYADKVSMWDLGDIVGVAGTLFKTKTGELTVRCSEVELLTKSLRPLPNKVQGLTDQETRYRQRYLDLISNEESRRTFMIRSKVVSGIRQFFLEKDFIEVETPMLQVIPGGAAAKPFITHHNALDVDMYLRIAPELYLKRLVVGGFERVFELNRNFRNEGVSVRHNPEFTMIEYYQAYADYHDLMDNTEELLRKLAIDILGTTTVPYGEYVFDFGKPFERITMHDAIVKYGNGITREDLDSFEKSVEIAKGLGIEIQKSWGLGSVVNAIFEEVAEHQLIQPTFLMAHPAEISPLARRNDENPEVTDRFELFIGGREIGNGFSELNDAEDQAERFDAQVAAKDAGDDEAMFKDEDFVVALEHGLPPTAGEGLGIDRLAMIFANAPSIRDVILFPAMRQK

SEQ ID NO: 44674 - DNA, 1527 bp, Rubrivivax gelatinosus PM1
  CDS (1)..(1527): transl_table=11
atgaccaccacgcccccgaacgccgccacgcccggcaccgacgacaaccagctgatcgccgaacgccgcgagaagctcgctgcactgcgtgcgcaggcccaggccacggggagagccgccttccccaatgacttcaagccgggcgaccatgccgtcgacctgcaccgcctgcacgagggcaagagcgccgaggagctggaggcgctggccatcccggcccgcatcgccggccgcatgatgctcaagcgcgtgatgggcaaggcctgcttcgcgacgctgcaggacggctcgggccgcatccagctctacatcacgtccgacgccgtcggcccggaggcgctggccgccttcaagcactgggacctgggcgacatcctcggcgccgagggcacgctgttcaagacccgcaccggcgagctgagcctcaaggtcggcacgatccggctgctgaccaagagcctgcggccactgcccgacaagttccacggcatggccgaccaggagctcaagtaccgccagcgcgaggtcgacctgatcatggacgaggcctcgcgcgagcgcttccgcgcgcgcagcaaggccgtgagctcgatccggcagttcatggtcgagcacggcttcctcgaggtcgagacgccgatgctgcaccccatccccggcggcgcgaacgccaagcccttcgtgacgcaccacaacgcgctcgaccagcagatgttcctgcgcatcgcgcccgagctctacctgaagcggctggtggtgggcggcttcgagcgggtgttcgagatcaaccgcaacttccgcaacgagggcgtgtcggtccggcacaaccccgagttcacgatgatggagttctacgcggcctactggacccaccacgacctgatggacttcaccgagcagatcctgcgccacgccgcgcgcaaggcggtgggcacggcgcagctcgcctacggtgggcaggccgtcgacctggaatcgccgttcgcgcggctctcggtgcgcgactcgctgatcgcccatgcaggattgagcgcggcggaagccgccgacaccacggtgctgcgcgcgaagctcgaagcgcatggcgagaaggctccggcgcactggtcgctcgccgaactgcagttcggcctgttcgaggcggccgtcgaggaaaagctgtggcagccgaccttcatcgtcgactacccggtggaggtgtcgccgctggcccgcgcctccgatgccgacccgacgatcaccgagcgcttcgagctcttcatcaccggccgcgagttcggcaacggcttctcggagctcaacgaccccgaggaccaggccgcgcgcttcgcggcccaggcctcgaacaaggacgccggtgacgaggaggcgatgtacttcgacaccgactacatccgcgcgctcgagcacggcctgccgcccaccggcggctgcggcatcggcatcgaccgactgatgatgctgttgaccgactcgccgaacatccgcgacgtgatcctgttccccgcgctgcggcgcgagggctga

SEQ ID NO: 44675 - protein, 508 aa, Rubrivivax gelatinosus PM1
MTTTPPNAATPGTDDNQLIAERREKLAALRAQAQATGRAAFPNDFKPGDHAVDLHRLHEGKSAEELEALAIPARIAGRMMLKRVMGKACFATLQDGSGRIQLYITSDAVGPEALAAFKHWDLGDILGAEGTLFKTRTGELSLKVGTIRLLTKSLRPLPDKFHGMADQELKYRQREVDLIMDEASRERFRARSKAVSSIRQFMVEHGFLEVETPMLHPIPGGANAKPFVTHHNALDQQMFLRIAPELYLKRLVVGGFERVFEINRNFRNEGVSVRHNPEFTMMEFYAAYWTHHDLMDFTEQILRHAARKAVGTAQLAYGGQAVDLESPFARLSVRDSLIAHAGLSAAEAADTTVLRAKLEAHGEKAPAHWSLAELQFGLFEAAVEEKLWQPTFIVDYPVEVSPLARASDADPTITERFELFITGREFGNGFSELNDPEDQAARFAAQASNKDAGDEEAMYFDTDYIRALEHGLPPTGGCGIGIDRLMMLLTDSPNIRDVILFPALRREG

SEQ ID NO: 44676 - DNA, 1506 bp, Pseudomonas aeruginosa; identical to SEQ ID NO: 30043
  CDS (1)..(1506): transl_table=11

SEQ ID NO: 44677 - protein, 501 aa, Pseudomonas aeruginosa; identical to SEQ ID NO: 30044

SEQ ID NO: 44678 - DNA, 1497 bp, Dichelobacter nodosus VCS1703A; identical to SEQ ID NO: 30123
  CDS (1)..(1497): transl_table=11

SEQ ID NO: 44679 - protein, 498 aa, Dichelobacter nodosus VCS1703A; identical to SEQ ID NO: 30124

SEQ ID NO: 44680 - DNA, 1761 bp, Oryza sativa (japonica cultivar-group); identical to SEQ ID NO: 30439
  CDS (1)..(1761)

SEQ ID NO: 44681 - protein, 586 aa, Oryza sativa (japonica cultivar-group); identical to SEQ ID NO: 30440

SEQ ID NO: 44682 - DNA, 1809 bp, Arabidopsis thaliana; identical to SEQ ID NO: 30047
  CDS (1)..(1809)

SEQ ID NO: 44683 - protein, 602 aa, Arabidopsis thaliana; identical to SEQ ID NO: 30048

SEQ ID NO: 44684 - DNA, 1476 bp, Streptococcus pneumoniae TIGR4
  CDS (1)..(1476): transl_table=11
atggaagaactaaatgaccagcagatcgttcgccgtgaaaaaatggctgcgctccgcgaacaaggaatcgatcctttcggaaaacgttttgaacgtactgcaaattcacaagaattaaaagataaatatgccaacctcgataaagaacaattacacgataaaaacgaaacagctactatcgcaggacgcttgataaccaaacgtggtaaaggaaaagttggttttgcccaccttcaagaccgcgaaggccagattcagatctacgttcgtaaggatgctgtcggtgaagaaaactacgaaatcttcaaaaaagcagaccttggtgacttccttggtgtcgaaggtgaagtgatgcgtacggatatgggagaactctctatcaaggcaacccacatcacacacttgtctaaggctcttcgtcctcttcctgagaaattccatggtttgacagacgttgaaacaatttaccgtaaacgttaccttgacttgatttctaatcgtgaaagctttgaacgctttgtcactcgttcaaaaatcatctctgaaatccgtcgttaccttgaccaaaaaggattccttgaagtggaaacacctgttcttcataatgaagccggtggtgctgctgcccgtccatttatcacccaccacaatgcccaaaacattgacatggtgcttcgtatcgcgactgagcttcacttaaaacgccttatcgtgggtggtatggaacgtgtctatgaaattggccgtatcttccgtaacgaaggaatggacgctactcataaccctgagttcacttctatcgaagtttaccaagcttatgcagacttccaagacatcatggacttgactgaaggcattatccaacacgctgctaaatcagtcaaaggtgatggcccagtcaactaccaaggtactgaaatcaagattaacgaaccatttaagcgtgttcatatggtggatgctatcagagaaattactggtgtcgatttctggcaagacatgactttggaagaagctaaagctatcgctgctgagaagaaagttccagttgagaaacactacactgaggttggtcacatcatcaatgccttctttgaagagtttgttgaagaaactttaatccaaccaacctttgtctatggacatccagtagctgtatctccactcgctaagaaaaatcctgaagaccaacgctttactgaccgtttcgagctctttatcatgactaaggagtacggtaatgcctttactgagttgaacgacccaatcgaccaacttagccgttttgaagcccaagctaaagccaaagaacttggtgatgatgaagcgacaggaatcgactatgactacattgaagctcttgaatacggtatgccaccaacaggtggtttgggaatcggtatcgaccgtctctgcatgctcctcactgatacaacaactatccgtgatgtattgctcttcccaacaatgaaataa

SEQ ID NO: 44685 - protein, 491 aa, Streptococcus pneumoniae TIGR4
MEELNDQQIVRREKMAALREQGIDPFGKRFERTANSQELKDKYANLDKEQLHDKNETATIAGRLITKRGKGKVGFAHLQDREGQIQIYVRKDAVGEENYEIFKKADLGDFLGVEGEVMRTDMGELSIKATHITHLSKALRPLPEKFHGLTDVETIYRKRYLDLISNRESFERFVTRSKIISEIRRYLDQKGFLEVETPVLHNEAGGAAARPFITHHNAQNIDMVLRIATELHLKRLIVGGMERVYEIGRIFRNEGMDATHNPEFTSIEVYQAYADFQDIMDLTEGIIQHAAKSVKGDGPVNYQGTEIKINEPFKRVHMVDAIREITGVDFWQDMTLEEAKAIAAEKKVPVEKHYTEVGHIINAFFEEFVEETLIQPTFVYGHPVAVSPLAKKNPEDQRFTDRFELFIMTKEYGNAFTELNDPIDQLSRFEAQAKAKELGDDEATGIDYDYIEALEYGMPPTGGLGIGIDRLCMLLTDTTTIRDVLLFPTMK

SEQ ID NO: 44686 - DNA, 1449 bp, Pyrobaculum aerophilum str. IM2
  CDS (1)..(1449): transl_table=11
atgtctgagaggcagagccgggataaaattgaggagtggcggatgctaattgcctcgctgcggggggcgggggttgagccctatccgcactcctactcgcctacgcacagcgtgagggcgcttaatgagctcaggcggcaggccctcctcgacccgtggctcggcatgactataaagaccgcggggagagtgtctgacataaggcggcatccaaacgtggtgtttatagacttatacgaagacggggcgcggtttcaagtaatggccgatcccaagctccccttgttggagcacatatggcggggggattttatcggcgttgagggccctcttgtgaaaacccagcggggggactacgcggtgagagccgcttctattgtcctcttggccaaggcggttcagcctctgcctgagtggggcaaggtggatagggactcgcccttttacatgaggtaccgctctgtggcaatggtgctggacctccagttgaggtggcgcatagcggctagggccaagctcatacaagcgtttagagaggccatgtggaaaaggggctttttggaaatccccacccccgtcctccagcctatatacggcggcgccgcggcgaggcccttcactacaaagatctgggctattgacgaagagtggtacctccgcatatcccccgagctttacctcaagcggtatataatagcgggctttcccaaggtctttgaaataggccctcaattccgcaatgaggatatcgacgcattgcacaaccccgagttctggtcgctggaggcctatcaggcctacgccgactataaagacattatgagactcactgaggaagtggtttacgaggctgttagctctgtgttgggcactggcgttgttaaatacagggactggaacattaacttcaacccgccgtggaggcgcattactctccacgacgccctccgggaattcgcgggggtagaccccgacaagctcactgacgatcaaattaaggagaggctgagagagctccaagtacccataagggtgtacaacaggggggtggccttggtgaagctctttgagaagctcgtggagaaaaagctagtagagcccacttttgtcatggactacccagaggagtcaacgccgttgtgcaagccgcatagagagaggcccggcctggtggagcgttttgaggcctttgtgggaggccacgaagtggctaatgcctatacagagctgaacgacccggtgaggcagtatgagtacttcgtgcgggaggaggagctgttccccaaggacgaggcgcaccccctggactgggatttcgtcgaagagctttccttcggcatgccgcccactggcggcgtgggaattggcgtcgacaggctggcgatgattatcactaacgccgagtctattaaagacgtcatcccctacccaattgtgaagaggggatag

SEQ ID NO: 44687 - protein, 482 aa, Pyrobaculum aerophilum str. IM2
MSERQSRDKIEEWRMLIASLRGAGVEPYPHSYSPTHSVRALNELRRQALLDPWLGMTIKTAGRVSDIRRHPNVVFIDLYEDGARFQVMADPKLPLLEHIWRGDFIGVEGPLVKTQRGDYAVRAASIVLLAKAVQPLPEWGKVDRDSPFYMRYRSVAMVLDLQLRWRIAARAKLIQAFREAMWKRGFLEIPTPVLQPIYGGAAARPFTTKIWAIDEEWYLRISPELYLKRYIIAGFPKVFEIGPQFRNEDIDALHNPEFWSLEAYQAYADYKDIMRLTEEVVYEAVSSVLGTGVVKYRDWNINFNPPWRRITLHDALREFAGVDPDKLTDDQIKERLRELQVPIRVYNRGVALVKLFEKLVEKKLVEPTFVMDYPEESTPLCKPHRERPGLVERFEAFVGGHEVANAYTELNDPVRQYEYFVREEELFPKDEAHPLDWDFVEELSFGMPPTGGVGIGVDRLAMIITNAESIKDVIPYPIVKRG

SEQ ID NO: 44688 - DNA, 1725 bp, Drosophila melanogaster; identical to SEQ ID NO: 30055
  CDS (1)..(1725)

SEQ ID NO: 44689 - protein, 574 aa, Drosophila melanogaster; identical to SEQ ID NO: 30056

SEQ ID NO: 44690 - DNA, 1776 bp, Schizosaccharomyces pombe 972h-; identical to SEQ ID NO: 30059
  CDS (1)..(1776)

SEQ ID NO: 44691 - protein, 591 aa, Schizosaccharomyces pombe 972h-; identical to SEQ ID NO: 30060

SEQ ID NO: 44692 - DNA, 1581 bp, Corynebacterium glutamicum ATCC 13032; identical to SEQ ID NO: 30061
  CDS (1)..(1581): transl_table=11

SEQ ID NO: 44693 - protein, 526 aa, Corynebacterium glutamicum ATCC 13032; identical to SEQ ID NO: 30062

SEQ ID NO: 44694 - DNA, 1683 bp, Bifidobacterium longum NCC2705
  CDS (1)..(1683): transl_table=11
atggctgaagttgtcgaaaataccgaaaacactgagaatgaaaccccggccgtcccgcagatgagcaccgtcgaacgtgcggaaatgctgctcaagcaggacgccaccatccgcgagaagatcaagtccggtgccacgctggacgaagccgtggacccctccaacaaggagttcggcccgctggcccaccccgagcaggtgcagatgcgcgtggccaagcgcgcgatgatgcttgaggccggcatcgccccctacccggtgcacttggacgtcaccgacaccatcgaggcggtccgcgccaagtatgacggcaagctcgaggctggcgaagagaccgaagacatggtcggcattgctggccgcgtgctgttcctgcgcaacgcgggcggcctgtgcttcgtgcagctgtccgccggtgacggcaccaagattcagggcatgatctccaagaaggagattggcgccgattcgctcaagcagttcaagcagctcgtcgaccttggcgatcacttgtacctcaagggccgcgtcatcgcctccaagaccggcgagctgtccgtattcgccactgagtgggctatcgcctctaaggccctgcagccgctgccggccctgcacaaggacctgaacgaagacacccgcacccgcaagccgtacatcggcatgatcgcggacgagaacatccgcaacatggtgcgcaaccgctccaaggccgtggcctccctgcgccgcacctttgacgaccacgacttcctcgaggtcgaaaccccgatgctgcagaccctgcacggtggcgcggccgcccgcccgttcaccacgcacatgaacgccttcgaccttgacctgtaccttcgcatcgccccggaactgttcctcaagcgctgcctggtcggcggcatcgatcgcgtgttcgaaatcaaccgtgacttccgcaatgagggcgtcgacgccacgcacgcccccgaattcaccatggtcgaggcctaccaggcctatggcacctatgattccatcggccagctggtcaaggagctcgtgcagaagaccgccatggacgtctacggctcgcacaaggtcaccctgctcgacggcaccgaatacgacttcggcggcgaatggaagaccatcagcatgtacgactccctgtccgaatcgttgggcgaggagatcgtgccgaacggcggcccggacgcccccggcacctccgttgagcacctgggcgccatcgccgacaagctcggcgtagagcgcgacgacgtggagaaccacggcaagctcgtcgaacacctgtgggagcacttctacgaggacaagctttacgagcccaccttcgtgcgtgacttcccggtcgaaacctccccgctggtcaagggccaccgcaccaagcccggcgtggtggagaagtgggatctctacgtgcgcggcttcgagctggctaccggctactccgagctcaacgacccgatcgtgcagcgtgaacgtttcgtggctcaggccaaggacgcgctcgctggcgacgaagaggcttgcgacatcgatgaggacttcctcgaggctctcggcgtgggcatgcctccggccggcggtatgggtatgggtattgatcgactgcttatcgccttgaccggtgccacgattcgcgagaccatcaccttcccgctggtcaagccgctcgttggctga

SEQ ID NO: 44695 - protein, 560 aa, Bifidobacterium longum NCC2705
MAEVVENTENTENETPAVPQMSTVERAEMLLKQDATIREKIKSGATLDEAVDPSNKEFGPLAHPEQVQMRVAKRAMMLEAGIAPYPVHLDVTDTIEAVRAKYDGKLEAGEETEDMVGIAGRVLFLRNAGGLCFVQLSAGDGTKIQGMISKKEIGADSLKQFKQLVDLGDHLYLKGRVIASKTGELSVFATEWAIASKALQPLPALHKDLNEDTRTRKPYIGMIADENIRNMVRNRSKAVASLRRTFDDHDFLEVETPMLQTLHGGAAARPFTTHMNAFDLDLYLRIAPELFLKRCLVGGIDRVFEINRDFRNEGVDATHAPEFTMVEAYQAYGTYDSIGQLVKELVQKTAMDVYGSHKVTLLDGTEYDFGGEWKTISMYDSLSESLGEEIVPNGGPDAPGTSVEHLGAIADKLGVERDDVENHGKLVEHLWEHFYEDKLYEPTFVRDFPVETSPLVKGHRTKPGVVEKWDLYVRGFELATGYSELNDPIVQRERFVAQAKDALAGDEEACDIDEDFLEALGVGMPPAGGMGMGIDRLLIALTGATIRETITFPLVKPLVG

SEQ ID NO: 44696 - DNA, 1824 bp, Drosophila melanogaster; identical to SEQ ID NO: 30063
  CDS (1)..(1824)

SEQ ID NO: 44697 - protein, 607 aa, Drosophila melanogaster; identical to SEQ ID NO: 30064

SEQ ID NO: 44698 - DNA, 1506 bp, Streptococcus pyogenes SSI-1
  CDS (1)..(1506): transl_table=11
ttggaggaaaatatgtctaatcaacacatcgaagaattaaatgaccaacagattgtccgtcgtgaaaagatgatggctctggctgaacaaggaattgatcctttcggtaaacgctttggccgcacagccaattctgctgaattaaaagaaaactatgctgataaaacaaaagaagaattacatgagttaaacgaaacagctattgttgctggccgcttgatgacaaaacgtggcaaaggtaaggttggttttgctcatcttcaagaccgtgaaggccaaatccaactttatgttcgcaaggactctgttggcgaagacaactatgaaatcttcaaaaaagccgatttaggcgactttatcggcgttgaaggcgaagtcatgcgtacagacatgggcgagttgtcaatcaaggcaaccaagttgactcacctttctaaatcacttcgtcctcttcctgaaaaattccacggattaactgatattgaaaccatttaccgtaagcgtcaccttgatttaatttcaaatcgtgaaagctttgaccgcttcgtgacccgttccaaaatgatttcagaaatccgtcgttatttagacggtcttgatttcctagaagtagaaacgcctgtgcttcataacgaggctggtggtgctgctgctcgtcctttcgttactcaccataatgctcaaaacattgatatggtgcttcgtatcgcaacagaacttcatttgaaacgtttgattgttggtggtatggaacgtgtctatgaaattggtcgtatcttccgtaacgagggaatggatgctactcataatcctgagttcacttctattgaggtttaccaagcctatgcagactatcttgatatcatgaacctgacagaaggcattatccaacatgctgctaaagctgttaaaggtgatgggcctattgattatcaaggaactgaaatccgtatcaatgaacctttcaaacgtgtccacatggtagatgctatcaaggaagtgacaggtgttgatttctggcctgaaatgactgtcgaagaagctattgcacttgccaaagaaaaacaggtcccactcgaaaaacacttcacaagtgtcggacatatcatcaatgctttcttcgaagaattcgttgaagaaaccttggtccaaccaacctttgtgtttggtcatcctgttgaagtatcgcctttggctaagaagaatccagaagatacccgcttcaccgaccgcttcgaacttttcatcatgaccaaagaatacgccaatgctttcacagagttgaatgatcccattgaccaattatctcgttttgaagcacaagcacaagccaaagaacttggtgatgacgaagcaactggcattgactacgacttcgttgaagctcttgaatatggtatgccgccaaccggtggactcggaatcgggattgatcgtctttgcatgttattaacaaacacaacaacaatcagagatgtgcttttattcccaacgatgaaaccttaa

SEQ ID NO: 44699 - protein, 501 aa, Streptococcus pyogenes SSI-1
MEENMSNQHIEELNDQQIVRREKMMALAEQGIDPFGKRFGRTANSAELKENYADKTKEELHELNETAIVAGRLMTKRGKGKVGFAHLQDREGQIQLYVRKDSVGEDNYEIFKKADLGDFIGVEGEVMRTDMGELSIKATKLTHLSKSLRPLPEKFHGLTDIETIYRKRHLDLISNRESFDRFVTRSKMISEIRRYLDGLDFLEVETPVLHNEAGGAAARPFVTHHNAQNIDMVLRIATELHLKRLIVGGMERVYEIGRIFRNEGMDATHNPEFTSIEVYQAYADYLDIMNLTEGIIQHAAKAVKGDGPIDYQGTEIRINEPFKRVHMVDAIKEVTGVDFWPEMTVEEAIALAKEKQVPLEKHFTSVGHIINAFFEEFVEETLVQPTFVFGHPVEVSPLAKKNPEDTRFTDRFELFIMTKEYANAFTELNDPIDQLSRFEAQAQAKELGDDEATGIDYDFVEALEYGMPPTGGLGIGIDRLCMLLTNTTTIRDVLLFPTMKP

SEQ ID NO: 44700 - DNA, 1641 bp, Rhodopirellula baltica SH 1
  CDS (1)..(1641): transl_table=11
gtgaatgaggcggcaaattcacaatcgtcagcccgattgattgtttccaccttcgcaagtgcatttgccgtgaccgatacgccttccaacgctgacgaccttgatttgaccgacccgcacgcggctcgtcggcacaaactggaagaaatcaccgcgaaaggcatcgatccctggggccagcgtttcgacgaccgtttgctggtcagcgagtgccgcgaccggattccacaaatccagtggcagcaaaaggacggcgaaacaatcgctctgcccgacgttgaaagcgacgaagtcgattaccgccaatggaaagccgacaacggcccaggcgaggaaatcggcccgatcgttcgcgttgccggacggattttgttggcccggccgaccggcaagttgatcttcatgaatatccgcgactggaccggcgacatccagatctttgtcggcaagaagcaagtcggcgacgaaaactttgatctggccaaactgtttgacctgggcgatttgatcggtgttcaagggcgactgggccgcaccaacacgggcgagctgaccgtgttcgcggaagagctgttcttgctgacgaagatgttggaagtcccgccggaaaagcacgccgggatgaccaatcaagacctgcgtcaacggatgcggtatgccgacttggcgttcaacgatggcgtgatgcaaacattcctcgatcgcaccaaaatcatcaaaagcattcgctcgacgctggacgaccaaggtttctgcgaagtcgaaggcccgacgctgcacaccgttcccggtggcgccgctgctcgtccgtttgaaacgcatcacaacgcgttggacatgcagttgaccatgcggatcgcgttggagctgcacctcaagcgattgatggtcggcgggatggaacgcgtttacgaactgggacgcgtctatcgcaacgaaggtttgtcaccacggcacaaccccgagttcacgatgctggaaacctatcaggcgtacggcaactacgaatccatgatggatctgactgaaaagatcatctgtgacgcgatcgaaaagatcggcggcggattcaaacgtgaatacaacggcacgatgttggacttcactccaccgttccagcgtgcgacgtatgcggagttgttccagaaggccaccggcatcgatcccgctaacgaagacgcggtcaaggaatacgccaaggggctgaagctgaccatcgaaggcaaacaccccgatgtgatccgcaacgagatcttcgaagagaaggtcgaagattcattgcaaggcccgatcttcgtgacggactatcccgccagcatttgcccgctaaccaaacgcaagaaggacaaccccgaaatcgccgagcgtttcgagatgttcatttgcgggatggaattggccaacgcttacaccgaactgaacgatcccgacctgcaagaagagttgttcaagactcaactcgaaggtcaggacgacgaagactcgatggccaaaatggaccacgacttcgtccgcgcgttgcgttacgggatgccgcccgctggcggattggggattggcatcgaccgcttggtgatggttctgacgaaccaaaaatccatccgcgacgtgatcctgttccccgtgcttcgccctgaatga

SEQ ID NO: 44701 - protein, 546 aa, Rhodopirellula baltica SH 1
MNEAANSQSSARLIVSTFASAFAVTDTPSNADDLDLTDPHAARRHKLEEITAKGIDPWGQRFDDRLLVSECRDRIPQIQWQQKDGETIALPDVESDEVDYRQWKADNGPGEEIGPIVRVAGRILLARPTGKLIFMNIRDWTGDIQIFVGKKQVGDENFDLAKLFDLGDLIGVQGRLGRTNTGELTVFAEELFLLTKMLEVPPEKHAGMTNQDLRQRMRYADLAFNDGVMQTFLDRTKIIKSIRSTLDDQGFCEVEGPTLHTVPGGAAARPFETHHNALDMQLTMRIALELHLKRLMVGGMERVYELGRVYRNEGLSPRHNPEFTMLETYQAYGNYESMMDLTEKIICDAIEKIGGGFKREYNGTMLDFTPPFQRATYAELFQKATGIDPANEDAVKEYAKGLKLTIEGKHPDVIRNEIFEEKVEDSLQGPIFVTDYPASICPLTKRKKDNPEIAERFEMFICGMELANAYTELNDPDLQEELFKTQLEGQDDEDSMAKMDHDFVRALRYGMPPAGGLGIGIDRLVMVLTNQKSIRDVILFPVLRPE

SEQ ID NO: 44702 - DNA, 1563 bp, Corynebacterium diphtheriae NCTC 13129
  CDS (1)..(1563): transl_table=11
gtgagtaacgctaaaaacacccaagacgtacctgagcagctccgcattcgtcgcgagaagcgccagaagcttatcgacgccggcgtggagccgtatccagtcatcgttgaccgcacccactcgatcaccgagctgcgcgagaagtttgcagctgtgccagagggtgaaaagggcgacaagccaggcgttacctacctcgaaccaggcgaggattccggcgtagaggttgccatcaccggccgcgccctgtttatccgcaacaccggcaagctgtgcttcgctgctctccaagagggcaacggcgagtacatgcaggctatgttgtccttggctgaggttggcgaggaatccttggcatcgtggaaggccgatgttgacctaggcgacatcgtttccatccgcggtaccgtcgtcgcttccaagcgtggcgagctttctgtgatggtgaactcgtggcacatggcgtcgaaatcgctacgcccactgcctgtggccttcgctgatatgagcgaggacatgcgtatccgccaccgttacaccgacttgattatgcgtgaacaggctcgtaccaacgctatgactcgtattaaggtcatgcgcgcgctacgccattaccttgaaggccaggacttcatggaagttgaaacccccatgctgcaaaccctgcacggcggcgcagcggcacgtccgtttgttacgcactccaacgcccttgatatcgacctctacctgcgtatcgcgccagaactttacctcaagcgctgcgtggttggtggtatcgagcgtgtattcgaggttaaccgcaacttccgcaacgagggcgtggactcctcgcactccccagagttcgccatgctggaaacctaccaagcgtggggcacctacgatgacggcgcgaagatgatccaagagctcatccagtccgtcgcaatggaagtctttggctccaccaccgtcacgcttgtcgacggcaccgagtacgacctcggcggcgaatggaagaccatcgagatgtacccatcactcaacgaggcgttgacacgcaagttcccaggccagccagaggtcaccatcgactccaccgtggatgaactcaaagcaatcgccgctgttatcggtttggacgttccagccaagggcggttggggccacggcaagctggtcgaagagatctgggagcacctgtgcgaagaccagctctacggcccaatcttcgttcgtgacttcccagtggaaacctcgccgctgactcgccagcaccgctccaagccaggtgttaccgaaaagtgggacctctacgtgcgcggtttcgaactagcaaccggctactccgagcttgtcgaccccgtcatccagcgcgagcgcttcgaggaccaagctcgtcttgccgccggtggcgacgatgaggccatggtcttggacgaggacttcctcgcagctatggagcagggcatgccaccaacggcaggctgcggcatgggcattgaccgcctcctgatggccctgaccggccttggcatccgcgagacagtactgttcccaatcgtgaagccggagcgctaa

SEQ ID NO: 44703 - protein, 520 aa, Corynebacterium diphtheriae NCTC 13129
MSNAKNTQDVPEQLRIRREKRQKLIDAGVEPYPVIVDRTHSITELREKFAAVPEGEKGDKPGVTYLEPGEDSGVEVAITGRALFIRNTGKLCFAALQEGNGEYMQAMLSLAEVGEESLASWKADVDLGDIVSIRGTVVASKRGELSVMVNSWHMASKSLRPLPVAFADMSEDMRIRHRYTDLIMREQARTNAMTRIKVMRALRHYLEGQDFMEVETPMLQTLHGGAAARPFVTHSNALDIDLYLRIAPELYLKRCVVGGIERVFEVNRNFRNEGVDSSHSPEFAMLETYQAWGTYDDGAKMIQELIQSVAMEVFGSTTVTLVDGTEYDLGGEWKTIEMYPSLNEALTRKFPGQPEVTIDSTVDELKAIAAVIGLDVPAKGGWGHGKLVEEIWEHLCEDQLYGPIFVRDFPVETSPLTRQHRSKPGVTEKWDLYVRGFELATGYSELVDPVIQRERFEDQARLAAGGDDEAMVLDEDFLAAMEQGMPPTAGCGMGIDRLLMALTGLGIRETVLFPIVKPER

SEQ ID NO: 44704 - DNA, 1536 bp, Onion yellows phytoplasma OY-M
  CDS (1)..(1536): transl_table=11
atggcaacaaaattaagcgaacaagaaattattagacatcaaaaaatgaatgaattaaaaaaaataaacatcgatccttttggaaaaaaatttgtcccttctcattccatcgaacaaattcttttgcaataccaaaaagcagatagtctagctctcgaacaatcacaaatccatgtttgtgtagctggcagaatcgttttaaaaagaggacaaggcaaagcaggttttttgcatttacaagattttaatttccgaatgcaagcatatataaaactggatttagtgggcaaagatgcttttcagatttatcaaaattgtgatttaggagatatcataggcatcaaaggttttttatttaaaaccaaaacgcaagaattaaccattaaagccttggaatttattcatcttaccaaagccctaaaacctttacctgacaaatttcatggcttgcaaaaccgcgaagagatgagaaaaaatcgctatgttgatctaatcgtaaacgaaaaaacaagacaagtatttttaactcgcagtttgattatgaaatacattagaaatttttttgataatcagggctttttagaagtagaaactcctattttacaaccaactttgggaggcgcttctgccaaaccttttatcactcatcacaacgctcttaattgtgatttttacttgagaattgctaccgaattaccccttaaaaaattaattgttggtggaatgaataaagtctatgaaatcggacgtcttttcagaaatgaaggaattgatgccacacataatcccgaatttagcactattgaggcttacttggcttatgctgatatgcaagatattatggacttaacaaagcaatgcttgcaagaattggcccaaaaattgtttggcaagttgcaatttacttaccaaaaccaagaaattgatttttcccattttgcaaaagtaagtatggttgcatcaatcaaggaaaaaacaggaattgattttacagataattttaccttggaacaatgcctttctttggcaaaaaaacaccaaattgaagttatgccccattttagtcaaggacatatcattgaggctttttttggaaaatacgtagaaaacactctcattcagcctacttttgtctacggacatccactggaaataagtcctttggcaaaacaaaacgaagctgatcctcgctttactgaccgttttgaactttttattgtaggtaaggaatttgctaatgcttttagcgaacttaacgaccctatcgaacaagaaaaacgttttttaaatcaattacaacaaaaacaattaggcaacgacgaagccaatgacatggactatgatttcctaaacgcccttaattatggcatgcctccaactggcggtcttggaatgggacttgatcgtttggttatgcttttaaccgatactgcaaatattcgtgatgttattttatttccacattgtaaaaatcaaaataaatttagtcaaaacaaaacagcaaataaagtcctaacgaataacgataacgaataa

SEQ ID NO: 44705 - protein, 511 aa, Onion yellows phytoplasma OY-M
MATKLSEQEIIRHQKMNELKKINIDPFGKKFVPSHSIEQILLQYQKADSLALEQSQIHVCVAGRIVLKRGQGKAGFLHLQDFNFRMQAYIKLDLVGKDAFQIYQNCDLGDIIGIKGFLFKTKTQELTIKALEFIHLTKALKPLPDKFHGLQNREEMRKNRYVDLIVNEKTRQVFLTRSLIMKYIRNFFDNQGFLEVETPILQPTLGGASAKPFITHHNALNCDFYLRIATELPLKKLIVGGMNKVYEIGRLFRNEGIDATHNPEFSTIEAYLAYADMQDIMDLTKQCLQELAQKLFGKLQFTYQNQEIDFSHFAKVSMVASIKEKTGIDFTDNFTLEQCLSLAKKHQIEVMPHFSQGHIIEAFFGKYVENTLIQPTFVYGHPLEISPLAKQNEADPRFTDRFELFIVGKEFANAFSELNDPIEQEKRFLNQLQQKQLGNDEANDMDYDFLNALNYGMPPTGGLGMGLDRLVMLLTDTANIRDVILFPHCKNQNKFSQNKTANKVLTNNDNE

SEQ ID NO: 44706 - DNA, 1476 bp, Geobacter sulfurreducens PCA; identical to SEQ ID NO: 30067
  CDS (1)..(1476): transl_table=11

SEQ ID NO: 44707 - protein, 491 aa, Geobacter sulfurreducens PCA; identical to SEQ ID NO: 30068

SEQ ID NO: 44708 - DNA, 1515 bp, Bdellovibrio bacteriovorus HD100; identical to SEQ ID NO: 30073
  CDS (1)..(1515): transl_table=11

SEQ ID NO: 44709 - protein, 504 aa, Bdellovibrio bacteriovorus HD100; identical to SEQ ID NO: 30074

SEQ ID NO: 44710 - DNA, 1503 bp, Mycoplasma mycoides subsp. mycoides SC str. PG1; identical to SEQ ID NO: 30075
  CDS (1)..(1503): transl_table=4

SEQ ID NO: 44711 - protein, 500 aa, Mycoplasma mycoides subsp. mycoides SC str. PG1; identical to SEQ ID NO: 30076

SEQ ID NO: 44712 - DNA, 1758 bp, Nasonia vitripennis; identical to SEQ ID NO: 30077
  CDS (1)..(1758)

SEQ ID NO: 44713 - protein, 585 aa, Nasonia vitripennis; identical to SEQ ID NO: 30078

SEQ ID NO: 44714 - DNA, 1848 bp, Magnaporthe grisea 70-15; identical to SEQ ID NO: 30081
  CDS (1)..(1848)

SEQ ID NO: 44715 - protein, 615 aa, Magnaporthe grisea 70-15; identical to SEQ ID NO: 30082

SEQ ID NO: 44716 - DNA, 1833 bp, Gibberella zeae PH-1; identical to SEQ ID NO: 30085
  CDS (1)..(1833)

SEQ ID NO: 44717 - protein, 610 aa, Gibberella zeae PH-1; identical to SEQ ID NO: 30086

SEQ ID NO: 44718 - DNA, 1776 bp, Candida glabrata CBS 138; identical to SEQ ID NO: 30089
  CDS (1)..(1776)

SEQ ID NO: 44719 - protein, 591 aa, Candida glabrata CBS 138; identical to SEQ ID NO: 30090

SEQ ID NO: 44720 - DNA, 1767 bp, Kluyveromyces lactis NRRL Y-1140; identical to SEQ ID NO: 30093
  CDS (1)..(1767)

SEQ ID NO: 44721 - protein, 588 aa, Kluyveromyces lactis NRRL Y-1140; identical to SEQ ID NO: 30094

SEQ ID NO: 44722 - DNA, 1782 bp, Debaryomyces hansenii CBS767; identical to SEQ ID NO: 30097
  CDS (1)..(1782)

SEQ ID NO: 44723 - protein, 593 aa, Debaryomyces hansenii CBS767; identical to SEQ ID NO: 30098

SEQ ID NO: 44724 - DNA, 1749 bp, Yarrowia lipolytica CLIB122; identical to SEQ ID NO: 30099
  CDS (1)..(1749)

SEQ ID NO: 44725 - protein, 582 aa, Yarrowia lipolytica CLIB122; identical to SEQ ID NO: 30100

SEQ ID NO: 44726 - DNA, 1836 bp, Apis mellifera; identical to SEQ ID NO: 30101
  CDS (1)..(1836)

SEQ ID NO: 44727 - protein, 611 aa, Apis mellifera; identical to SEQ ID NO: 30102

SEQ ID NO: 44728 - DNA, 1821 bp, Aspergillus nidulans FGSC A4; identical to SEQ ID NO: 30105
  CDS (1)..(1821)

SEQ ID NO: 44729 - protein, 606 aa, Aspergillus nidulans FGSC A4; identical to SEQ ID NO: 30106

SEQ ID NO: 44730 - DNA, 1785 bp, Candida albicans SC5314; identical to SEQ ID NO: 30107
  CDS (1)..(1785): transl_table=12

SEQ ID NO: 44731 - protein, 594 aa, Candida albicans SC5314; identical to SEQ ID NO: 30108

SEQ ID NO: 44732 - DNA, 1716 bp, Tribolium castaneum
  CDS (1)..(1716)
atggctgatgtaaccgatgagaaactatcaaagaacgagctgaaacgtcgcttaaaagccgaacaaaaagccaaagaaaaggctgagaaggtggctcaacagccggtcgaaaccaaacccaaagtaaagaaagagtcggaggaggacatcagtccgaatgagtacttcaagctgcgcacccaaacggtggcaaatcttaaatcgctggggggcgacaaccacccgtacccccacaaatttaacgtgtcgatatccttgcaggatttcatcgagaaatactcgggtctcaaggatggggaagtggtcgagaaggataaattaagtgttgcgggacgcgtccacgcaattcgggagtcaggggctaagttgattttctacgacttgaggggcgaaggcaccaagttgcaagtgatggcaacggcgcggaattacggtgacgaggcgaagtttgccgaagatacgggaaaaatccgtcggggggatatcatcggtgttgagggcgttcccacaaagacgaaaaaaggagagttgtcagtgatgccaaccaaaatcaagctgctgtctccgtgtttgcacatgttgccacatttgcattacgggcttaaggataaggagactcggttcaggcagcggtatctcgatttgattttgaatagtcgggtcagggaaattttcgaaattcgggccaaaattatttcgtacacgcgccggtttttcgacgaattggggttcttggaggttgagacgccaatgatgaatatgattgcaggcggggcgactgccaagccttttataacgcatcataacgagctcaatatggatttgtttatgagggtggcccccgaattgtatctcaaaatgttggtagtggggggcctggaccgtgtttatgaaatcgggcgtttgtttcggaacgaaggaatcgatctgacgcacaatcccgaattcacgtcgtgcgaattttacatggcttatgccgattatcatgatttgattgcaatcactgaagcccttatctccggaatggtgaagagcatccacgggagttataaaatcaagtatcatccagaaggtcccgagggagaggaggtcgaagttgatttcactccaccgttcaagcgaatccccatgattgcaactctggaggagatcctcaaagtgaaattcccgtcagctgagaatttgggttccgattcaacgaacaagtttttgagtgatctttgtacagcgcataatatcgagtgtcctccgccgaggaccagtgcgagattgctggataagttggttggggagtttattgaagaacagtgtgttaatccaacttttatcaccgaacatccgcaaattatgagcccgcttgcaaagtggcacaggtccgtgccgggtttgaccgaacgtttcgagttgtttgtgatgaaaaaggaaatttgtaatgcttacactgaactaaatgatccgatggtgcaaagacagcggtttgaagagcaagcaaaagacaaggctgccggtgacgatgaggcgcaattaattgatgaaaatttctgtacggcactggagtatggtttgcccccgacgggaggctggggcatggggatcgaccgattgaccatgttcttgaccgataataacaacatcaaggaggttttgttgttcccagcgatgaaacctgacgaccccaataggaatagagaggaggaggagaaagaaaatgtgtaa

SEQ ID NO: 44733 - protein, 571 aa, Tribolium castaneum
MADVTDEKLSKNELKRRLKAEQKAKEKAEKVAQQPVETKPKVKKESEEDISPNEYFKLRTQTVANLKSLGGDNHPYPHKFNVSISLQDFIEKYSGLKDGEVVEKDKLSVAGRVHAIRESGAKLIFYDLRGEGTKLQVMATARNYGDEAKFAEDTGKIRRGDIIGVEGVPTKTKKGELSVMPTKIKLLSPCLHMLPHLHYGLKDKETRFRQRYLDLILNSRVREIFEIRAKIISYTRRFFDELGFLEVETPMMNMIAGGATAKPFITHHNELNMDLFMRVAPELYLKMLVVGGLDRVYEIGRLFRNEGIDLTHNPEFTSCEFYMAYADYHDLIAITEALISGMVKSIHGSYKIKYHPEGPEGEEVEVDFTPPFKRIPMIATLEEILKVKFPSAENLGSDSTNKFLSDLCTAHNIECPPPRTSARLLDKLVGEFIEEQCVNPTFITEHPQIMSPLAKWHRSVPGLTERFELFVMKKEICNAYTELNDPMVQRQRFEEQAKDKAAGDDEAQLIDENFCTALEYGLPPTGGWGMGIDRLTMFLTDNNNIKEVLLFPAMKPDDPNRNREEEEKENV

SEQ ID NO: 44734 - DNA, 1527 bp, Prochlorococcus marinus str. MIT 9303; identical to SEQ ID NO: 30115
  CDS (1)..(1527): transl_table=11

SEQ ID NO: 44735 - protein, 508 aa, Prochlorococcus marinus str. MIT 9303; identical to SEQ ID NO: 30116

SEQ ID NO: 44736 - DNA, 1539 bp, Mycobacterium sp. JLS
  CDS (1)..(1539): transl_table=11
gtgacaccgaccggcggcgacaacacgcccgagaacaacgcgcccgataacgaccctgacattcccgagcagttccgcattcgtcaggccaagcgggaacgtctgctggccgagggtcgcgacccctacccggtggacgtggaccgcacgcacacgctcgccgaagttcgcgccgccttccccgacctgccggtcgactcgcagaccggcgagatcgtcggcgtcgccgggcgcgtcgtattcgcccgcaactcggggaagctgtgtttcgcgaccctgcaggagggcgacggtacgcagctgcaggccatgatcagcctggccgaggtggggcaggaatcgctggacagctggaaagccgacgtcgacctgggtgacatcgtgtccgtccacggccaggtcatcagttcccgtcgcggtgagctctctgtgctcgccgattcctggcaaatcatctccaaggcgctgcggccgcttccggtcgcgcacaaggaaatgagcgaggaggcgcgggtgcggcagcgctacgtcgacctcatcgtgcgtccggaggcccgcaccatcgcacgtcaacgcgtggccgtcgtgcgtgcgctccgcaacgcgctcgagcggcgcggcttcctcgaactcgagacgccgatgctgcagaccctggccggcggtgcggcggcccggccgttcgtcacccactccaatgcgctcgatgtggacctatacctgcgtatcgcgccggagttgttcctcaagcgtgccctggtcggtggtttcgagaaggtcttcgagttgaatcgcaacttccgaaacgaaggtatcgattccacgcattctcccgaattcgcgatgctggagacttatcaggcgtatggcgactacaacgattccgcggtggtgacgcgggaactaattcaggaagtcgccgacgaggcgatcggcacccgtcaagtgccattggccgatggcactgtctacgacctggacggtgagtgggagtcgttggaaatgtacccctcgctgtccgcggcgctgggtgaggagatcaccccgcagacccccgccgacgaactctggcggatcgccgaccggctcggtgtggagattccccgtgaccgcggatacggccacgggaaattgatcgaggaactgtgggagcacaccgtcggcgaggatctctgggcgccgaccttcgtgcgggacttcccggtggagacgaccccgctcacccggtcgcaccgcagcgttcccggcgtcaccgagaagtgggatctctatgtccgcaagttcgagttggcgaccggctattccgaactcatcgatccgataattcagcgcgagcgattcgaggagcaggcgcgagcggccgctgccggtgacgacgaggcaatggttctcgacgacgatttcctggcggcattggagtacggcatgccgccgtccaccggtaccggaatgggcatcgaccggttgctgatggcgctgactggactgtcaattagagagacaattctcttcccgattgttcggcggcacggcggctga

SEQ ID NO: 44737 - protein, 512 aa, Mycobacterium sp. JLS
MTPTGGDNTPENNAPDNDPDIPEQFRIRQAKRERLLAEGRDPYPVDVDRTHTLAEVRAAFPDLPVDSQTGEIVGVAGRVVFARNSGKLCFATLQEGDGTQLQAMISLAEVGQESLDSWKADVDLGDIVSVHGQVISSRRGELSVLADSWQIISKALRPLPVAHKEMSEEARVRQRYVDLIVRPEARTIARQRVAVVRALRNALERRGFLELETPMLQTLAGGAAARPFVTHSNALDVDLYLRIAPELFLKRALVGGFEKVFELNRNFRNEGIDSTHSPEFAMLETYQAYGDYNDSAVVTRELIQEVADEAIGTRQVPLADGTVYDLDGEWESLEMYPSLSAALGEEITPQTPADELWRIADRLGVEIPRDRGYGHGKLIEELWEHTVGEDLWAPTFVRDFPVETTPLTRSHRSVPGVTEKWDLYVRKFELATGYSELIDPIIQRERFEEQARAAAAGDDEAMVLDDDFLAALEYGMPPSTGTGMGIDRLLMALTGLSIRETILFPIVRRHGG

SEQ ID NO: 44738 - DNA, 1536 bp, Herminiimonas arsenicoxydans; identical to SEQ ID NO: 30119
  CDS (1)..(1536): transl_table=11

SEQ ID NO: 44739 - protein, 511 aa, Herminiimonas arsenicoxydans; identical to SEQ ID NO: 30120

SEQ ID NO: 44740 - DNA, 1590 bp, Candidatus Protochlamydia amoebophila UWE25; identical to SEQ ID NO: 30127
  CDS (1)..(1590): transl_table=11

SEQ ID NO: 44741 - protein, 529 aa, Candidatus Protochlamydia amoebophila UWE25; identical to SEQ ID NO: 30128

SEQ ID NO: 44742 - DNA, 1518 bp, Erwinia carotovora subsp. atroseptica SCRI1043; identical to SEQ ID NO: 30129
  CDS (1)..(1518): transl_table=11

SEQ ID NO: 44743 - protein, 505 aa, Erwinia carotovora subsp. atroseptica SCRI1043; identical to SEQ ID NO: 30130

SEQ ID NO: 44744 - DNA, 1500 bp, Mesoplasma florum L1; identical to SEQ ID NO: 30131
  CDS (1)..(1500): transl_table=4

SEQ ID NO: 44745 - protein, 499 aa, Mesoplasma florum L1; identical to SEQ ID NO: 30132

SEQ ID NO: 44746 - DNA, 1533 bp, Propionibacterium acnes KPA171202
  CDS (1)..(1533): transl_table=11
gtgagttctgacactgcatccagccagtcccctgacgtctccgagcagatgcaggtccgcctcgacaagcgggcccggatcatcgctgacggaggccaggcttatccggtcgatttgctacgcgaccacaccctggtccaggttcgtcagaaatacaccgacgacaccggggagctgaccttggcgcctggcgaggagaccaccgatgaggtcaccgtcggcggacgtgtcgtctttgtccgcaataccggcaaactgtgtttcgccagcttgcaggacgggtttaccgagacttccaacggtgagcggttgcagatcatgctttccaaagccgaggtgggcgatgagtccttggctgcgtggaagtccgacgttgacctgggtgaccacgtctgggtgcgtggccgagtcgtcgtctctcgtcgtggtgagttatccatcatggctgctgagtggcggatggcctccaaggctctgcgtccgctgccgaccctccataaggagctctcggaggagagccgggtgcgtcgtcgctacgcggatctcgtcgttcgtgaagagtctcgccagatggtgcgcacccgcgccgttatcacccgcgcggtgcgtcgcgccctcgacgagcgcggtttccttgagatcgagactccgatcctgcagttggtccacggtggtgccgcagcccgcccgtttaatacccacctcaatgccttcgacattgacatgagtttgcgtatcgctcttgagctctatctcaagcggacgatggtcggcggcaccgatcgggtctacgagatgggtcgggtcttccgcaacgagggtattgattccagccactcggccgagttctctatgctcgaggcctacatgagctggggcaaccaattcactattgctgaggtgatcaaggacatcatcatggcggtggccgacgccctcgacgtccatcagattgagacccccaagggcactatcgacctcgacgggcagtggcgttgggtcagcgtctacccaggcctgtcggaaaaactagggcgtgaagtcacccttgacaccccgttggaggagttgcagtccatcgccgctgagcacgagattgagatcgaccagtcttgggaggccggcaaggtcgttatggagcttttcggtgaactcgtcgagccgggccttatcaaccccaccttcgtctgtgattacccggctatcgcccagccgctggcccgtccgcaccgcgacgatcctcgcatggttgaggcctgggacctcatcattggcgggatggagcgcggtactggcttctccgagctcgtcgacccagtcatccagcgcgaagtgcttaccaagcaatccctcgctgctgccgcgggtgaccctgaggcgatgcagcttgacgaggacttcctcgaggccctggaattcggctgcccgcccatgggtggtctggggctgggtgtcgaccggctggtgatgctctttaccaacgctgggatccgcgagacgatcctcttcccgctgctcaagccggaacactga

SEQ ID NO: 44747 - protein, 510 aa, Propionibacterium acnes KPA171202
MSSDTASSQSPDVSEQMQVRLDKRARIIADGGQAYPVDLLRDHTLVQVRQKYTDDTGELTLAPGEETTDEVTVGGRVVFVRNTGKLCFASLQDGFTETSNGERLQIMLSKAEVGDESLAAWKSDVDLGDHVWVRGRVVVSRRGELSIMAAEWRMASKALRPLPTLHKELSEESRVRRRYADLVVREESRQMVRTRAVITRAVRRALDERGFLEIETPILQLVHGGAAARPFNTHLNAFDIDMSLRIALELYLKRTMVGGTDRVYEMGRVFRNEGIDSSHSAEFSMLEAYMSWGNQFTIAEVIKDIIMAVADALDVHQIETPKGTIDLDGQWRWVSVYPGLSEKLGREVTLDTPLEELQSIAAEHEIEIDQSWEAGKVVMELFGELVEPGLINPTFVCDYPAIAQPLARPHRDDPRMVEAWDLIIGGMERGTGFSELVDPVIQREVLTKQSLAAAAGDPEAMQLDEDFLEALEFGCPPMGGLGLGVDRLVMLFTNAGIRETILFPLLKPEH

SEQ ID NO: 44748 - DNA, 1512 bp, Desulfotalea psychrophila LSv54; identical to SEQ ID NO: 30137
  CDS (1)..(1512): transl_table=11

SEQ ID NO: 44749 - protein, 503 aa, Desulfotalea psychrophila LSv54; identical to SEQ ID NO: 30138

SEQ ID NO: 44750 - DNA, 1488 bp, Symbiobacterium thermophilum IAM 14863; identical to SEQ ID NO: 30139
  CDS (1)..(1488): transl_table=11

SEQ ID NO: 44751 - protein, 495 aa, Symbiobacterium thermophilum IAM 14863; identical to SEQ ID NO: 30140

SEQ ID NO: 44752 - DNA, 1512 bp, Mannheimia succiniciproducens MBEL55E; identical to SEQ ID NO: 30141
  CDS (1)..(1512): transl_table=11

SEQ ID NO: 44753 - protein, 503 aa, Mannheimia succiniciproducens MBEL55E; identical to SEQ ID NO: 30142

SEQ ID NO: 44754 - DNA, 1500 bp, Bacillus licheniformis ATCC 14580; identical to SEQ ID NO: 30143
  CDS (1)..(1500): transl_table=11

SEQ ID NO: 44755 - protein, 499 aa, Bacillus licheniformis ATCC 14580; identical to SEQ ID NO: 30144

SEQ ID NO: 44756 - DNA, 1491 bp, Legionella pneumophila subsp. pneumophila str. Philadelphia 1; identical to SEQ ID NO: 30145
  CDS (1)..(1491): transl_table=11

SEQ ID NO: 44757 - protein, 496 aa, Legionella pneumophila subsp. pneumophila str. Philadelphia 1; identical to SEQ ID NO: 30146

SEQ ID NO: 44758 - DNA, 1527 bp, Burkholderia pseudomallei K96243; identical to SEQ ID NO: 30147
  CDS (1)..(1527): transl_table=11

SEQ ID NO: 44759 - protein, 508 aa, Burkholderia pseudomallei K96243; identical to SEQ ID NO: 30148

SEQ ID NO: 44760 - DNA, 1491 bp, Methylococcus capsulatus str. Bath; identical to SEQ ID NO: 30149
  CDS (1)..(1491): transl_table=11

SEQ ID NO: 44761 - protein, 496 aa, Methylococcus capsulatus str. Bath; identical to SEQ ID NO: 30150

SEQ ID NO: 44762 - DNA, 1509 bp, Azoarcus sp. EbN1; identical to SEQ ID NO: 30151
  CDS (1)..(1509): transl_table=11

SEQ ID NO: 44763 - protein, 502 aa, Azoarcus sp. EbN1; identical to SEQ ID NO: 30152

SEQ ID NO: 44764 - DNA, 1506 bp, Campylobacter jejuni RM1221
  CDS (1)..(1506): transl_table=11
atgtttgataatattttagagcagcaaagaatagaaaaagctaaagagttaaaaaatttagggattaatccttatcctcattttttagaaaaggaaatgtctttaaagacttttaaggatagattttcttatattttagagcaagttgaaaaaagagatgaaagtgtcaatgctgttgttgcaggacgtttgaaacttttgcgtatagctgggaaatcaatttttgcaaacattgaagatgaggatacaaatttacaaatttattttagtaaagatagcgtaggcgaagagctttatacgattttaaaaaagaatttagaggtgggtgatattgttttggttaaaggttttccttttgtaactaaaacaggtgagtttagtttgcatgcaagtgaagtaaaactcgctacaaaagctattgttcctttacctgaaaaatatcatggattaacagatattgaacaaagatatcgtaaacgttatgttgatatgataatgaatgcagaagttagaaaagattttttagtgcgttctaaagtggtgagtttgattcgtcatttttttgaaaataaaggctttttagaagtagaaactcctatgatgcatccgattgcaggtggagcaaacgctaagccttttgtaacttttcacaattctttaggcgtagaaagatttttaagaattgctccagaactttatcttaaaagacttgtagtgggtggttttgaggcagtttttgaaatcaatcgttgttttagaaacgaaggtatggatttaactcataatcccgaatttacaactatagaattttattgggcttatcataattataaagatttaatggatttaactgaagaactttttgctttgcttttagataaacttaatttgggaaaaacaatagaatttgatggaaaaatgatagatttttctaaaccttttgaaagaataacctataaagatgcactttgtaagtatggtggtttagatagggatttaatcgaagataaggaaaaaattcttactaaattaaaagcagatggttttgaagcgaatgaaaagcttgaacttggacatttgcaagctgaactttttgacaattatgtggaagaaaaattgatcaatcctacttttgtgattgattttcctatttccataagtcctttatcaagacgtagcgatgaggattctcagattgctgagagatttgagttgtttatttgtggaagagaattggcaaatggttttaatgagcttaatgatcctcttgatcaatatgagagatttttaaaacaaattgaagctaaaaatgcaggcgatgaagaggcttgcgaaatggatgaagattttgtaaatgctttgggttatggaatgcctccaacggcagggcagggtataggcatagatagacttgttatgcttttgacaaataaaaaatctattcgagatgtgatattgtttcctgcaatgcgtccattaaaatcagaactaaaggagaaagaatga

SEQ ID NO: 44765 - protein, 501 aa, Campylobacter jejuni RM1221
MFDNILEQQRIEKAKELKNLGINPYPHFLEKEMSLKTFKDRFSYILEQVEKRDESVNAVVAGRLKLLRIAGKSIFANIEDEDTNLQIYFSKDSVGEELYTILKKNLEVGDIVLVKGFPFVTKTGEFSLHASEVKLATKAIVPLPEKYHGLTDIEQRYRKRYVDMIMNAEVRKDFLVRSKVVSLIRHFFENKGFLEVETPMMHPIAGGANAKPFVTFHNSLGVERFLRIAPELYLKRLVVGGFEAVFEINRCFRNEGMDLTHNPEFTTIEFYWAYHNYKDLMDLTEELFALLLDKLNLGKTIEFDGKMIDFSKPFERITYKDALCKYGGLDRDLIEDKEKILTKLKADGFEANEKLELGHLQAELFDNYVEEKLINPTFVIDFPISISPLSRRSDEDSQIAERFELFICGRELANGFNELNDPLDQYERFLKQIEAKNAGDEEACEMDEDFVNALGYGMPPTAGQGIGIDRLVMLLTNKKSIRDVILFPAMRPLKSELKEKE

SEQ ID NO: 44766 - DNA, 1497 bp, Dehalococcoides ethenogenes 195; identical to SEQ ID NO: 30155
  CDS (1)..(1497): transl_table=11

SEQ ID NO: 44767 - protein, 498 aa, Dehalococcoides ethenogenes 195; identical to SEQ ID NO: 30156

SEQ ID NO: 44768 - DNA, 1512 bp, Neisseria gonorrhoeae FA 1090; identical to SEQ ID NO: 30157
  CDS (1)..(1512): transl_table=11

SEQ ID NO: 44769 - protein, 503 aa, Neisseria gonorrhoeae FA 1090; identical to SEQ ID NO: 30158

SEQ ID NO: 44770 - DNA, 1728 bp, Bacteroides fragilis NCTC 9343; identical to SEQ ID NO: 30159
  CDS (1)..(1728): transl_table=11

SEQ ID NO: 44771 - protein, 575 aa, Bacteroides fragilis NCTC 9343; identical to SEQ ID NO: 30160

SEQ ID NO: 44772 - DNA, 1503 bp, Pseudomonas syringae pv. syringae B728a
  CDS (1)..(1503): transl_table=11
atgagcgaccaacaactcgacccgcaagccctgcaacaggaagaaaacaccctgatcgccttgcgcaaggaaaagcttgctgcaggccgtgccaagggtcaggccttccccaatgacttccgccgcgacagctactgcaatgacctgcagaaacagtacgtcgacaagaccaaggaagaactggcagaggcagcgattccggtcaaggttgccggtcgcatcatgctcaaccgtggctcgttcatggtgatccaggacatgaccgggcgcatccaggtctatgtcaaccgcaagaccctgcccgaagaaaccctggccgaggtgaaaacctgggatctgggcgacatcatcgccgccgaaggtaccctggcacgctccggcaagggcgacctgtacgtcgagatgaccagcgttcgcctgctgaccaagtccttgcgtccgctgcccgacaagcaccacggcctgaccgacaccgaacagcgctaccgtcagcgttacgtcgacctgatcgtcaacgaggaagtgcgtgagaccttccgcgtgcgttcgcaggtcatcgctcacatccgcagcttcctgatgaagcgcgacttcctcgaagtcgaaacgccgatgctgcagaccattccgggcggcgcggcggccaagccgttcgaaacccaccacaacgcgctggacatggaaatgttcctgcgtatcgccccggagctgtacctcaagcgtctggtggtcggtggtttcgagaaggtcttcgagatcaatcgcaacttccgtaacgaaggtgtttcgacccggcacaaccccgagttcaccatgctcgagttctaccaggcctacgccgattacgaagacaacatggacctcaccgaggaactgttccgcgaactggcgcaactggttctgggcagcaccgatgtgccttatggcgacaaggtgttccacttcggcgaaccgttcgtgcgcctgtcggtgttcgactcgatcctcaagtacaaccctgagctgaccgttgccgacctgcaggacatcgacaaggcgcgcgccattgcgaaaaaggccggtgccaaggtgctgggcttcgaaggcctgggcaaattgcaggtgatgattttcgaagagctggtcgagcacaagctggaacagccgcacttcatcacccagtacccgtttgaagtgtcgccgctggcgcgtcgcaacgacgaaaacccgaacgtcaccgaccgtttcgagctgttcatcggtggtcgcgaaatcgccaatgcctactccgagctcaacgacgccgaagatcaggccgaacgcttccaggctcaggtggccgacaaggatgccggtgacgacgaagccatgcactacgacgccgacttcgttcgtgcgctggagtacggcatgccgccgacggcaggcgaggggatcggtatcgatcggttggtgatgttgctcaccgactcgccgtcgattcgcgacgtgatcctcttcccgcacatgcgcccgcaagcgtaa

SEQ ID NO: 44773 - protein, 500 aa, Pseudomonas syringae pv. syringae B728a
MSDQQLDPQALQQEENTLIALRKEKLAAGRAKGQAFPNDFRRDSYCNDLQKQYVDKTKEELAEAAIPVKVAGRIMLNRGSFMVIQDMTGRIQVYVNRKTLPEETLAEVKTWDLGDIIAAEGTLARSGKGDLYVEMTSVRLLTKSLRPLPDKHHGLTDTEQRYRQRYVDLIVNEEVRETFRVRSQVIAHIRSFLMKRDFLEVETPMLQTIPGGAAAKPFETHHNALDMEMFLRIAPELYLKRLVVGGFEKVFEINRNFRNEGVSTRHNPEFTMLEFYQAYADYEDNMDLTEELFRELAQLVLGSTDVPYGDKVFHFGEPFVRLSVFDSILKYNPELTVADLQDIDKARAIAKKAGAKVLGFEGLGKLQVMIFEELVEHKLEQPHFITQYPFEVSPLARRNDENPNVTDRFELFIGGREIANAYSELNDAEDQAERFQAQVADKDAGDDEAMHYDADFVRALEYGMPPTAGEGIGIDRLVMLLTDSPSIRDVILFPHMRPQA

SEQ ID NO: 44774 - DNA, 1509 bp, Haemophilus influenzae 86-028NP
  CDS (1)..(1509): transl_table=11
atgtcagaacaagaagttaaagaattagatctcaatggcgaaatgctcgtccgtcgtgaaaaattagccgcattgcgtgcaaaaggtaatgcctttccgaataaattccgtcgtgatgcgctcgcacaagatttgcacaatcaatatgattcagaagacggggaaatcttaaaagagaaaagcattgaagtacaagttgctggtcgtattatgactcgccgtgcaatgggtaaagcaacgtttatcactattcaagatatgagcagtaaaatccagctttatgttgcacgcgataatttgcctgaaggtgtttataaagatgacgttggtacttgggatttaggcgacatcgttggcgttaaaggcactttatttaaaacaaaaaccgatgaacttaccgttaaaaccactgaggttcaacttttaactaaagcacttcgcccattaccagataaattccacggtttaaccgaccaagaagttcgttatcgccaacgttatttagatttaatttctaacgaagaatctcgccgcacttttattattcgttctaaagttgtcgcggggattcgtgaatatttcatttctaaaggctttatggaagtggaaacgccaatgttacaagtcattccaggcggtgcatctgcgcgtcctttcgtaactcatcacaatgcattagatgtggatatgtatttacgtatcgcacctgaactttatttaaaacgcttagtcgttggtgggtttgaacgagtatttgaattaaaccgtaacttccgtaatgaaggggtttctgttcgtcataatccagaatttactatgcttgaatattatcaagcctatgcggattaccatgatttaatggataacaccgaagaactgcttcgtaaattagcgattgatattcttggtactactattgtgaaatacggcgaatacgaatttgattttggtaaaccattcgaacgtattacgttacacgatgcaacggttaaatatggtgcagacaaaggtatcgtaaaagaagatttatatgactttgatcgtgcaaaagccacggcagaacgcttaggtattgaagtacaaaaatcttggggtttaggcagcattgtcaatgcaatttttgaagaagtggctgaacatcacttaattcaaccaacattcttaatggctcatcctgcggaaatttctccacttgcacgtcgtaatgatgaaaatccagatgtaacagatcgttttgagctctttatcggtggtcgtgaaatcggtaatggtttctcagaattaaatgacgcagaagatcaaaatgaacgttttgatgcacaagtggctgcaaaagaagctggcgatgatgaagcgatgtttaaagatgaagactttgttgttgcattagagcacggcttaccaccaacagctggggaaggtttaggtatcgaccgcctagcaatgctttatgcaaatgcaccatcaattcgtgatgtgatcttattccctgcaatgcgtcagaaataa

SEQ ID NO: 44775 - protein, 502 aa, Haemophilus influenzae 86-028NP
MSEQEVKELDLNGEMLVRREKLAALRAKGNAFPNKFRRDALAQDLHNQYDSEDGEILKEKSIEVQVAGRIMTRRAMGKATFITIQDMSSKIQLYVARDNLPEGVYKDDVGTWDLGDIVGVKGTLFKTKTDELTVKTTEVQLLTKALRPLPDKFHGLTDQEVRYRQRYLDLISNEESRRTFIIRSKVVAGIREYFISKGFMEVETPMLQVIPGGASARPFVTHHNALDVDMYLRIAPELYLKRLVVGGFERVFELNRNFRNEGVSVRHNPEFTMLEYYQAYADYHDLMDNTEELLRKLAIDILGTTIVKYGEYEFDFGKPFERITLHDATVKYGADKGIVKEDLYDFDRAKATAERLGIEVQKSWGLGSIVNAIFEEVAEHHLIQPTFLMAHPAEISPLARRNDENPDVTDRFELFIGGREIGNGFSELNDAEDQNERFDAQVAAKEAGDDEAMFKDEDFVVALEHGLPPTAGEGLGIDRLAMLYANAPSIRDVILFPAMRQK

SEQ ID NO: 44776 - DNA, 1503 bp, Pseudomonas fluorescens Pf-5; identical to SEQ ID NO: 30163
  CDS (1)..(1503): transl_table=11

SEQ ID NO: 44777 - protein, 500 aa, Pseudomonas fluorescens Pf-5; identical to SEQ ID NO: 30164

SEQ ID NO: 44778 - DNA, 1545 bp, Psychrobacter arcticus 273-4; identical to SEQ ID NO: 30165
  CDS (1)..(1545): transl_table=11

SEQ ID NO: 44779 - protein, 514 aa, Psychrobacter arcticus 273-4; identical to SEQ ID NO: 30166

SEQ ID NO: 44780 - DNA, 1575 bp, Colwellia psychrerythraea 34H; identical to SEQ ID NO: 30167
  CDS (1)..(1575): transl_table=11

SEQ ID NO: 44781 - protein, 524 aa, Colwellia psychrerythraea 34H; identical to SEQ ID NO: 30168

SEQ ID NO: 44782 - DNA, 1503 bp, Pseudomonas syringae pv. phaseolicola 1448A; identical to SEQ ID NO: 30169
  CDS (1)..(1503): transl_table=11

SEQ ID NO: 44783 - protein, 500 aa, Pseudomonas syringae pv. phaseolicola 1448A; identical to SEQ ID NO: 30170

SEQ ID NO: 44784 - DNA, 1506 bp, Dechloromonas aromatica RCB; identical to SEQ ID NO: 30171
  CDS (1)..(1506): transl_table=11

SEQ ID NO: 44785 - protein, 501 aa, Dechloromonas aromatica RCB; identical to SEQ ID NO: 30172

SEQ ID NO: 44786 - DNA, 1491 bp, Thermobifida fusca YX; identical to SEQ ID NO: 30173
  CDS (1)..(1491): transl_table=11

SEQ ID NO: 44787 - protein, 496 aa, Thermobifida fusca YX; identical to SEQ ID NO: 30174

SEQ ID NO: 44788 - DNA, 1551 bp, Ralstonia eutropha JMP134; identical to SEQ ID NO: 30175
  CDS (1)..(1551): transl_table=11

SEQ ID NO: 44789 - protein, 516 aa, Ralstonia eutropha JMP134; identical to SEQ ID NO: 30176

SEQ ID NO: 44790 - DNA, 1548 bp, Methanosarcina barkeri str. Fusaro; identical to SEQ ID NO: 30177
  CDS (1)..(1548): transl_table=11

SEQ ID NO: 44791 - protein, 515 aa, Methanosarcina barkeri str. Fusaro; identical to SEQ ID NO: 30178

SEQ ID NO: 44792 - DNA, 1506 bp, Thiobacillus denitrificans ATCC 25259; identical to SEQ ID NO: 30179
  CDS (1)..(1506): transl_table=11

SEQ ID NO: 44793 - protein, 501 aa, Thiobacillus denitrificans ATCC 25259; identical to SEQ ID NO: 30180

SEQ ID NO: 44794 - DNA, 1686 bp, Anabaena variabilis ATCC 29413; identical to SEQ ID NO: 30181
  CDS (1)..(1686): transl_table=11

SEQ ID NO: 44795 - protein, 561 aa, Anabaena variabilis ATCC 29413; identical to SEQ ID NO: 30182

SEQ ID NO: 44796 - DNA, 1467 bp, Carboxydothermus hydrogenoformans Z-2901; identical to SEQ ID NO: 30185
  CDS (1)..(1467): transl_table=11

SEQ ID NO: 44797 - protein, 488 aa, Carboxydothermus hydrogenoformans Z-2901; identical to SEQ ID NO: 30186

SEQ ID NO: 44798 - DNA, 1575 bp, Burkholderia sp. 383; identical to SEQ ID NO: 30187
  CDS (1)..(1575): transl_table=11

SEQ ID NO: 44799 - protein, 524 aa, Burkholderia sp. 383; identical to SEQ ID NO: 30188

SEQ ID NO: 44800 - DNA, 1476 bp, Geobacter metallireducens GS-15; identical to SEQ ID NO: 30189
  CDS (1)..(1476): transl_table=11

SEQ ID NO: 44801 - protein, 491 aa, Geobacter metallireducens GS-15; identical to SEQ ID NO: 30190

SEQ ID NO: 44802 - DNA, 1470 bp, Moorella thermoacetica ATCC 39073; identical to SEQ ID NO: 30193
  CDS (1)..(1470): transl_table=11

SEQ ID NO: 44803 - protein, 489 aa, Moorella thermoacetica ATCC 39073; identical to SEQ ID NO: 30194

SEQ ID NO: 44804 - DNA, 1629 bp, Syntrophus aciditrophicus SB; identical to SEQ ID NO: 30197
  CDS (1)..(1629): transl_table=11

SEQ ID NO: 44805 - protein, 542 aa, Syntrophus aciditrophicus SB; identical to SEQ ID NO: 30198

SEQ ID NO: 44806 - DNA, 1683 bp, Francisella tularensis subsp. holarctica; identical to SEQ ID NO: 30199
  CDS (1)..(1683): transl_table=11

SEQ ID NO: 44807 - protein, 560 aa, Francisella tularensis subsp. holarctica; identical to SEQ ID NO: 30200

SEQ ID NO: 44808 - DNA, 1467 bp, Desulfitobacterium hafniense Y51; identical to SEQ ID NO: 30201
  CDS (1)..(1467): transl_table=11

SEQ ID NO: 44809 - protein, 488 aa, Desulfitobacterium hafniense Y51; identical to SEQ ID NO: 30202

SEQ ID NO: 44810 - DNA, 1509 bp, Saccharophagus degradans 2-40; identical to SEQ ID NO: 30203
  CDS (1)..(1509): transl_table=11

SEQ ID NO: 44811 - protein, 502 aa, Saccharophagus degradans 2-40; identical to SEQ ID NO: 30204

SEQ ID NO: 44812 - DNA, 1530 bp, Methylobacillus flagellatus KT; identical to SEQ ID NO: 30205
  CDS (1)..(1530): transl_table=11

SEQ ID NO: 44813 - protein, 509 aa, Methylobacillus flagellatus KT; identical to SEQ ID NO: 30206

SEQ ID NO: 44814 - DNA, 1548 bp, Ralstonia metallidurans CH34; identical to SEQ ID NO: 30209
  CDS (1)..(1548): transl_table=11

SEQ ID NO: 44815 - protein, 515 aa, Ralstonia metallidurans CH34; identical to SEQ ID NO: 30210

SEQ ID NO: 44816 - DNA, 1527 bp, Acidobacteria bacterium Ellin345; identical to SEQ ID NO: 30211
  CDS (1)..(1527): transl_table=11

SEQ ID NO: 44817 - protein, 508 aa, Acidobacteria bacterium Ellin345; identical to SEQ ID NO: 30212

SEQ ID NO: 44818 - DNA, 1554 bp, Myxococcus xanthus DK 1622; identical to SEQ ID NO: 30213
  CDS (1)..(1554): transl_table=11

SEQ ID NO: 44819 - protein, 517 aa, Myxococcus xanthus DK 1622; identical to SEQ ID NO: 30214

SEQ ID NO: 44820 - DNA, 1728 bp, Cytophaga hutchinsonii ATCC 33406
  CDS (1)..(1728): transl_table=11
atgcaattgagtgaacaagaactggtacgccgccaggaacgtgaagagttattaaaaatgggtattgaaccataccctgcagaacttttccctgtaaatgtttcaacaaaagatattcatcagaattacgaaaagcgaaagacagattataaaaatatttctatcgctggccgtgtgatgagccgccgtattatgggtaatgcctctttcgttgagattcaggatgcaagcggtagaatccaggcatacttcagaagagatgatctttgtccggatgaagacaaaacacaatacaacaccgtatttaaaaagcttgtcggtatcggtgatattattggtatttacggatatgtgtttacaacacaaaccggagagatcacgattcatgttacttcatttaaaattttaacaaaagcacttcgtccgttgcccatgccaaaagaggcggtagatgagaacggagagaaaaaaatatttgatgcattcaccgatcctgaacagcgttaccgcatgcgttatgtggatctgattgtgaacccgcatgtgcgcgatgcttttatcaaacgtacacgtctggtaaataccatgcgtgagtacctgaataacaaaggatatttagaagtggaaacgccgatcttgcagcccttgtatggcggtgctgctgcgcgtccgttcaagacacaccacaatacattagatatgcctttgtatttgcgtatcgcaaatgagttatatctgaaacggttgatcgttggcggatttgatggagtatatgaattctctaaagatttccgtaacgaaggtatgtcccgtttccacaacccggaattcactcaggtagaattgtatgttgcatacaaggattactactggatgatggatctggttgaagagatggttgaaaaagttgctgttgccttacacggtactacagaggtacaggttggtccgcatacgatcagcttccagcgcccctggaaacgtttcactatgtttgaagcaatcgaacattatacaggtattaacattggtgaaatggatgaagcacaattacgtgcaacatgtaaatcattaaatgtggatgtagatgattcaatgggtaaaggtaaactcattgatgagatctttggcgcaaaatgcgaaccattattgatccagcctacattcattacagactatccggttgaaatgtcgccgttagcgaagaaacacagggacaagccaggtttggttgaacgttttgaagccatctgtaatggtaaagaaatctgcaattcattctctgaactgaatgacccgattgatcagcgtcagcgttttgaagaacagctggagcttggcaaaagaggtgacagcgagagtatggtactggatgaagattttcttcgtgcacttgaatacggaatgccgcctacagcaggccttggtattgggattgaccggttagcgatggttatgactaattcagcttcgatacaggatgtattattcttcccgcagatgcgtccggaagttggtacacagggagcatcttccaatggtttccagggcatagagatccgcggggaacttgttccgttgattgagaaattaggtatctctacggtagaacaattaaaagcagcaaacccgaataaattatttaatgatttgtgcggcttacgtaaaaaaatgaagcttgaaatcgcaaaccctacggctgatgaggtgaagggatggcaggcgtga

SEQ ID NO: 44821 - protein, 575 aa, Cytophaga hutchinsonii ATCC 33406
MQLSEQELVRRQEREELLKMGIEPYPAELFPVNVSTKDIHQNYEKRKTDYKNISIAGRVMSRRIMGNASFVEIQDASGRIQAYFRRDDLCPDEDKTQYNTVFKKLVGIGDIIGIYGYVFTTQTGEITIHVTSFKILTKALRPLPMPKEAVDENGEKKIFDAFTDPEQRYRMRYVDLIVNPHVRDAFIKRTRLVNTMREYLNNKGYLEVETPILQPLYGGAAARPFKTHHNTLDMPLYLRIANELYLKRLIVGGFDGVYEFSKDFRNEGMSRFHNPEFTQVELYVAYKDYYWMMDLVEEMVEKVAVALHGTTEVQVGPHTISFQRPWKRFTMFEAIEHYTGINIGEMDEAQLRATCKSLNVDVDDSMGKGKLIDEIFGAKCEPLLIQPTFITDYPVEMSPLAKKHRDKPGLVERFEAICNGKEICNSFSELNDPIDQRQRFEEQLELGKRGDSESMVLDEDFLRALEYGMPPTAGLGIGIDRLAMVMTNSASIQDVLFFPQMRPEVGTQGASSNGFQGIEIRGELVPLIEKLGISTVEQLKAANPNKLFNDLCGLRKKMKLEIANPTADEVKGWQA

SEQ ID NO: 44822 - DNA, 1506 bp, Clostridium perfringens ATCC 13124; identical to SEQ ID NO: 30215
  CDS (1)..(1506): transl_table=11

SEQ ID NO: 44823 - protein, 501 aa, Clostridium perfringens ATCC 13124; identical to SEQ ID NO: 30216

SEQ ID NO: 44824 - DNA, 1512 bp, Rhodococcus sp. RHA1; identical to SEQ ID NO: 30217
  CDS (1)..(1512): transl_table=11

SEQ ID NO: 44825 - protein, 503 aa, Rhodococcus sp. RHA1; identical to SEQ ID NO: 30218

SEQ ID NO: 44826 - DNA, 1509 bp, Haemophilus somnus 129PT; identical to SEQ ID NO: 30219
  CDS (1)..(1509): transl_table=11

SEQ ID NO: 44827 - protein, 502 aa, Haemophilus somnus 129PT; identical to SEQ ID NO: 30220

SEQ ID NO: 44828 - DNA, 1569 bp, Trichodesmium erythraeum IMS101; identical to SEQ ID NO: 30221
  CDS (1)..(1569): transl_table=11

SEQ ID NO: 44829 - protein, 522 aa, Trichodesmium erythraeum IMS101; identical to SEQ ID NO: 30222

SEQ ID NO: 44830 - DNA, 1500 bp, Alkalilimnicola ehrlichei MLHE-1; identical to SEQ ID NO: 30227
  CDS (1)..(1500): transl_table=11

SEQ ID NO: 44831 - protein, 499 aa, Alkalilimnicola ehrlichei MLHE-1; identical to SEQ ID NO: 30228

SEQ ID NO: 44832 - DNA, 1497 bp, Rhizobium leguminosarum bv. viciae 3841; identical to SEQ ID NO: 30229
  CDS (1)..(1497): transl_table=11

SEQ ID NO: 44833 - protein, 498 aa, Rhizobium leguminosarum bv. viciae 3841; identical to SEQ ID NO: 30230

SEQ ID NO: 44834 - DNA, 1506 bp, Pseudomonas aeruginosa UCBPP-PA14; identical to SEQ ID NO: 30231
  CDS (1)..(1506): transl_table=11

SEQ ID NO: 44835 - protein, 501 aa, Pseudomonas aeruginosa UCBPP-PA14; identical to SEQ ID NO: 30232

SEQ ID NO: 44836 - DNA, 1497 bp, Pediococcus pentosaceus ATCC 25745; identical to SEQ ID NO: 30233
  CDS (1)..(1497): transl_table=11

SEQ ID NO: 44837 - protein, 498 aa, Pediococcus pentosaceus ATCC 25745; identical to SEQ ID NO: 30234

SEQ ID NO: 44838 - DNA, 1491 bp, Oenococcus oeni PSU-1; identical to SEQ ID NO: 30235
  CDS (1)..(1491): transl_table=11

SEQ ID NO: 44839 - protein, 496 aa, Oenococcus oeni PSU-1; identical to SEQ ID NO: 30236

SEQ ID NO: 44840 - DNA, 1488 bp, Leuconostoc mesenteroides subsp. mesenteroides ATCC 8293
  CDS (1)..(1488): transl_table=11
atggctgaagaaaaagcccttaatgatcaaatgctagcgcgtcgacaaaagttggcaacaatcgttagtgatttacacttagacccattcggtaagcgatttgaacgtacagcaaaagcgcaagaactgcataatctatatgatgccagctctttagaagagttagagaatgcaaaacatgaagttgttattgcaggtcgtatggttgcaaagcgtggcgcaggtaaagttattttcgctgattttcgtgatgtttctggaaaaattcaggtttatgcaagacgtgatgatttagcagataattatccgattattaaaagagcagatttgggtgacttccttggaatcaagggaattatgatgaagactgaagctggtgaattaacagttttggctacagaattaacacatttatctaaggctcttcgtccaatgcctgataagttccatggtatttctgatgttgaaacacggtatcgtaagcgttacttggatttgattgccaatgaagattctttcaaaaagttccaagaacgctcacatatcatttctgctattcgtgcatatatggatagaaatgatttccttgaggttgaaacgccaattttgcaaactgaagccggtggggctgcagcccgtccatttatcacacatcataatgctttgaatattgatatgtacatgcgtatcgcaacagaattgtacttaaagcgtttggttgtgggtggcatggaacgtgtatatgaaattggccgtattttccgtaatgagggtatggatccaaagcacaatcctgagtttacaacaatggagtcatatgcagcttatatggactttacagatgttatggacgaaactgaaggtattttcaaagctgccgcttctgtcgtctcagatgacttgaaaattacttatcagggaactgaaattgatcttggcacaaagtttgcgcgcaaacatctagtcgacttgattaaagaacaaactggtattgatttttggcaggaaatgtccgttgaagaagcacaaaagttggccgatgataaccatgtaaagtacgaaaaatactggggtgtgggtcatattatcaatgcattcttcgaagaatttgtagaggatactttggtacagccaacatttgtttatggacatccagttgaagtgtcaccactcgctaagaaaaatactgatgatcctcgttttactgatcgttttgaattgtttattatgggtagcgagtatgcgaatgcctttactgagttaaacgatcctattgaccaacgtgcacgttttgaggctcaagcggctgaacgtgagaatggtaatgacgaagctgaaggtattgatgaagacttcatagaagctttggaatatggtatgccacctacaggtggacttggtgttggtattgatcgtttggtcatgttattgactgattctgacacaattcgtgacgttgtgttgttcccaacaatgcgtccagaataa

SEQ ID NO: 44841 - protein, 495 aa, Leuconostoc mesenteroides subsp. mesenteroides ATCC 8293
MAEEKALNDQMLARRQKLATIVSDLHLDPFGKRFERTAKAQELHNLYDASSLEELENAKHEVVIAGRMVAKRGAGKVIFADFRDVSGKIQVYARRDDLADNYPIIKRADLGDFLGIKGIMMKTEAGELTVLATELTHLSKALRPMPDKFHGISDVETRYRKRYLDLIANEDSFKKFQERSHIISAIRAYMDRNDFLEVETPILQTEAGGAAARPFITHHNALNIDMYMRIATELYLKRLVVGGMERVYEIGRIFRNEGMDPKHNPEFTTMESYAAYMDFTDVMDETEGIFKAAASVVSDDLKITYQGTEIDLGTKFARKHLVDLIKEQTGIDFWQEMSVEEAQKLADDNHVKYEKYWGVGHIINAFFEEFVEDTLVQPTFVYGHPVEVSPLAKKNTDDPRFTDRFELFIMGSEYANAFTELNDPIDQRARFEAQAAERENGNDEAEGIDEDFIEALEYGMPPTGGLGVGIDRLVMLLTDSDTIRDVVLFPTMRPE

SEQ ID NO: 44842 - DNA, 1506 bp, Solibacter usitatus Ellin6076; identical to SEQ ID NO: 30237
  CDS (1)..(1506): transl_table=11

SEQ ID NO: 44843 - protein, 501 aa, Solibacter usitatus Ellin6076; identical to SEQ ID NO: 30238

SEQ ID NO: 44844 - DNA, 1503 bp, Shewanella sp. ANA-3
  CDS (1)..(1503): transl_table=11
atgactgaacaagtacaagatgaaaacaaactgattgccgagcgtcgtgccaagctagaaagcattcgcccgaactgcagcgctaatgctcaccctaatactttccgtcgcacccacaaagcggctgagttgcaggaaaaatacggtcaaaacactaaggaagaactcgaagccttaggttttaaaaccagcatcgctggccgtatcatggcaaaacgtggcccattcctggtgatccaagacgtgtctggtcgtatccaagcttacgctgaaaagggcgttcaagcggatctgaaagaccgttaccaaggtctggatatcggtgacatcatcggcgtaactggtcagttgcacttgtctggtaaaggcgatctgtacgtgaacatggaagagtaccaactgctgactaaagcactgcgtcctctgccagaaaaattccacggcttaaccgaccaagaaacccgttaccgccaacgttatgtggacttaatcgttaacgaagaatctcgtcaagccttcgtcatgcgttcaaaagtggttgcagctatccgtaacttcatgatcaaaaaagagttcatggaagttgaaaccccaatgatgcacgtgatcccaggcggcgcttcagcccgtccatttatcactcaccacaatgcgctggacatgccaatgtacctgcgtatcgcgccagagttatacctcaagcgtttagtggtaggtggttttgagcgtgtgttcgaaatcaaccgtaacttccgtaacgaaggtctgtcgccacgccataacccagaattcactatgatggaattctatatggcctatgctgactacaaagatctgatggacttaaccgaagaactgttaagctctatcgcgattgaactgttaggcagcgcgcaaatgccatacggcgagcacactgttgatttcggtggcccatacgcgcgtctaagcatgttagaagcgattcagaagtacaatcctgacaacgcgactatccaagcaatgacctacgagcaagtgaaagatcttgaattcatgcgtgaactggctatcagcctaggcatcaagatcgagaagttctggacctgtggtcagctattagaagaaatcttcggtgaaactgctgaatggcagttaatgcaaccgactttcatcactggctacccagcggacatttcgccactggcacgtcgtaacgatgacaatcacttcatcaccgaccgcttcgaattcttcatcggtggccgtgaagtggctaacggtttcagcgagttaaacgatgctgaagaccaagacagccgctttaaagcgcaggttgacgcgaaagacgcgggtgacgacgaagccatgttctacgatgcagactacatcactgcactggaacacggtttaccaccaacagcgggtcaaggtatcggtatcgaccgtttagtgatgctattcactaacactcacactatccgtgacgtgatcctgttcccagcgatgcgcccacaggcctaa

SEQ ID NO: 44845 - protein, 500 aa, Shewanella sp. ANA-3; identical to SEQ ID NO: 30226

SEQ ID NO: 44846 - DNA, 1551 bp, Nocardioides sp. JS614; identical to SEQ ID NO: 30243
  CDS (1)..(1551): transl_table=11

SEQ ID NO: 44847 - protein, 516 aa, Nocardioides sp. JS614; identical to SEQ ID NO: 30244

SEQ ID NO: 44848 - DNA, 1503 bp, Azoarcus sp. BH72; identical to SEQ ID NO: 30245
  CDS (1)..(1503): transl_table=11

SEQ ID NO: 44849 - protein, 500 aa, Azoarcus sp. BH72; identical to SEQ ID NO: 30246

SEQ ID NO: 44850 - DNA, 1512 bp, Neisseria meningitidis FAM18
  CDS (1)..(1512): transl_table=11
atgagcgaacaaaaccatccgcaaaccgagccgcagttggacgaaaaccaaatcatcgccctgcgccgcgaaaaactgcacaacatccgccaacagcgcaacgcctatcccaacgacttcaaacgcgacagcttcgccgccgatttgcacgcccaatacggcgaaatcggcaaagaagaactcgatccgcaaggcattcccgtcaaagtggccggccgcatgatgctgaagcgtcaaatgggcaaggcgagctttgccaccattcaagacgtgtccgggcaaatccagctttatctgaacaacaaaggcgtgagccaagaagttttggacgacttcaaccattgggatttgggcgacatcgtcggcgcggaaggcactttgttcaaaaccaaccacggcgaactgaccgtacgcgtgtccgacatccgcctgttgtccaaatccttgcgtccgctgccggacaaacacaaaggcttgagcgatcaggaaaccaaataccgccaacgctatgtcgatttgattgccaacgaagaatcgcgcaatacctttatcaaacgcagccaaatcatccaatccgtgcgtaattttatggtgggcgagcattatctcgaagtcgaaaccccgatgatgcacccgattcccggcggcgcgacggcaaaacccttcgttactcatcacaatgccttagatattccgctttacctgcgtatcgcgcctgagctgtatttgaaacgcctggttgtcggcggcttggaacgcgtgtttgaaatcaaccgcagcttccgcaacgaaggcatgtccgtgcgccacaaccccgaatttacgatgattgaattttacgaagccttctccgactacgaacgtatgatgcagatggcggaagacatcatccgcaacgcatcgcgcacagtaaacggtacggcaaacatcacttacaatggcaaagaagtcgatttggaaagcccgttcgagcgtctgaccatcctcgaagccatcaaaaaatacaatccgcactacaccgacgagcagttgaacgatgcggaatggctgaaaaaagaaatcgtcaaacacggtgaaagcctgccgccgtccccgggcatcggcagcctgcaactcgcgctgtttgaaggttgcgccgagggcaagctgtggaacccgactttcatcatcgattacccggtcgaagtttccccgttggcgcgcgcttcggataccaaacaaggtctgaccgaacgtttcgaattgttcgttgtcggccgcgaactggcaaacggctattccgagttgaacgaccccgaagaccaagccgaacgcttcaaagcgcaagtggcgcaaaaagacgcgggcgacgacgaagcgatgcactacgatgccgactacatccgcgcgatggagttcggtctgccgccgactggcggttgcggtatcggcatcgaccgcttggtaatgttgctgaccgattcgcaaaccatccgtgacgtgattctgttcccgcagatgcgccccgagtaa

SEQ ID NO: 44851 - protein, 503 aa, Neisseria meningitidis FAM18
MSEQNHPQTEPQLDENQIIALRREKLHNIRQQRNAYPNDFKRDSFAADLHAQYGEIGKEELDPQGIPVKVAGRMMLKRQMGKASFATIQDVSGQIQLYLNNKGVSQEVLDDFNHWDLGDIVGAEGTLFKTNHGELTVRVSDIRLLSKSLRPLPDKHKGLSDQETKYRQRYVDLIANEESRNTFIKRSQIIQSVRNFMVGEHYLEVETPMMHPIPGGATAKPFVTHHNALDIPLYLRIAPELYLKRLVVGGLERVFEINRSFRNEGMSVRHNPEFTMIEFYEAFSDYERMMQMAEDIIRNASRTVNGTANITYNGKEVDLESPFERLTILEAIKKYNPHYTDEQLNDAEWLKKEIVKHGESLPPSPGIGSLQLALFEGCAEGKLWNPTFIIDYPVEVSPLARASDTKQGLTERFELFVVGRELANGYSELNDPEDQAERFKAQVAQKDAGDDEAMHYDADYIRAMEFGLPPTGGCGIGIDRLVMLLTDSQTIRDVILFPQMRPE

SEQ ID NO: 44852 - DNA, 1548 bp, Acidovorax sp. JS42; identical to SEQ ID NO: 30247
  CDS (1)..(1548): transl_table=11

SEQ ID NO: 44853 - protein, 515 aa, Acidovorax sp. JS42; identical to SEQ ID NO: 30248

SEQ ID NO: 44854 - DNA, 1686 bp, Nostoc punctiforme PCC 73102; identical to SEQ ID NO: 30249
  CDS (1)..(1686): transl_table=11

SEQ ID NO: 44855 - protein, 561 aa, Nostoc punctiforme PCC 73102; identical to SEQ ID NO: 30250

SEQ ID NO: 44856 - DNA, 1509 bp, Haemophilus somnus 2336; identical to SEQ ID NO: 30251
  CDS (1)..(1509): transl_table=11

SEQ ID NO: 44857 - protein, 502 aa, Haemophilus somnus 2336; identical to SEQ ID NO: 30252

SEQ ID NO: 44858 - DNA, 1509 bp, Haemophilus influenzae R2866; identical to SEQ ID NO: 30257
  CDS (1)..(1509): transl_table=11

SEQ ID NO: 44859 - protein, 502 aa, Haemophilus influenzae R2866; identical to SEQ ID NO: 30258

SEQ ID NO: 44860 - DNA, 1722 bp, Crocosphaera watsonii WH 8501
  CDS (1)..(1722): transl_table=11
atgtcttccaatcaaccgcaacgggaacccaattcatcctctaatttagacgaaattcgcgccacacgcctcgaaaaagtagaacagttgaaaaaaataggcttaattccctatgcttatcaatggaaatctagccatgatgctgctagtttacaagataaatatgccagtttaaaaaatggggaagaagtcgaggtagacgttgcgatcgcaggaagaattatcgcccgtcgtgtctttggaaaactcgcttttttcagtttacaagacgaaagcggaactatccaattatatctggataaaaaagaaattcaggcacacatgagcgaactcgaaagtgcctttaatcatctcaaaaaattaacggacacaggggacattatcggagtcaaagggagtattaaaagaacggagaaaggagaactttctgttaaagtcaaagagtacgaaatattaactaaatccttattacctttacccgataaatggcacggtttaaccgatacagaaaaacgctatcgtcaacggtatgtagacttaattgttaacccccaagttagacaaacatttcgtcgtcgggcgcagattaccgcatctattagacgttacttagataaccagggttttatagaaatagaaacccccgttttacagtcagaagcagggggggcagaagcccgtccttttatcacctatcataacaccttagagatggatttgtatctgagaattgccacagaattacatctcaaacggttaattgtggggggttttgagaaagtatttgaaatgggaagaattttccgtaacgaaggggtttctaccaaacataatcctgagtttacctccattgaactatatcaagcttatgccgattataacgatatgatggagctaaccgaagcgattattaccaccgcagcagaagaagttttaggcactttaaacataacttatcaaggggaacaaattgacttatcaaccccttggagaagggtgacaatgaacgatattgttaaagagaaaagtgggttggattttgaggcatttacagactttgaaacagcaaaaactgaggtaaaaaaagcaggtttagaagtccctgagacctgtcaaagtttaggaaagttattaaacgaagtgtttgagcagactgtagaagaaagcctcattcaacccacatttatccttgattttcccgtagaaatttctcctttagctaaaccacaccgtgataaacaaggattagttgaacgctttgaattgtacattgtcggacgagaattagccaatagtttttcagaattaactgaccccattgatcaaagggaaagactagaaaaacaagcagaacaaaaagcagccggagacttggaggcacatagtgttgacgaagatttcttaacagcattagaatatggaatgcctcctactggtggtttaggaattggtattgatcgcctaattatgttattaactgattctgcgagtattcgggatgttattgctttccccttgctaaaaaatcagagtgttgccatcaaatcttttgactatgatgaagaaaaagaaactctcagggttgagtttactaatggtagtgtgtatcaatatcatgatgttcctaaaactatttatgaggagttagaaaaatcaccatctaaaggacagtatttcaatggcgaaattaaagataaatttggatttgatcgagaaaattaa

SEQ ID NO: 44861 - protein, 573 aa, Crocosphaera watsonii WH 8501
MSSNQPQREPNSSSNLDEIRATRLEKVEQLKKIGLIPYAYQWKSSHDAASLQDKYASLKNGEEVEVDVAIAGRIIARRVFGKLAFFSLQDESGTIQLYLDKKEIQAHMSELESAFNHLKKLTDTGDIIGVKGSIKRTEKGELSVKVKEYEILTKSLLPLPDKWHGLTDTEKRYRQRYVDLIVNPQVRQTFRRRAQITASIRRYLDNQGFIEIETPVLQSEAGGAEARPFITYHNTLEMDLYLRIATELHLKRLIVGGFEKVFEMGRIFRNEGVSTKHNPEFTSIELYQAYADYNDMMELTEAIITTAAEEVLGTLNITYQGEQIDLSTPWRRVTMNDIVKEKSGLDFEAFTDFETAKTEVKKAGLEVPETCQSLGKLLNEVFEQTVEESLIQPTFILDFPVEISPLAKPHRDKQGLVERFELYIVGRELANSFSELTDPIDQRERLEKQAEQKAAGDLEAHSVDEDFLTALEYGMPPTGGLGIGIDRLIMLLTDSASIRDVIAFPLLKNQSVAIKSFDYDEEKETLRVEFTNGSVYQYHDVPKTIYEELEKSPSKGQYFNGEIKDKFGFDREN

SEQ ID NO: 44862 - DNA, 1476 bp, Exiguobacterium sibiricum 255-15; identical to SEQ ID NO: 30259
  CDS (1)..(1476): transl_table=11

SEQ ID NO: 44863 - protein, 491 aa, Exiguobacterium sibiricum 255-15; identical to SEQ ID NO: 30260

SEQ ID NO: 44864 - DNA, 1521 bp, Xylella fastidiosa Dixon
  CDS (1)..(1521): transl_table=11
atgactgagcatctccctgcgtcgcaggtgtcctttgacgagaacgcgctgattgccgagcgccgtgcaaaacttttagcactacgtgcgcaaggcgtggtttatccgaatgatgtcaaacgcgagcattatgctgctgatgtgcaggcagcatttgccaacgtcgagacatggactgctgagaccctggaggcgtcaagccatcgtgtacgtatggctggccgattgatggctaagcgtctcatgggcaaggccagctttgctcagattcaggacgagtctggccgcatccagctgttaatacagagtaacgtgcttggtgaggacagctatgccgcattcaaggtgttggatgttggcgacatcattgctgttgaaggaggattgacccgcaccagaacgggcgagctgtcggtcaaggtgaatgtcttgcgacttttgacgaaggcgttacgtccattgcctgacaagtggcacgggctgactgatgtggagcagcgctaccgccagcgctatgttgatcttattgtgactccagaatcgcgtgagatcttcatcaaacgctccaagatcattcgtgcgctgcgtacttggctggatgcgcgtcttttcttggaagtagagacgccgatgatgcattacatcccaggaggtgctgcggctaagccgtttgtgacctaccacaatgccttggatttagagttatatctgcgcgtggccccagagttgtatctcaagcgtttggtcgtgggtgggctggaacgggtttacgagattaaccgcaacttccgtaacgagggggtgtcgacccggcacaaccccgaatttacgatgcttgagttatacgaggcctattccacctaccatgaggtcatggatctggctgagacgatgatccgtgatactgcacagtctgtgttgggcacgacccaggtgatttgggacggtgctcagattgatctgggtccgatattccggcgttggcgcatggatgaggcagtttgccatcataatcctgagatcagcgttgccgagtgtaccgatcgtgatgcattgctccttcactgtgagagactcaagatcaaggttaaatcgtcctacggttggggtcgattgctcttgagtatttttgaggcgactgtcgagcatacgttgatccagccgaccttcattacggatcatccggttgaaatctctcctttagcgcgcgaaagcgacatcgaatcagggtataccgatcgcttcgaactgttcatcaatgggaaggaaatcgccaacggtttctcggaattgaacgatccggaggagcaggcgatgcgcttccaaaagcaggttgaagccaaagaagggggggatgatgaggccatgtactacgatgccgactatattcgcgctttggagtatgggatggcgccaaccggagggttagggattggtgttgatcgactggtgatgctgctgaccggtagcacctcgatccgcgatgtgctgttattcccttatatgcgtccagaacgttaa

SEQ ID NO: 44865 - protein, 506 aa, Xylella fastidiosa Dixon
MTEHLPASQVSFDENALIAERRAKLLALRAQGVVYPNDVKREHYAADVQAAFANVETWTAETLEASSHRVRMAGRLMAKRLMGKASFAQIQDESGRIQLLIQSNVLGEDSYAAFKVLDVGDIIAVEGGLTRTRTGELSVKVNVLRLLTKALRPLPDKWHGLTDVEQRYRQRYVDLIVTPESREIFIKRSKIIRALRTWLDARLFLEVETPMMHYIPGGAAAKPFVTYHNALDLELYLRVAPELYLKRLVVGGLERVYEINRNFRNEGVSTRHNPEFTMLELYEAYSTYHEVMDLAETMIRDTAQSVLGTTQVIWDGAQIDLGPIFRRWRMDEAVCHHNPEISVAECTDRDALLLHCERLKIKVKSSYGWGRLLLSIFEATVEHTLIQPTFITDHPVEISPLARESDIESGYTDRFELFINGKEIANGFSELNDPEEQAMRFQKQVEAKEGGDDEAMYYDADYIRALEYGMAPTGGLGIGVDRLVMLLTGSTSIRDVLLFPYMRPER

SEQ ID NO: 44866 - DNA, 1491 bp, Streptococcus suis 89/1591; identical to SEQ ID NO: 30263
  CDS (1)..(1491): transl_table=11

SEQ ID NO: 44867 - protein, 496 aa, Streptococcus suis 89/1591; identical to SEQ ID NO: 30264

SEQ ID NO: 44868 - DNA, 1692 bp, Croceibacter atlanticus HTCC2559
  CDS (1)..(1692): transl_table=11
atgcaactctctgaacaagaaatcgtaagacgcgaaaaactaagccaactgcgcgagttgggcattaatccatatccagcagatttatatcctgtcaaacaaactactgcagatattaaaaacaactttgaagatggtaagaaagttgtaattgctgggcgtttattacagaaaaacattcagggaaaagcatcttttggtcaattgcaggatagcgcaggtcgaattcaagtttactttaacagagatgaaatttgtgaaggtgaagacaaaacactttataatacagtatttaaaaagcttttagatttaggagactttataggtattgaaggtgaattattcacaacacaagttggagaaaaaaccgtaatggttaagaatttctccatcctaagtaaatcactaagacctttaccattacctaaaaaagataaagatggtaatgtgtatgatgagtttaatgatccagagttacgttatcgccaacgttatgtagacttagtagttaacccaaaagtaaaagaagtctttgttaaacgtacaaagctttttaatgctatgcgtaatttctttaatgatgctggctattttgaagttgaaacacctatcctacaaccaattcctggcggagctgcagcaaagccatttatatctcaccacaatgccttagacatacctttatatatgcgtattgctaatgagctctatttaaagcgtcttattgttggtggttttgatggtgtgtatgagttttctaaaaactttagaaacgaaggtatggaccgtacccataatccagaatttacagcgatggaaatttatgtagcctataaagactacaattggatgatggagtttactgaaaatttacttgaacactgtgcagtagcagtaaacggaaaaacagaagctacttttggagaacacaccgttaactttaaagcaccttatgctagagtaactatgacagactccataaaacactttacaggtttcgatatttctggaaaaactgaaaaagagctttacgaagctgctaaaggtatgggtatcgatgtagatgaaactatgggtaaaggaaagcttatcgatgagatttttggagaaaaatgtgagggcaactatatacaacctacatttattacagattatcctaaagaaatgagtcctttatgtaaggaacatagagacaatccagaattaactgaacgttttgagttaatggtttgcggtaaagaaattgcaaatgcatattcagaacttaatgaccctatagatcaacgtgaacgttttgaggcacaattaaaacttgcagatcgtggagatgacgaggctatgtttatagatcaagatttcttacgtgctttagagtatggtatgccacctacttctggtttaggtattggtatggaccgtttaattatgttcttaacaaacaaccaaagtatacaagaggttctattctttcctcaaatgaaaccagaaaagacaatttctgttgaacttaatgaagatgaaaaactcatttttgaattacttaaaaaacaatctccagcagagcttgatagtataaaagcagattctggtttaagtaacaagaaatgggacaaagctgtaaaaggattacgtgctaaagatgtggctactgttaataaaacagataacggtttgttcgttgaacttttataa

SEQ ID NO: 44869 - protein, 563 aa, Croceibacter atlanticus HTCC2559
MQLSEQEIVRREKLSQLRELGINPYPADLYPVKQTTADIKNNFEDGKKVVIAGRLLQKNIQGKASFGQLQDSAGRIQVYFNRDEICEGEDKTLYNTVFKKLLDLGDFIGIEGELFTTQVGEKTVMVKNFSILSKSLRPLPLPKKDKDGNVYDEFNDPELRYRQRYVDLVVNPKVKEVFVKRTKLFNAMRNFFNDAGYFEVETPILQPIPGGAAAKPFISHHNALDIPLYMRIANELYLKRLIVGGFDGVYEFSKNFRNEGMDRTHNPEFTAMEIYVAYKDYNWMMEFTENLLEHCAVAVNGKTEATFGEHTVNFKAPYARVTMTDSIKHFTGFDISGKTEKELYEAAKGMGIDVDETMGKGKLIDEIFGEKCEGNYIQPTFITDYPKEMSPLCKEHRDNPELTERFELMVCGKEIANAYSELNDPIDQRERFEAQLKLADRGDDEAMFIDQDFLRALEYGMPPTSGLGIGMDRLIMFLTNNQSIQEVLFFPQMKPEKTISVELNEDEKLIFELLKKQSPAELDSIKADSGLSNKKWDKAVKGLRAKDVATVNKTDNGLFVELL

SEQ ID NO: 44870 - DNA, 1506 bp, Synechococcus sp. RS9917
  CDS (1)..(1506): transl_table=11
ttgtctgagctgcgcgacacccgtttagagaaggccaacgctctgcgggagctggggcgggagccctatgccctgcggtttgagcccagccaccgcacggcgcagttgcaggctgaccatgccgaccttgccaatggcgaggagcgccagctggaggtggcggtggccggccgggtgatgacccgacgggtgatgggcaaactcgccttcttcaccctggcggatgcctccggcccgattcagctctttctggagaaagccagcctcggtgacgccttcgcccaactcacctccctggtggatgcgggggattggatcggggtgcgggggattctgcgtcgcaccgatcgcggtgagctgtcggtgaaggtggccgagtggcagatgctcaccaaggcactccagcccctcccggataaatggcatggcctggcggatgtggagaagcgctaccggcagcgatacctcgatctgatcgtcagcccccagtcgcgcgagaccttccggcgccgcgccctgatggtgagtgcgatccggcgctggctggatgaccgcgattttctcgagatcgagacgcccgtgctgcaggcggaggccggtggggcggaagcgcggccgttcatcacccaccacaacacgctcgatctgcccctctacctgcgcatcgccaccgagctgcatctgaagcgcctggtggtgggtggcttcgaacgggtgtatgagctggggcgcatcttccgcaacgaaggggtcagcacccgccacaacccggaattcacctccgtggaggtgtatcaggcctatgccgactacgtcgacatgatgaacctcaccgagcagttgatcgcctcggtgaccgaacagatctgcggcaccacccgcatcacctaccagggcacggcggtggatctgacgcccccctggcgccgggcgacgatgcatgagctcgtgcaggaagccacaggtctcgatttcactgcgttcacaggccctggagccgccggtcgcgacgccgccgcagcggccatggccgctgcggggttggaggtgccggatgcggccgacagcgtcggtcgcctgctcaacgaagcctttgagcaacgggtggaggccacgctgatccagcccacgtttgtgatcgactatccgatcgagatctccccgctggcccgcaagcaccgcagcaaaccgggcctggtggaacgcttcgaattgttcatcgtcggtcgtgagaccgccaatgccttcagtgaactgatcgatcccctcgatcaacgccagcgactcgaggatcagcaggcccgtcgggctgcaggtgatgacgaagcccatggggtggatgaggatttcctccaggccctggaggtgggcatgccccccaccggcggcctcgggatcggcatcgatcggctggtgatgctgctcaccgacagtgcttcgatccgcgatgtgatcgccttcccgttgctgcgtcccgaggcccgacccgtcagcatggataattag

SEQ ID NO: 44871 - protein, 501 aa, Synechococcus sp. RS9917
MSELRDTRLEKANALRELGREPYALRFEPSHRTAQLQADHADLANGEERQLEVAVAGRVMTRRVMGKLAFFTLADASGPIQLFLEKASLGDAFAQLTSLVDAGDWIGVRGILRRTDRGELSVKVAEWQMLTKALQPLPDKWHGLADVEKRYRQRYLDLIVSPQSRETFRRRALMVSAIRRWLDDRDFLEIETPVLQAEAGGAEARPFITHHNTLDLPLYLRIATELHLKRLVVGGFERVYELGRIFRNEGVSTRHNPEFTSVEVYQAYADYVDMMNLTEQLIASVTEQICGTTRITYQGTAVDLTPPWRRATMHELVQEATGLDFTAFTGPGAAGRDAAAAAMAAAGLEVPDAADSVGRLLNEAFEQRVEATLIQPTFVIDYPIEISPLARKHRSKPGLVERFELFIVGRETANAFSELIDPLDQRQRLEDQQARRAAGDDEAHGVDEDFLQALEVGMPPTGGLGIGIDRLVMLLTDSASIRDVIAFPLLRPEARPVSMDN

SEQ ID NO: 44872 - DNA, 1536 bp, Pseudoalteromonas tunicata D2; identical to SEQ ID NO: 30267
  CDS (1)..(1536): transl_table=11

SEQ ID NO: 44873 - protein, 511 aa, Pseudoalteromonas tunicata D2; identical to SEQ ID NO: 30268

SEQ ID NO: 44874 - DNA, 1506 bp, Photobacterium sp. SKA34; identical to SEQ ID NO: 30269
  CDS (1)..(1506): transl_table=11

SEQ ID NO: 44875 - protein, 501 aa, Photobacterium sp. SKA34; identical to SEQ ID NO: 30270

SEQ ID NO: 44876 - DNA, 1503 bp, Oceanospirillum sp. MED92; identical to SEQ ID NO: 30271
  CDS (1)..(1503): transl_table=11

SEQ ID NO: 44877 - protein, 500 aa, Oceanospirillum sp. MED92; identical to SEQ ID NO: 30272

SEQ ID NO: 44878 - DNA, 1692 bp, Flavobacteria bacterium BBFL7
  CDS (1)..(1692): transl_table=11
atgaatccactttctgaacaagaaatcatacgccgcgagaaactaggcaaattgcgtgagatgggaattgatccttatccagcagctttatatcctgtagataacacatctacatccataaaagcagatttcaaagaaggtaaacaggtaaacgttgcaggacgtttaatgtctagacgtattgctggagcagcctcatttgcagagcttcaagatagtgaaggtcgtatacaagtatattttaaccgcgatgaaatctgtcctggcgacgataaatcacaatataatgatgtttataaaaagcttctagatataggagatattataggtatagaaggagaattatttaaaacacaggtgggcgaaatgaccatcatggttaaaaaattcacacttcttactaaagcattaaaaccattaccattacctaaagttgatgcagaaggtaaagtacatgacggatttgtagatccagaaatgcgttatcgccagcgttatgcagatctagtggtaaatccacaagtgaaagaagtttttgtaaaacgtacaaagttatttaatgccatgcgcaacttttttaacgagcgcgagtactttgaagtagaaactcctatcctacaacctataccaggtggagctgcagcaagaccatttatcactcaccacaattcattagacataccgctttatatgcgtatagcaaatgagttgtatttgaaaagattaatcgtaggtggttttgatggtgtatatgaattcagtaaaaacttccgtaatgaaggaatggatcgtactcataatccagagtttaccgcaatggagatctatgtagcatataaggactacaactggatgatggattttacagagcgccttctagaacattgtgccgtttctgttaatggaaaaacaagcagccagtttggagagcagactatagagtggaaagctccttatcctagaatcaccatgcgtcaatcgatcattgattttacaggatttgacattgatggaaaaagtgaggctgatttatacgctttcgcgaaagcggaaggaatcgatgtcgataccacaatgggtaaaggaaagcttatcgatgaaatctttggagagaagtgtgaaggaaactatatccaacctaccttcataacagattatcctaaagagatgtcaccgttatgtaaagcacatagagataatccagaacttacagaacgttttgaacttatggtgtgtggtaaagagattgcaaatgcttactctgagttgaatgaccctattgatcaacgtgagcgttttgaagcacaagttgcactagcagatcgtggtgatgatgaggcgatgtttatcgatcaggatttcttaagagcactagaatatggtatgccacctaccagtggactaggaataggtatggatcgtttaattatgtttttaactaataatccatcaatacaagaagtattattcttccctcaaatgaaacctgagaagaaagctctagatcttaccgaagatgaaaaaaccgtctttgatattcttaaaaaagagtctgaaatggacttaaatgatctgaaaggacaagctggattaagtaataagaaatgggacaaagcagttaaaggcttaaatggaaagaagatcaccaaagtagaaaagacagatgattctttaactattaaaaccatttag

SEQ ID NO: 44879 - protein, 563 aa, Flavobacteria bacterium BBFL7
MNPLSEQEIIRREKLGKLREMGIDPYPAALYPVDNTSTSIKADFKEGKQVNVAGRLMSRRIAGAASFAELQDSEGRIQVYFNRDEICPGDDKSQYNDVYKKLLDIGDIIGIEGELFKTQVGEMTIMVKKFTLLTKALKPLPLPKVDAEGKVHDGFVDPEMRYRQRYADLVVNPQVKEVFVKRTKLFNAMRNFFNEREYFEVETPILQPIPGGAAARPFITHHNSLDIPLYMRIANELYLKRLIVGGFDGVYEFSKNFRNEGMDRTHNPEFTAMEIYVAYKDYNWMMDFTERLLEHCAVSVNGKTSSQFGEQTIEWKAPYPRITMRQSIIDFTGFDIDGKSEADLYAFAKAEGIDVDTTMGKGKLIDEIFGEKCEGNYIQPTFITDYPKEMSPLCKAHRDNPELTERFELMVCGKEIANAYSELNDPIDQRERFEAQVALADRGDDEAMFIDQDFLRALEYGMPPTSGLGIGMDRLIMFLTNNPSIQEVLFFPQMKPEKKALDLTEDEKTVFDILKKESEMDLNDLKGQAGLSNKKWDKAVKGLNGKKITKVEKTDDSLTIKTI

SEQ ID NO: 44880 - DNA, 1494 bp, marine gamma proteobacterium HTCC2207
  CDS (1)..(1494): transl_table=11
atgaccgaccaacaagacgaaaacaaactaatcgccgagcgccgcgccaaactcactgcactgcgtgagcagggtggcagcccgttccccaatgactttcgcccccagcacagcgctgcagaattgcagactggctttggcgaagagactaaagaggccctcgagcagttgggtaaagtcgtcagtgttgcaggtcgtgtgattcgcaaccgcggtgcgtttatcgtggtacaagacagctcaggcaccatccagctgtatgtcaccaaagaagcgcgaccctttgccaagtcattggatcttggcgatatagtcggcatcaccggtgccctgcacctttcgggcaaaggtgatctctatgtgcaaatggacaactaccagctgctgaccaaagccctgcgtccactgcccgataagtttcacggtctcgcggatcaagagatgcgctaccgtcagcgctatgtagatctaattgttaaccccgatgtgcgcaatacctttcggatacgctccagggttgtcgactttatccgtcgctatttaaatgctgcagactatctggaagttgaaacacctatgctgcaagtgattcccggcggcgctgtggcacgaccttttgtcacccaccacaatgctctggatatcgatatgtatatgcggattgctcctgagctctatttaaagcgtttagtggttggcggctttgagcgggtctatgaaattaatcgcaacttccgcaatgagggtttgtccacaagacacaatcccgagttcaccatgctggagttttatcaggcttattcggattttaatgatctgatggatctgaccgaagatatgctgcgcaagatgaccaccgaagtattgggttccaccaaagtggttaacaccactaaggatgctgaaggagaagtggtcagcgaagttcactatgattttgccgagccgtttattcgcctgtcagtattcgattcgattttgcagtacaaccctgagatcagtgccgagcagcttgccgatgaagccggtgcgcggaaaatcgccacagacttacatatcccattaaaagatatctggggtctgggtaaggtgcagattgagatctttgaaaagactgttgaacatcttttagagcagccaacctttattaccatgtatcccgctgaagtctctccgctggcgcgacgcaatgatcaagatccccatgtcaccgaccggtttgagttctttgtcggcggccgcgaaatcgccaatggcttctctgagctcaatgattccgaagaccaagagtcacgcttcaagcagcaggtagcagagaaagatgccggtgatgatgaggccatgcacttcgatgccgactatatccgcgctctagaatacggcatgccgccaaccgccggtgagggtattggtatcgatcgtctggtgatgctgttgactgattctccgtccattagagatgtgctgctgttcccccatatgcgcccagaatag

SEQ ID NO: 44881 - protein, 497 aa, marine gamma proteobacterium HTCC2207
MTDQQDENKLIAERRAKLTALREQGGSPFPNDFRPQHSAAELQTGFGEETKEALEQLGKVVSVAGRVIRNRGAFIVVQDSSGTIQLYVTKEARPFAKSLDLGDIVGITGALHLSGKGDLYVQMDNYQLLTKALRPLPDKFHGLADQEMRYRQRYVDLIVNPDVRNTFRIRSRVVDFIRRYLNAADYLEVETPMLQVIPGGAVARPFVTHHNALDIDMYMRIAPELYLKRLVVGGFERVYEINRNFRNEGLSTRHNPEFTMLEFYQAYSDFNDLMDLTEDMLRKMTTEVLGSTKVVNTTKDAEGEVVSEVHYDFAEPFIRLSVFDSILQYNPEISAEQLADEAGARKIATDLHIPLKDIWGLGKVQIEIFEKTVEHLLEQPTFITMYPAEVSPLARRNDQDPHVTDRFEFFVGGREIANGFSELNDSEDQESRFKQQVAEKDAGDDEAMHFDADYIRALEYGMPPTAGEGIGIDRLVMLLTDSPSIRDVLLFPHMRPE

SEQ ID NO: 44882 - DNA, 1530 bp, Rickettsiella grylli; identical to SEQ ID NO: 30273
  CDS (1)..(1530): transl_table=11

SEQ ID NO: 44883 - protein, 509 aa, Rickettsiella grylli; identical to SEQ ID NO: 30274

SEQ ID NO: 44884 - DNA, 1542 bp, Oceanobacter sp. RED65; identical to SEQ ID NO: 30275
  CDS (1)..(1542): transl_table=11

SEQ ID NO: 44885 - protein, 513 aa, Oceanobacter sp. RED65; identical to SEQ ID NO: 30276

SEQ ID NO: 44886 - DNA, 1536 bp, Alteromonadales bacterium TW-7; identical to SEQ ID NO: 30279
  CDS (1)..(1536): transl_table=11

SEQ ID NO: 44887 - protein, 511 aa, Alteromonadales bacterium TW-7; identical to SEQ ID NO: 30280

SEQ ID NO: 44888 - DNA, 1512 bp, marine gamma proteobacterium HTCC2143; identical to SEQ ID NO: 30281
  CDS (1)..(1512): transl_table=11

SEQ ID NO: 44889 - protein, 503 aa, marine gamma proteobacterium HTCC2143; identical to SEQ ID NO: 30282

SEQ ID NO: 44890 - DNA, 1512 bp, marine gamma proteobacterium HTCC2080; identical to SEQ ID NO: 30283
  CDS (1)..(1512): transl_table=11

SEQ ID NO: 44891 - protein, 503 aa, marine gamma proteobacterium HTCC2080; identical to SEQ ID NO: 30284

SEQ ID NO: 44892 - DNA, 1455 bp, Candidatus Desulfococcus oleovorans Hxd3; identical to SEQ ID NO: 30285
  CDS (1)..(1455): transl_table=11

SEQ ID NO: 44893 - protein, 484 aa, Candidatus Desulfococcus oleovorans Hxd3; identical to SEQ ID NO: 30286

SEQ ID NO: 44894 - DNA, 1503 bp, Pseudomonas putida GB-1; identical to SEQ ID NO: 30287
  CDS (1)..(1503): transl_table=11

SEQ ID NO: 44895 - protein, 500 aa, Pseudomonas putida GB-1; identical to SEQ ID NO: 30288

SEQ ID NO: 44896 - DNA, 1545 bp, Marinobacter sp. ELB17; identical to SEQ ID NO: 30289
  CDS (1)..(1545): transl_table=11

SEQ ID NO: 44897 - protein, 514 aa, Marinobacter sp. ELB17; identical to SEQ ID NO: 30290

SEQ ID NO: 44898 - DNA, 1596 bp, Aspergillus oryzae; identical to SEQ ID NO: 30301
  CDS (1)..(1596)

SEQ ID NO: 44899 - protein, 531 aa, Aspergillus oryzae; identical to SEQ ID NO: 30302

SEQ ID NO: 44900 - DNA, 1815 bp, Aspergillus oryzae; identical to SEQ ID NO: 30303
  CDS (1)..(1815)

SEQ ID NO: 44901 - protein, 604 aa, Aspergillus oryzae; identical to SEQ ID NO: 30304

SEQ ID NO: 44902 - DNA, 1491 bp, Candidatus Portiera aleyrodidarum; identical to SEQ ID NO: 30305
  CDS (1)..(1491): transl_table=11

SEQ ID NO: 44903 - protein, 496 aa, Candidatus Portiera aleyrodidarum; identical to SEQ ID NO: 30306

SEQ ID NO: 44904 - DNA, 1518 bp, Citrobacter freundii; identical to SEQ ID NO: 30307
  CDS (1)..(1518): transl_table=11

SEQ ID NO: 44905 - protein, 505 aa, Citrobacter freundii; identical to SEQ ID NO: 30308

SEQ ID NO: 44906 - DNA, 1518 bp, Escherichia coli O157; identical to SEQ ID NO: 30309
  CDS (1)..(1518): transl_table=11

SEQ ID NO: 44907 - protein, 505 aa, Escherichia coli O157; identical to SEQ ID NO: 30310

SEQ ID NO: 44908 - DNA, 1518 bp, Mycobacterium bovis
  CDS (1)..(1518): transl_table=11
gtgagtgccgctgacacagcagaagaccttcctgagcagttccggattcgccgggacaagcgcgctcgcttgctggcccaggggcgcgatccctatcccgtcgcggtgccgcgcactcacacgttggccgaggttcgcgccgcccaccctgacttgccgatcgataccgcgaccgaagacatcgtcggcgtcgcgggccgagtgatctttgcgcgcaactcgggaaagctatgctttgcgacacttcaggacggcgatggtacccagctgcaagtgatgatcagcctcgacaaggtcggccaggctgctctcgacgcatggaaagccgatgtcgacctgggcgacatcgtctacgtgcatggcgcggtgatcagttcgcgccgcggcgagctgtccgtcctggcggattgctggcggatcgccgccaagtcgctgcggccgcttcccgtcgcgcacaaagagatgagtgaagagtcgcgggttcgtcagcgctatgttgacctcatagttcgaccggaagcgcgcgcggtggctcgactacggatcgccgtcgtccgcgcgatccggacggcgcttcaacgtcgtgggttcctggaagtcgagacgcccgtcttgcagacgttagccggtggtgcggcggcccgtccgttcgccactcattccaatgccctagacatcgatctgtacctgcggatcgcgccggaactgttcctcaagcgctgcatcgtgggtggtttcgacaaggtcttcgaacttaatcgagtgttccgaaacgaaggagccgattccacgcattctccggaattctccatgctggagacctaccagacctacggaacctatgacgattcggcagtcgtcacccgggagcttattcaagaggtggccgatgaggcgatcggaaccagacaactgccgttgcccgacggcagtgtctatgacatcgacggagaatgggcgactatacaaatgtacccgtcgctgtctgtggcgctcggtgaagagatcacaccgcagacgacggtcgatcgcttacgtgggatcgccgatagccttggcctggagaaagacccagcgattcatgacaaccgtggcttcggccacggcaaactcatcgaggaactctgggagcgcacagtgggcaagagcttgagcgcacccacatttgtcaaggattttccggttcagacaacgcctttgacccgtcagcaccgcagtatccccggcgtaaccgagaagtgggacctctatctgcgcggaatcgaacttgccaccggctactcggaattaagcgacccggtagtccagcgggagagattcgccgaccaggcccgtgccgcggccgctggcgatgacgaagcgatggtgcttgacgaggattttctggccgctctggagtacggcatgccaccgtgcaccggaaccggaatgggtatcgatcggttgttgatgtctttgactgggttgtcaattagggagacagttttgttcccgattgttcgaccacactccaactga

SEQ ID NO: 44909 - protein, 505 aa, Mycobacterium bovis
MSAADTAEDLPEQFRIRRDKRARLLAQGRDPYPVAVPRTHTLAEVRAAHPDLPIDTATEDIVGVAGRVIFARNSGKLCFATLQDGDGTQLQVMISLDKVGQAALDAWKADVDLGDIVYVHGAVISSRRGELSVLADCWRIAAKSLRPLPVAHKEMSEESRVRQRYVDLIVRPEARAVARLRIAVVRAIRTALQRRGFLEVETPVLQTLAGGAAARPFATHSNALDIDLYLRIAPELFLKRCIVGGFDKVFELNRVFRNEGADSTHSPEFSMLETYQTYGTYDDSAVVTRELIQEVADEAIGTRQLPLPDGSVYDIDGEWATIQMYPSLSVALGEEITPQTTVDRLRGIADSLGLEKDPAIHDNRGFGHGKLIEELWERTVGKSLSAPTFVKDFPVQTTPLTRQHRSIPGVTEKWDLYLRGIELATGYSELSDPVVQRERFADQARAAAAGDDEAMVLDEDFLAALEYGMPPCTGTGMGIDRLLMSLTGLSIRETVLFPIVRPHSN

SEQ ID NO: 44910 - DNA, 1518 bp, Salmonella typhimurium; identical to SEQ ID NO: 30315
  CDS (1)..(1518): transl_table=11

SEQ ID NO: 44911 - protein, 505 aa, Salmonella typhimurium; identical to SEQ ID NO: 30316

SEQ ID NO: 44912 - DNA, 1518 bp, Shigella flexneri; identical to SEQ ID NO: 30317
  CDS (1)..(1518): transl_table=11

SEQ ID NO: 44913 - protein, 505 aa, Shigella flexneri; identical to SEQ ID NO: 30318

SEQ ID NO: 44914 - DNA, 1536 bp, Methanosarcina acetivorans; identical to SEQ ID NO: 30323
  CDS (1)..(1536): transl_table=11

SEQ ID NO: 44915 - protein, 511 aa, Methanosarcina acetivorans; identical to SEQ ID NO: 30324

SEQ ID NO: 44916 - DNA, 1776 bp, Saccharomyces cerevisiae; identical to SEQ ID NO: 30325
  CDS (1)..(1776)

SEQ ID NO: 44917 - protein, 591 aa, Saccharomyces cerevisiae; identical to SEQ ID NO: 30326

SEQ ID NO: 44918 - DNA, 1731 bp, Saccharomyces cerevisiae; identical to SEQ ID NO: 30327
  CDS (1)..(1731)

SEQ ID NO: 44919 - protein, 576 aa, Saccharomyces cerevisiae; identical to SEQ ID NO: 30328

SEQ ID NO: 44920 - DNA, 1500 bp, Agrobacterium tumefaciens; identical to SEQ ID NO: 30331
  CDS (1)..(1500): transl_table=11

SEQ ID NO: 44921 - protein, 499 aa, Agrobacterium tumefaciens; identical to SEQ ID NO: 30332

SEQ ID NO: 44922 - DNA, 1881 bp, Arabidopsis thaliana; identical to SEQ ID NO: 30333
  CDS (1)..(1881)

SEQ ID NO: 44923 - protein, 626 aa, Arabidopsis thaliana; identical to SEQ ID NO: 30334

SEQ ID NO: 44924 - DNA, 1500 bp, Bacillus anthracis; identical to SEQ ID NO: 30335
  CDS (1)..(1500): transl_table=11

SEQ ID NO: 44925 - protein, 499 aa, Bacillus anthracis; identical to SEQ ID NO: 30336

SEQ ID NO: 44926 - DNA, 1506 bp, Bacillus halodurans
  CDS (1)..(1506): transl_table=11
atgagcgaagagctcggattaaatgacctcttggctgtgcgccgagagaaattgcaaaatttagaagccgaaggggcaaatccatttggtgggaagtttgagcgtaccgatactgcccagtctatgaaagaaaaatatgacgcgaagtcaaaagaagaattagaagaagaaacgcatgaggtcgtgcttgcaggacgagtgatgacgaagcgtggaaaaggaaaagcgggctttgctcatattcaggatttaacagggcaaatacaaatttatgtacgtaaggatgcagtaggcgacaagtcatacgatttgtttacgtcaatcgatattggcgacatcgtgggcgtcaaaggtgttgcttttaagacgaaagtaggggaactatcggttaaagtacaagactttcaactattgacgaagtcattgcgccctctcccagataaatatcatggcttaaaagatgtggagcagcgctatcgccaacgttaccttgacctcattgtgaaccctgaagttcgtgatacgtttgtcttgcgtagtaaaattttacaatcgatgcgtcgttacttagatgaccgtggatatttagaggtggaaaccccgaccatgcactccattccaggtggggcatcggctcgtccgtttgttactcaccataatgcactcgatatgacattgtatatgcggattgcgattgagctacatttgaaacggcttattgttggtgggatggaaaaagtctatgaaattggtcgagtgtttcgtaatgaaggtgtgtcaaccaggcataatccggaatttactatgattgagctttatgaagcttatgcggattataacgatattatggaattgacggaactactgatcgctcatatcgccaaagatgtactggggacgacaactattacttacggtgagcatgaagtgaacttggagccgaagtggcgacgtgtccacatggtggaggccattaaggaagagacaggtgtagacttttggaacgagatgagtgacgaggaagcgcgtgctttggctaaggagcacaacgttcctgtaaaagagacgatgacgtatgggcacgtcgtaaacgagttctttgagcactttgtggaagaaaagctcattcaaccaacattcgtttacggacaccctgttgcgatctcgccattggcaaagaaaaatcctgatgatcctcgctttaccgatcgatttgaattatttatcgtaggacgagagcatgcaaatgccttctctgaacttaatgatccgattgatcaacgtcaccgttttgaacaacaattagttgagcgggagcaaggggacgatgaagctcatatgatggatgaggatttcgttgaatcattagagtatgggatgccaccaactggtgggctaggaattggcatcgatcgattggtcatgctgttgacaaactcaccgtccatacgtgatgtgctattgttcccgcaaatgcgtcataaagattcacctgctactgaataa

SEQ ID NO: 44927 - protein, 501 aa, Bacillus halodurans
MSEELGLNDLLAVRREKLQNLEAEGANPFGGKFERTDTAQSMKEKYDAKSKEELEEETHEVVLAGRVMTKRGKGKAGFAHIQDLTGQIQIYVRKDAVGDKSYDLFTSIDIGDIVGVKGVAFKTKVGELSVKVQDFQLLTKSLRPLPDKYHGLKDVEQRYRQRYLDLIVNPEVRDTFVLRSKILQSMRRYLDDRGYLEVETPTMHSIPGGASARPFVTHHNALDMTLYMRIAIELHLKRLIVGGMEKVYEIGRVFRNEGVSTRHNPEFTMIELYEAYADYNDIMELTELLIAHIAKDVLGTTTITYGEHEVNLEPKWRRVHMVEAIKEETGVDFWNEMSDEEARALAKEHNVPVKETMTYGHVVNEFFEHFVEEKLIQPTFVYGHPVAISPLAKKNPDDPRFTDRFELFIVGREHANAFSELNDPIDQRHRFEQQLVEREQGDDEAHMMDEDFVESLEYGMPPTGGLGIGIDRLVMLLTNSPSIRDVLLFPQMRHKDSPATE

SEQ ID NO: 44928 - DNA, 1485 bp, Bacillus stearothermophilus; identical to SEQ ID NO: 30337
  CDS (1)..(1485): transl_table=11

SEQ ID NO: 44929 - protein, 494 aa, Bacillus stearothermophilus; identical to SEQ ID NO: 30338

SEQ ID NO: 44930 - DNA, 1500 bp, Bacillus subtilis; identical to SEQ ID NO: 30339
  CDS (1)..(1500): transl_table=11

SEQ ID NO: 44931 - protein, 499 aa, Bacillus subtilis; identical to SEQ ID NO: 30340

SEQ ID NO: 44932 - DNA, 1458 bp, Blochmannia floridanus; identical to SEQ ID NO: 30341
  CDS (1)..(1458): transl_table=11

SEQ ID NO: 44933 - protein, 485 aa, Blochmannia floridanus; identical to SEQ ID NO: 30342

SEQ ID NO: 44934 - DNA, 1521 bp, Bordetella bronchiseptica; identical to SEQ ID NO: 30343
  CDS (1)..(1521): transl_table=11

SEQ ID NO: 44935 - protein, 506 aa, Bordetella bronchiseptica; identical to SEQ ID NO: 30344

SEQ ID NO: 44936 - DNA, 1521 bp, Bordetella pertussis; identical to SEQ ID NO: 30345
  CDS (1)..(1521): transl_table=11

SEQ ID NO: 44937 - protein, 506 aa, Bordetella pertussis; identical to SEQ ID NO: 30346

SEQ ID NO: 44938 - DNA, 1578 bp, Chlamydophila caviae
  CDS (1)..(1578): transl_table=11
atgtcagaagctgaatacctaacacaagaagattttctccaaagaagtaacaagctccaggaaatatctgatctaggtattaatccttatccttatgaattcccaggaacaagtagtgttgaggaaatcaaacaagaatatgcttcacagactcttggtaatagcgaagacgccacgaataagaaaactcctaaggtaaaaatctcaggacgtatggtgcttttccgttctatgggaaagaacgcttttgctcaaatcttggataatgatcaaaaaatccaagtcatgtttaacagggatttttcttcagtggcaggtcttcctgaagatgcagaaatttctccgataaaatttatagagaagaagcttgatcttggagatattttaggaatagaagggtacctatttttcacacattcaggagaactaactatccttgtagagaccgttaccctgctatgtaaagctttgatctccctccccgataaacatgcaggattaagtgataaagaaatccgttatagaaaacgttggctagacctgatttcttcggatgaagtgcgtcagactttttttaaaagaagtcgtattatcaaattaatccgtcagtatatggatgctcagggatttatggaggtagaaactcctatattacaaaatatatatggtggtgctgaagcaacaccctttgtcactactttgaatgctttgcactcagaagtgttcttaaggatttctctagagattgctttaaagaaaattcttgttggcggaacctcacgtgtctatgaaatcggaaaagtattcaggaatgaggggatcgataggacgcataatcctgaatttaccatgattgaagcctacgctgctaacgtggattatcatagtgttatgacttatgtggaaaaccttgttgaatacctagtgtgtgcattaaatgatggcagcactgttttgacctactcacatttgaaacaagggccgcaaactgttgattttaaagctccttggattcgcatgacgatgaaagatagtattaagacatacggagatgtggatgtcgatcttcatgcagatcatgaattgcgcaatattttaaaagagcgtacctcgttacctgaggaatcttacgcaacggcacccagaggtttattaatcacagcgctgtttgatgagttagtctgtgataagctaatcgcccctcaccatattacagatcatcctatagagacgacacctttatgtaagtctttacgttctggagatgcagattttgtagaacgttttgaaagtttttgcttaggaaaagaactctgcaatgcttattcagagttgaatgatccactacatcaaagaatgcttttagaaaagcaaatggagaaaaaagctttagaccccgatagtgaataccaccctattgatgaggagtttttagaagccctatgtcaaggaatgcctcctgcaggagggtttggaatcgggatcgatcgtttggtgatgattcttactgatgcggcttctatccgagatgttttgtattttccagctatgcgtcgtttagaatcagaaaataattaa

SEQ ID NO: 44939 - protein, 525 aa, Chlamydophila caviae
MSEAEYLTQEDFLQRSNKLQEISDLGINPYPYEFPGTSSVEEIKQEYASQTLGNSEDATNKKTPKVKISGRMVLFRSMGKNAFAQILDNDQKIQVMFNRDFSSVAGLPEDAEISPIKFIEKKLDLGDILGIEGYLFFTHSGELTILVETVTLLCKALISLPDKHAGLSDKEIRYRKRWLDLISSDEVRQTFFKRSRIIKLIRQYMDAQGFMEVETPILQNIYGGAEATPFVTTLNALHSEVFLRISLEIALKKILVGGTSRVYEIGKVFRNEGIDRTHNPEFTMIEAYAANVDYHSVMTYVENLVEYLVCALNDGSTVLTYSHLKQGPQTVDFKAPWIRMTMKDSIKTYGDVDVDLHADHELRNILKERTSLPEESYATAPRGLLITALFDELVCDKLIAPHHITDHPIETTPLCKSLRSGDADFVERFESFCLGKELCNAYSELNDPLHQRMLLEKQMEKKALDPDSEYHPIDEEFLEALCQGMPPAGGFGIGIDRLVMILTDAASIRDVLYFPAMRRLESENN

SEQ ID NO: 44940 - DNA, 1536 bp, Chlorobium tepidum
  CDS (1)..(1536): transl_table=11
atgtccaacgcaccagaacagaagaatccgcagaacgatccgtcacccgcagtttcgctcaacgaccagatgaagcgccgcttcgaggagcgcacgcaccttgccgaagcaggcatcaatccctatccctataaattcgacgttacaaccacctcgaaagcgatcatcgacagcttcagcgatgaaaatcccgcagatgtttcggtggccggacgcatcatggccatccgcaggatgggcaaggcgtcgttcctgcatattcaggactccgagggtcgcatccagatttacctcaaaaaggacgacgtcggcgaggcttcgtacaacaccttcaagctgctcgacatcggcgacatcgtgggcgtcagcggtttcacgttcaagacgaaaaccggtgaaatctcggtacacgccaggcaattcgagctgcttgccaagtcgctccgcccgattccgattgccaaagagaaagaggttgacggccagaaggtgatttacgatgctttcagcgaccgcgagttgcgctaccgccagcgctatgtcgatctgatcgtcaacccggaggtgcgcggcaccttcatcaagcggacgaagatcgtcgccctgatgcgcaactacttcgcctcgaacggctggctcgaagtggaaacgccgattctccagccgatctacggcggcgcggcggcccgccccttcacgacgcaccacaacgcgctcgatatgcagctctacctgcgcatcgccaacgaattgtacctcaagcggctcatcgtcggcggcttcgacggcgtgttcgagttcgccaaggacttccgcaacgagggcatcgaccgcttccacaacccggaattcacccaggtcgagctctatgtcgcctacaaggattacatctggatgatggagctggtcgaagatttactgcacaaggcttgcgtagaagtgaacggcaaggattcgacgatgttcctcggcaacgaaatcaacctcaagccacccttccgccgcctcaccatcgccgactcgatcagggagtacaccggcatggagattcgcggcaaatcggaagcgcagctccgcgacattgcgaaagatttgggactcgaactcgatcccaagatcagcagcggcaagatcatcgatgaaattttcggcgaattcgtcgagccgaagctcatccagccgaccttcatcaccgactacccggaggagatgtcgccgctcgccaagaagcaccgctcggagcctggactcgtcgagcgcttcgagctgatcgtcggcggcaaggaggtgtgcaactccttctccgagctgaacgacccggtcatccagcgcgaacgcctcgaagagcaggcccgcctacgccagcgcggcgacgacgaagcgatgatcgttgacgaggatttccttcgcgcgctggaatacggcatgccaccctgcgccggcctcggcattggcatcgaccgcatggtgatgctgctgaccggccaggactccatccgcgacgtcatcttcttcccgcacatgaagcccgaatga

SEQ ID NO: 44941 - protein, 511 aa, Chlorobium tepidum
MSNAPEQKNPQNDPSPAVSLNDQMKRRFEERTHLAEAGINPYPYKFDVTTTSKAIIDSFSDENPADVSVAGRIMAIRRMGKASFLHIQDSEGRIQIYLKKDDVGEASYNTFKLLDIGDIVGVSGFTFKTKTGEISVHARQFELLAKSLRPIPIAKEKEVDGQKVIYDAFSDRELRYRQRYVDLIVNPEVRGTFIKRTKIVALMRNYFASNGWLEVETPILQPIYGGAAARPFTTHHNALDMQLYLRIANELYLKRLIVGGFDGVFEFAKDFRNEGIDRFHNPEFTQVELYVAYKDYIWMMELVEDLLHKACVEVNGKDSTMFLGNEINLKPPFRRLTIADSIREYTGMEIRGKSEAQLRDIAKDLGLELDPKISSGKIIDEIFGEFVEPKLIQPTFITDYPEEMSPLAKKHRSEPGLVERFELIVGGKEVCNSFSELNDPVIQRERLEEQARLRQRGDDEAMIVDEDFLRALEYGMPPCAGLGIGIDRMVMLLTGQDSIRDVIFFPHMKPE

SEQ ID NO: 44942 - DNA, 1581 bp, Chlamydia trachomatis
  CDS (1)..(1581): transl_table=11
atgtctgtagaagttgaatacttgcaacacgaagattatttgtatagaacaagcaagctaaaggaaatcagagatttgggcataaatccttacccttatcaatacactgattgtcttgaagtacaggaaattcgtaatcagtttgtagataacgaattaggagatagcgaagcggcttttcgtaaagagacacctaaggtgcgttttgccggacgacttgttcttttccgttctatggggaaaaattcttttgggcagatcctcgataatgatgcaaagattcaagtgatgtttaatcgagatttttctgcagtggcagggttagccgcggatgctgggatttctccgattaaatttattgagaagaaacttgatctaggagacatcttgggtctcgaagggtatcttttctttactcactcaggagaattaacggttctcgttgaaacggtaacgttgttatgtaaatccttaatttctttgcctgataagcatgcaggattagcagataaagaaattcgctatcgcaaacgttgggcagatctgatttcctcagaggatgtgcgtaagactttcttaacaagaagccggattcttaagttgattcgtgagtacatggatcagcagagctttttagaggtggaaactcctatcctgcaaaccatctacggaggagcagaagcaactccttttgttaccacgctgcaagcgctacatgcagaaatgttcctaagaatttctctagagattgctttgaaaaaactccttgttggaggaatgtcccgagtttatgaaatcggcaaagttttccgtaacgaaggaatcgatagaacgcataatccagagtttaccatgatagaggcttatgcggcttattgggattacaatgatgtaatgaaatgtgtggaaaaccttgttgagtatatcgtacgtgctttgaataacggggaaactcaggttcagtattcacatttaaaatcaggacctcaggttgttgattttaaagctccatggatccgtatgacgatgaaagaaagtatctctgtctatggcggcgtcgatgtagacttacatgcagatcatgaattacgtaaaattttagaaacacaaacatctcttccagagaaaacgtatgttcatgcctcacgaggagagctgatcgctttgctatttgatgagctggtttgtgataagctcatcgctccgcatcacattacagatcatccattagaaacaacgccactttgtaaaacattgcgttctggggatgaaactctggtagaacgatttgagagtttttgtttaggaaaagagttgtgtaatgcttattcggaactcaatgatcctttacaacaacgaaaattgttggaagagcaaatgcgtaaaaaggctttaaatcctgacagcgaataccatcctatagatgaagaatttctagaagctctttgccaaggaatgcctcctgcaggaggatttggaataggtatcgatcgattggttatgatgttgacagacgccgcatccattcgggatgtcctgtttttccctgttatgcggcgtatagaagcaaaaaaagattaa

SEQ ID NO: 44943 - protein, 526 aa, Chlamydia trachomatis
MSVEVEYLQHEDYLYRTSKLKEIRDLGINPYPYQYTDCLEVQEIRNQFVDNELGDSEAAFRKETPKVRFAGRLVLFRSMGKNSFGQILDNDAKIQVMFNRDFSAVAGLAADAGISPIKFIEKKLDLGDILGLEGYLFFTHSGELTVLVETVTLLCKSLISLPDKHAGLADKEIRYRKRWADLISSEDVRKTFLTRSRILKLIREYMDQQSFLEVETPILQTIYGGAEATPFVTTLQALHAEMFLRISLEIALKKLLVGGMSRVYEIGKVFRNEGIDRTHNPEFTMIEAYAAYWDYNDVMKCVENLVEYIVRALNNGETQVQYSHLKSGPQVVDFKAPWIRMTMKESISVYGGVDVDLHADHELRKILETQTSLPEKTYVHASRGELIALLFDELVCDKLIAPHHITDHPLETTPLCKTLRSGDETLVERFESFCLGKELCNAYSELNDPLQQRKLLEEQMRKKALNPDSEYHPIDEEFLEALCQGMPPAGGFGIGIDRLVMMLTDAASIRDVLFFPVMRRIEAKKD

SEQ ID NO: 44944 - DNA, 1509 bp, Chromobacterium violaceum; identical to SEQ ID NO: 30353
  CDS (1)..(1509): transl_table=11

SEQ ID NO: 44945 - protein, 502 aa, Chromobacterium violaceum; identical to SEQ ID NO: 30354

SEQ ID NO: 44946 - DNA, 1497 bp, Coxiella burnetii; identical to SEQ ID NO: 30355
  CDS (1)..(1497): transl_table=11

SEQ ID NO: 44947 - protein, 498 aa, Coxiella burnetii; identical to SEQ ID NO: 30356

SEQ ID NO: 44948 - DNA, 1578 bp, Deinococcus radiodurans; identical to SEQ ID NO: 30357
  CDS (1)..(1578): transl_table=11

SEQ ID NO: 44949 - protein, 525 aa, Deinococcus radiodurans; identical to SEQ ID NO: 30358

SEQ ID NO: 44950 - DNA, 1494 bp, Gloeobacter violaceus; identical to SEQ ID NO: 30361
  CDS (1)..(1494): transl_table=11

SEQ ID NO: 44951 - protein, 497 aa, Gloeobacter violaceus; identical to SEQ ID NO: 30362

SEQ ID NO: 44952 - DNA, 1497 bp, Haemophilus ducreyi; identical to SEQ ID NO: 30363
  CDS (1)..(1497): transl_table=11

SEQ ID NO: 44953 - protein, 498 aa, Haemophilus ducreyi; identical to SEQ ID NO: 30364

SEQ ID NO: 44954 - DNA, 1557 bp, Helicobacter hepaticus
  CDS (1)..(1557): transl_table=11
atgttttcaaatttttatgttcaacaacgtataaaaaaaatggaacttatgcgacaagaaggctttaatccttatgctaataaaactacacgcactatcagtaattacaattttttaaataaatataatcatctcaaaatgcaatcttcagatgatacgcaagattgtacgcaaaataaagagattgaaagcattgtaggacgtgtgcgttttatccgtctaatgggaaaagcgtgctttattaagattcaagatgaaagtggtatccttcaagcttatgtatcaaaaaatgatattggagaagactttttattgattaaaaaagtgcttgaagttggggatattatcaatgtaagtggttatgcttttgtaaccaaaaccggtgaattaagtatccacacacttacattgcaaatacttaccaaaagtatcgtcccactcccagaaaaatttcacggactaaatgatattgagctacgttatcgccaacgttatgtagatttaatcgttaataacaaagttaaagaaacttttaaactgcgtagccaaattgtctcgtgcatacgacaattttttgagcaaaaaggattcttagaagtggaaacacctatgctccattctattcctggcggagcaaatgcgcgccctttcatcactcatcataatgcacttgatgtagatagatatctacgaattgcgcccgaactttatctcaaacgtcttattgtagggggatttgaagctatttttgaactcaatcgtaattttcgcaatgaaggtatggatcattcacataatccagaatttagtatgattgaattttattgggcatataagacttatgaagacctcattacacttacccaagaactttttgctttcttatttaaaaaactcaacttaccgcatagtttgatacacgatgagttagaaattgatttctcacaatggcacattataggctacaaagaagcattaattaaaattggtggtttagataaaaatatcattgataatcaagacgcactccttagcttccttatgagcaaacatcttaaggtagataagagtatgtcttatggcaaacttttaggcgaagcttttgatgaatttgttgaacataaactcatcaatccgacttttatcacgcaatatcccattgaaattagccctttagctcggcgtaatgatgagaatccaaatgttgctgatagatttgagttattcatcggtggtaaggaaattgccaatggttttagtgagcttaatgacccaatcgaccaatttgagagattcaaagagcaagccaaggcaaaagatgcgggagatgaagaagcgcagtatatggacgaagattatgtatgggcacttgcgcacggtatgccacctactgctggagaaggcataggtattgatagattagtaatgcttttaagcaatgcaaaaacaattaaagatgtaattttatttcctgcattaaagccaactaaatcaaattttgatataatactttctcaagacgcattatctaatgctcaaataatcaaggagaactaa

SEQ ID NO: 44955 - protein, 518 aa, Helicobacter hepaticus
MFSNFYVQQRIKKMELMRQEGFNPYANKTTRTISNYNFLNKYNHLKMQSSDDTQDCTQNKEIESIVGRVRFIRLMGKACFIKIQDESGILQAYVSKNDIGEDFLLIKKVLEVGDIINVSGYAFVTKTGELSIHTLTLQILTKSIVPLPEKFHGLNDIELRYRQRYVDLIVNNKVKETFKLRSQIVSCIRQFFEQKGFLEVETPMLHSIPGGANARPFITHHNALDVDRYLRIAPELYLKRLIVGGFEAIFELNRNFRNEGMDHSHNPEFSMIEFYWAYKTYEDLITLTQELFAFLFKKLNLPHSLIHDELEIDFSQWHIIGYKEALIKIGGLDKNIIDNQDALLSFLMSKHLKVDKSMSYGKLLGEAFDEFVEHKLINPTFITQYPIEISPLARRNDENPNVADRFELFIGGKEIANGFSELNDPIDQFERFKEQAKAKDAGDEEAQYMDEDYVWALAHGMPPTAGEGIGIDRLVMLLSNAKTIKDVILFPALKPTKSNFDIILSQDALSNAQIIKEN

SEQ ID NO: 44956 - DNA, 1488 bp, Leptospira interrogans; identical to SEQ ID NO: 30373
  CDS (1)..(1488): transl_table=11

SEQ ID NO: 44957 - protein, 495 aa, Leptospira interrogans; identical to SEQ ID NO: 30374

SEQ ID NO: 44958 - DNA, 1497 bp, Listeria monocytogenes; identical to SEQ ID NO: 30377
  CDS (1)..(1497): transl_table=11

SEQ ID NO: 44959 - protein, 498 aa, Listeria monocytogenes; identical to SEQ ID NO: 30378

SEQ ID NO: 44960 - DNA, 1524 bp, Mycobacterium leprae; identical to SEQ ID NO: 30383
  CDS (1)..(1524): transl_table=11

SEQ ID NO: 44961 - protein, 507 aa, Mycobacterium leprae; identical to SEQ ID NO: 30384

SEQ ID NO: 44962 - DNA, 1470 bp, Mycoplasma pneumoniae
  CDS (1)..(1470): transl_table=4
atgagcgatcgtttaaatgatcaagcacaaaatcgcttgcaaaaactcctaaacctcaaacaaactggcaacgatccctacctcattactaagatagaaaacacccactcagcggctagttttcaaaaagcatttgccaaccaatctgacgctgagttaaagcagtaccaagtgatcttaaccggtcggattattgcgctccggcagacctttattattatccaagactttagtgggaaaatgcagttgtacattaataaaaaaactgcccccgaactgtttgaatatttcaataattacattgatttgggtgatcaaatagtagccactggccatccaatgatgaccaaaacaggtgttttaacgctgaacgtagagcgattacaaattgtcgctaaatgcttacaaaccccacctgaaaaatgacatgggttgaccgatccagaagcgcgagcacgaaagcgttacttggatttgacctacaaccgtgcgcaggtcgaagtctttttgaaacgcacccagattattacagctatccgtacctttttaaatgaagcgggctttctagaagtggaaacacccattttacaagccgttttagggggtgctaacgccaagccctttaaaacacactataacgccttaaagggtgatttttacttgcggattgcaaatgaaatagcactcaaaaagctcattgtgggcggtttgccgaaagtgtatgaaatggggcggatgtttcgtaacgaaggggtggatactacccataatccggagtttacgagcattgaaatgtatcaggctaacgctgactatgcggtcatgatggatttaaccgaaaacctcattaagtttgtttgcaaaacactcaatcagtgaagttttaactggaacgggcaaacacttgatttagccaaaccgttcaagaaagtcaaaatggtagatttaatctgccaagttactggggttaattttgatgatgttaaggatgatcaaacagccattgcgcttgcaaagcagcacaaagtagagttaaaaaagcacgagcagaacaaacaacacattattaaccgtttctttgaacagttctgtgagcataccttaatacaacccacctttgtcacacactatcccaaggccgtttccccgctagctaaacaagatccccacaaccccgagtttactgagcgctttgaactttttattaatacaaaagagttagcgaacgcttacagtgagttgaatgatcccctagaacaacgtgcgcgctttgaacaacagttgcaggaaaaacgcatgggtaatgatgaagcaagtgaattagatgaatcctttttggatgctttgagttttggtctcccgccaacaggcggccttgggattggggttgatcggttagtgatgttattgtgcgagtgcagttccatccgtgacgttgttttctttccccaactacgtgaattgaaataa

SEQ ID NO: 44963 - protein, 489 aa, Mycoplasma pneumoniae
MSDRLNDQAQNRLQKLLNLKQTGNDPYLITKIENTHSAASFQKAFANQSDAELKQYQVILTGRIIALRQTFIIIQDFSGKMQLYINKKTAPELFEYFNNYIDLGDQIVATGHPMMTKTGVLTLNVERLQIVAKCLQTPPEKWHGLTDPEARARKRYLDLTYNRAQVEVFLKRTQIITAIRTFLNEAGFLEVETPILQAVLGGANAKPFKTHYNALKGDFYLRIANEIALKKLIVGGLPKVYEMGRMFRNEGVDTTHNPEFTSIEMYQANADYAVMMDLTENLIKFVCKTLNQWSFNWNGQTLDLAKPFKKVKMVDLICQVTGVNFDDVKDDQTAIALAKQHKVELKKHEQNKQHIINRFFEQFCEHTLIQPTFVTHYPKAVSPLAKQDPHNPEFTERFELFINTKELANAYSELNDPLEQRARFEQQLQEKRMGNDEASELDESFLDALSFGLPPTGGLGIGVDRLVMLLCECSSIRDVVFFPQLRELK

SEQ ID NO: 44964 - DNA, 1512 bp, Neisseria meningitidis serogroup A
  CDS (1)..(1512): transl_table=11
atgagcgaacaaaaccatccgcaaaccgagccgcagttggacgaaaaccaaatcatcgccctgcgccgcgaaaaactgcacaacatccgccaacagcgcaacgcctatcccaacgacttcaaacgcgacagcttcgccgccgatttgcacgcccaatacggcgaaatcggcaaagaagaactcgatccgcaaggcattcccgtcaaagtggccggccgcatgatgctgaagcgtcaaatgggcaaggcgagctttgccaccattcaagacgtgtccgggcaaatccagctttatctgaacaacaaaggcgtgagtcaagaagttttggacgacttcaaccattgggatttgggcgacatcgtcggcgcggaaggcactttgttcaaaaccaaccacggcgaactgaccgtacgcgtgtccggcatccgcctgctgtccaaatccctgcgccctctgccggacaaacataaaggcttgagcgatcaggaaaccaaataccgtcaacgctacgtcgatttgattgccaacgaagaatcgcgcaataccttcatcaaacgcagccaaatcatccaatccgtgcgtaattttatggtgggcgagcattatctcgaagtcgaaaccccgatgatgcacccgattcccggcggcgcgacggcaaaacccttcgttacccatcacaatgccttagatattccgctttatttgcgaatcgcccccgagctgtatctgaaacgcctggttgtcggtggtttggaacgcgtgtttgaaatcaaccgcagcttccgcaacgaaggcatgtccgtgcgccacaaccccgaattcaccatgatcgaattctacgaagccttctccgactacgaacgcatgatgcagatggcggaagacatcatccgcaacgcatcgcacacggtaaacggcacggcaaacatcacttacaacggcaaagaagtcgatttggaaagcccgtttgaacgcctgaccattctcgaagccatcaaaaaatacaatccgcactacaccgacgagcagttgaacgatgcggaatggctgaaaaaagaaatcgtcaaacacggcgaaagcctgccgccgtccccgggcatcggcagcctgcaactcgcgctgtttgaaggttgcgccgagggcaagctgtggaatccgaccttcatcgtcgattacccggtcgaagtttccccgttggcgcgcgcttcggataccaaacaaggtctgaccgaacgtttcgaattgttcgttgtcgggcgcgaactggcaaacggctattccgagttgaacgaccccgaagaccaagccgaacgcttcaaagcgcaagtggcgcaaaaagacgcgggcgacgacgaagcgatgcactacgatgccgactacatccgcgcgatggagttcggtctgccgccgaccggcggttgcggtatcggcatcgaccgcttggtaatgttgctgaccgattcgcaaaccatccgtgacgtgattctgttcccgcagatgcgccccgagtaa

SEQ ID NO: 44965 - protein, 503 aa, Neisseria meningitidis serogroup A
MSEQNHPQTEPQLDENQIIALRREKLHNIRQQRNAYPNDFKRDSFAADLHAQYGEIGKEELDPQGIPVKVAGRMMLKRQMGKASFATIQDVSGQIQLYLNNKGVSQEVLDDFNHWDLGDIVGAEGTLFKTNHGELTVRVSGIRLLSKSLRPLPDKHKGLSDQETKYRQRYVDLIANEESRNTFIKRSQIIQSVRNFMVGEHYLEVETPMMHPIPGGATAKPFVTHHNALDIPLYLRIAPELYLKRLVVGGLERVFEINRSFRNEGMSVRHNPEFTMIEFYEAFSDYERMMQMAEDIIRNASHTVNGTANITYNGKEVDLESPFERLTILEAIKKYNPHYTDEQLNDAEWLKKEIVKHGESLPPSPGIGSLQLALFEGCAEGKLWNPTFIVDYPVEVSPLARASDTKQGLTERFELFVVGRELANGYSELNDPEDQAERFKAQVAQKDAGDDEAMHYDADYIRAMEFGLPPTGGCGIGIDRLVMLLTDSQTIRDVILFPQMRPE

SEQ ID NO: 44966 - DNA, 1509 bp, Nitrosomonas europaea; identical to SEQ ID NO: 30387
  CDS (1)..(1509): transl_table=11

SEQ ID NO: 44967 - protein, 502 aa, Nitrosomonas europaea; identical to SEQ ID NO: 30388

SEQ ID NO: 44968 - DNA, 1482 bp, Oceanobacillus iheyensis; identical to SEQ ID NO: 30389
  CDS (1)..(1482): transl_table=11

SEQ ID NO: 44969 - protein, 493 aa, Oceanobacillus iheyensis; identical to SEQ ID NO: 30390

SEQ ID NO: 44970 - DNA, 1506 bp, Pasteurella multocida; identical to SEQ ID NO: 30391
  CDS (1)..(1506): transl_table=11

SEQ ID NO: 44971 - protein, 501 aa, Pasteurella multocida; identical to SEQ ID NO: 30392

SEQ ID NO: 44972 - DNA, 1737 bp, Porphyromonas gingivalis
  CDS (1)..(1737): transl_table=11
atgaacatactcgaactttcggaacaagaagtcgtacgccgtaacagcttagagcaactgcgtaatttggggatcgatccatatcctgcagcggaatataccgtcaatgcctattccgccgagatcaaaaggaatttcaatggcgatgagaatgtcgccaaacgtcaagtaagcattgccggacgtattatgagccgccgtatcatggggaaagctacattcatggagctgcaagatgctgaggggcgtatccagatctatattactcgggacgatatttgtccgggtgaggataaggagttctacaatacggtggtcaagaagtgtacggatataggtgattttatcggagtgaaagggtacgtattccgcactcagatgggagaaatatcggtgcatgtgcaggagatgactttcttgtcgaaagctatccgcccccttcctgtggtaaaagaaaaagatggggaggtcttcgatggcttcacggatccggagcagcgttatcgtcagcgatacgtggatctggtcgtcaatagtcatgtcaaagacattttcctcaagcgtacgatggtattcaattcgatgcgcagtttcttcaatgagtgcggatacatcgaagtggatacacctgtactccaatcgatcccgggaggtgcagctgcgcgtccttttatcacgcatcataacgctctggacattccgctctatctgagaatcgctaacgaattgtatctgaagcgtctgatcgtgggcggtttcgatggtgtgtatgaattcagccgcaatttccgaaatgaggggatggaccgcacgcataatcctgagttcacggccatggagatctatgtggcgtataaggattacaactggatgatgaactttacggagcagatgctcgaacgcatctgtatggatgtgctgggtactactcagatgaaggtgggcgggaaattgatcgacttcaaggccccctacaagcgagtgaccatgatcgaagccatccatgagcatacgggtatcgacatcagcggaatgaacgaggccgagctgcgtcaggtatgcgacaagctgggcgtagagcacaatgaaacgatgggcaaaggcaagctcatcgatgagatcttcggcgagaagtgcgagaagaactatatccagcctactttcatcacagactatccgaaagaaatgtcgcctctgacgaaggagcaccgcaccaatccggagctgacagagcgattcgagctgatggtcaatggcaaggagttggccaacgcctactcggagctgaacgacccgattgatcagagagaacgtttcgaagaacaactcaagctgtccgagaaaggcgatgacgaagccatgtacatcgacaacgacttcatccgtgcccttgaatacggtatgccgccgaccagcggtatgggtatcggtatggaccgtttggtcatgctattgacagggcaggagagtattcaggaggtgctcctcttcccacagatgaagcccgagaaggtggctccacgagatacgaaagagaagttcgccgtttgtggcgttcccgaagagtgggtacctgtactgcataaggccggctatcttaccgtacagtcgatgcgagaggataaaccgggcaaggtgatgcagcagctgatggacatcaataagaaatataagttggggcttgccggtttgaatctggaaaccgtttcggcttggcaggaagccccatatgagtaa

SEQ ID NO: 44973 - protein, 578 aa, Porphyromonas gingivalis
MNILELSEQEVVRRNSLEQLRNLGIDPYPAAEYTVNAYSAEIKRNFNGDENVAKRQVSIAGRIMSRRIMGKATFMELQDAEGRIQIYITRDDICPGEDKEFYNTVVKKCTDIGDFIGVKGYVFRTQMGEISVHVQEMTFLSKAIRPLPVVKEKDGEVFDGFTDPEQRYRQRYVDLVVNSHVKDIFLKRTMVFNSMRSFFNECGYIEVDTPVLQSIPGGAAARPFITHHNALDIPLYLRIANELYLKRLIVGGFDGVYEFSRNFRNEGMDRTHNPEFTAMEIYVAYKDYNWMMNFTEQMLERICMDVLGTTQMKVGGKLIDFKAPYKRVTMIEAIHEHTGIDISGMNEAELRQVCDKLGVEHNETMGKGKLIDEIFGEKCEKNYIQPTFITDYPKEMSPLTKEHRTNPELTERFELMVNGKELANAYSELNDPIDQRERFEEQLKLSEKGDDEAMYIDNDFIRALEYGMPPTSGMGIGMDRLVMLLTGQESIQEVLLFPQMKPEKVAPRDTKEKFAVCGVPEEWVPVLHKAGYLTVQSMREDKPGKVMQQLMDINKKYKLGLAGLNLETVSAWQEAPYE

SEQ ID NO: 44974 - DNA, 1527 bp, Prochlorococcus marinus
  CDS (1)..(1527): transl_table=11
atggcgaggtcagtcctgagtgccttgtctgagctgcgtgagactcgcctggaaaaggcacaagccctcaaagagctggggaatgggccctatgccctgcgctttgagtcaagccatagcaccgctaacttgcaggcggatcatgctgatttggccaagggtgaggagaggcttctcactgtgtctgtggctggtcgggtgatgacccgtcgtgtcatgggcaagttggctttctataccttggcggatgagaccggcacgattcagttgtatttggagaaggccaccattgatgcggctgcatcaaatgagctggcttcaggaacttttgttcagctcaccacccttgttgacgcgggcgactggattggggtcacaggcgtgcttcgtcgcactgaccgtggtgagctttcggtgaaggttcagcagtggcagatcttgagcaaatcattgcaacccttgccagataagtggcacggtttagctgatgtggagaagcgctatcggcaacgctatctggatttgatcgtgtcgcctcagtcgcgtgagacttttcgccgccgggcattgatggtgagtgcaatccgtcgatggctcgatgatcgtgccttcttggaaatcgaaacaccggtgcttcaggctgaggccggtggcgccgaagctaggccattcattactcaccacaacacactcgatcttcctctttatctgcgtattgccacagagctgcatctcaagaggcttgtggttggtggatttgagcgggtctatgagcttgggcgcatctttcgtaacgaggggatgagtacccgccacaaccctgaattcacttctgtagaggtctatcaggcctatgcggattacattgacatgatggtccttactgagcagctgatttcctcagtttgtactcagatctgtgggtctacgaggatcacttatcaaggcatagaaatcgacctaacgcccccttggcggagagccagcatgcacgaactggtgcaagaggcgacggggcttgatttcatgggttttaaagaccttgcggtagcggcttcggctatggcgcgggtaggtctagaggtgccgtctaaggccgatagtgtgggccgcttgcttaatgaggcctttgaacaagcagtggaggtaagtttgatccagccaacatttgtgctcgactatccgattgagatctcgcctcttgcccgacaacatcgcagcaaaccaggattggtcgagcgctttgaattgttcattgtgggtcgggaaacagccaatgcttttagtgagttaatcgatccccttgatcaacgtcagcggcttgaggctcagcaagcacgccgtcaggctggggaccttgaggctcatggggttgatgaggatttccttcaggctcttgaggtgggcatgccccctaccggtggcttgggtattggcatcgatcgcttagtgatgttgtttaccgatagcccttcaatacgtgatgtgattgctttccctctgcttcgaccggagctcaaaacttaa

SEQ ID NO: 44975 - protein, 508 aa, Prochlorococcus marinus
MARSVLSALSELRETRLEKAQALKELGNGPYALRFESSHSTANLQADHADLAKGEERLLTVSVAGRVMTRRVMGKLAFYTLADETGTIQLYLEKATIDAAASNELASGTFVQLTTLVDAGDWIGVTGVLRRTDRGELSVKVQQWQILSKSLQPLPDKWHGLADVEKRYRQRYLDLIVSPQSRETFRRRALMVSAIRRWLDDRAFLEIETPVLQAEAGGAEARPFITHHNTLDLPLYLRIATELHLKRLVVGGFERVYELGRIFRNEGMSTRHNPEFTSVEVYQAYADYIDMMVLTEQLISSVCTQICGSTRITYQGIEIDLTPPWRRASMHELVQEATGLDFMGFKDLAVAASAMARVGLEVPSKADSVGRLLNEAFEQAVEVSLIQPTFVLDYPIEISPLARQHRSKPGLVERFELFIVGRETANAFSELIDPLDQRQRLEAQQARRQAGDLEAHGVDEDFLQALEVGMPPTGGLGIGIDRLVMLFTDSPSIRDVIAFPLLRPELKT

SEQ ID NO: 44976 - DNA, 1503 bp, Pseudomonas putida; identical to SEQ ID NO: 30395
  CDS (1)..(1503): transl_table=11

SEQ ID NO: 44977 - protein, 500 aa, Pseudomonas putida; identical to SEQ ID NO: 30396

SEQ ID NO: 44978 - DNA, 1497 bp, Rhizobium meliloti; identical to SEQ ID NO: 30399
  CDS (1)..(1497): transl_table=11

SEQ ID NO: 44979 - protein, 498 aa, Rhizobium meliloti; identical to SEQ ID NO: 30400

SEQ ID NO: 44980 - DNA, 1503 bp, Shewanella oneidensis; identical to SEQ ID NO: 30401
  CDS (1)..(1503): transl_table=11

SEQ ID NO: 44981 - protein, 500 aa, Shewanella oneidensis; identical to SEQ ID NO: 30402

SEQ ID NO: 44982 - DNA, 2075 bp, Solanum lycopersicum
  CDS (90)..(1856)
atcaacttgtgtttaatcctggattaactacttgcataatcaaccctctactaatttcatcaaattgctaagtctaactatagtgactgatggattcatctgtttcaacagagccactaagcaagaatgctcttaagagagaaaagaaggcaaaggaaaaggagcaacttgaacaggaaaagaaggcagcagcagtagctaaaaggcaaatggagcaacacaatttacctgagaatgatgatttggatcctactcaatacttggcgaacagattgaggaacattgagtcgttgagagaatctggaatcaatccatatccacataagttcttcattacaatgtctattcctgaatttattagcagatatgctcatctaaatactggagagtttcctgaagacattgatatgtccttagcagggagagtgataagcaagcgagcatcatcgtcaaaactctatttctatgaactgcttggtggtggggcgagagtacaagtactggctagtgcaagggattctgatgtggatgctgttcagttttctaattatcagtctggagtgaagcgaggtgacatcattggtgtccgcggatatcctggaaagagtaagagaggagagctaagtatctttgcaaaaccttttatagttctagccccttgcctacacatgttaccgaggcggctgacctcctctatcgtagatgaaactcggacacagaatttccaaggaataacagcttatgatacttggactccaggagatctgagaaaccccgagtcttatgtgttaagggatcaggaaactcggtatcgtcaaaggtacttagatctaatgatgaatccagaagttcgagctttgtttaggactcgcgccagaatcatttcttacatcaggagtttcctcgataatcttgagtttctggaggtggagacaccttctatgaatttgacagctggaggagcttcagccagaccatttatcactcaccataacgagttggacacagaactcctcatacgtgtttcccccgagctttatcttaagaagttagttgttggtggattcgaccgtgtttatgagctggggaagcatttcaggaatgaaggaatggatttaactcactctcctgagttcacaatgtgtgaactttatatggcttacgctgattacaacgatttgatggatttgacagagcagctactatcaggtatggtgaaggacctaaccggaagctataaaataaggtaccatgctaatggcttggataatgaaccgatagaaattgatttcactcctccattcagaaagattgatatgttgtcggagttggagaaagtggctaacatcagtatacctagagatctatcgagtgaaagtgctaacaagcacttggtagatgtatgtgagaagttcgatgtcaaatgccctccacctcataccacaacacgattactcgataagctagttggtcattttattgaagtaaactgcataaatcccacttttattatcaaccatcctgagatcatgagcccactggctaaatcacgcagatcagaacctggtttgactgagcgcttcaacttattcgttaacagaagagagctatgtgatgcctatactgaactaaatgatcctacagcacagagagaacgctttgctgaacaattaaaggacagacaattaggagacgacgaggcaatggatttggatgaatcctttataactgcattggagtatggattaccccctactggtggactaggcatggggattgatagacttacaatgttgcttacagattcacaaaatgtcaaggaagttatcctctttccagccatgagattacaatgaaagaatataacaagtggttcgagcaatcgcgtgttttctccttcatgatcaagtttgattgagcaattttaaataagaactttcataattagttcccagaatttgtttagaattttcatttacttgtatctcaatgtaaaatatgaactcaatgttactatattaaagattttacttctttttgtttctgaaaaaaaaaaaaaaaaaaaaaaaaaaaaa

SEQ ID NO: 44983 - protein, 588 aa, Solanum lycopersicum; identical to SEQ ID NO: 30404

SEQ ID NO: 44984 - DNA, 1488 bp, Staphylococcus aureus
  CDS (1)..(1488): transl_table=11
atgtcagaagaaatgaatgaccaaatgttggttcgacgtcaaaaattacaagaattatatgatcttggtatagacccgtttggttctaaatttgaccgttcaggtttatctagtgatttgaaagaagagtgggaccagtattctaaagaagaattggtagaaaaagaagcggatagtcatgtcgctatagctggacgattaatgactaagcgtggtaaaggtaaagcaggatttgcacacgttcaggacttagctggacaaattcaaatttacgttcgtaaagatcaagttggcgatgacgaatttgatttatggaaaaatgctgatttaggcgatatcgttggtgttgaaggtgtaatgttcaaaacaaatactggcgaattatcggttaaagcgaagaaattcacgctactaactaaatcattgcgaccattaccggataaattccacggtttacaggatattgaacagagatatcgtcaaagatatttagatttaattacgaacgaagatagcactcgtacatttattaatcgtagtaaaatcattcaagaaatgcgtaattatttaaataataaaggtttcttggaagtagaaacacctatgatgcaccaaattgctggtggagcagctgctagaccatttgtaacacatcataatgcattagatgcaacgttatacatgcgtattgctattgagttgcatttaaaacgtttaattgtcggtggacttgaaaaagtatatgaaattggtagagtattccgtaatgaaggtgtatcaactagacataaccctgaattcacaatgattgaattatatgaagcatatgcagattatcatgacattatggatttaacagaatctatggtgagacatattgccaatgaagtgttaggttctgcaaaagtacaatacaatggggaaacgattgatttagaatctgcttggactcgtttgcatattgttgatgctgtaaaagaagctactggtgtagatttttatgaagttaaaagtgatgatgaagctaaagctttagctaaagaacatggtattgaaattaaagatacaatgaaatatggtcatattttaaatgaattctttgagcaaaaagttgaagaaacacttattcagccaacgtttatctatggtcatccgactgaaatttcacctttagcgaagaaaaatcctgaagatcctagatttactgatcgtttcgaattgttcattgtaggtagagagcatgcaaatgcatttactgaattaaatgatcctattgatcaaaaaggtcgttttgaagcgcaacttgttgaaaaagcgcaaggtaatgatgaagcgcatgaaatggatgaagattacattgaagcgttagaatatggtatgcctccgacaggtggtcttggtatcggtattgacagattggttatgttattaactgactctccatcaatcagagacgtattattattcccttatatgagacaaaaataa

SEQ ID NO: 44985 - protein, 495 aa, Staphylococcus aureus
MSEEMNDQMLVRRQKLQELYDLGIDPFGSKFDRSGLSSDLKEEWDQYSKEELVEKEADSHVAIAGRLMTKRGKGKAGFAHVQDLAGQIQIYVRKDQVGDDEFDLWKNADLGDIVGVEGVMFKTNTGELSVKAKKFTLLTKSLRPLPDKFHGLQDIEQRYRQRYLDLITNEDSTRTFINRSKIIQEMRNYLNNKGFLEVETPMMHQIAGGAAARPFVTHHNALDATLYMRIAIELHLKRLIVGGLEKVYEIGRVFRNEGVSTRHNPEFTMIELYEAYADYHDIMDLTESMVRHIANEVLGSAKVQYNGETIDLESAWTRLHIVDAVKEATGVDFYEVKSDDEAKALAKEHGIEIKDTMKYGHILNEFFEQKVEETLIQPTFIYGHPTEISPLAKKNPEDPRFTDRFELFIVGREHANAFTELNDPIDQKGRFEAQLVEKAQGNDEAHEMDEDYIEALEYGMPPTGGLGIGIDRLVMLLTDSPSIRDVLLFPYMRQK

SEQ ID NO: 44986 - DNA, 1491 bp, Streptococcus agalactiae serotype III
  CDS (1)..(1491): transl_table=11
atgtctaaccaacatattgaagaattaaatgaccaacagattgttcgtcgtgaaaaaatggctgctttgactgaacaaggcattgatccttttggtaaacgatttgaacgtacagcaacatctggtcaattaaatgaaaaatacgctgacaaatcaaaagaagacttgcacgacattgaagaaactgctacaatcgctggtcgtttaatgactaagcgcggtaaggggaaagttggctttgcgcatatccaagatcgcgaaggtcaaattcaaatttatgtccgtaaagattctgttggcgaagaaaactacgaaatctttaaaaaagctgatttaggtgacttccttggtgttgaagggcaagtaatgcgtacagatatgggagaactttctatcaaggctactcatattactcacctttcaaaagcactccgtccacttcctgaaaaattccacggcctaactgatattgaaacaatctatcgtaaacgtcatcttgatttaatctcaaatcgtgacagctttgaccgttttgtaacacgctcaaaaatcatttcagaaattcgtcgctttatggatagcaatggtttcttagaggttgaaacacctgttcttcataatgaagctggtggtgcttctgctcgcccatttatcacacatcacaatgcacaagacattgacatggttcttcgtatcgcaactgaattgcatctaaaacgtcttattgtaggtggtatggagcgtgtttatgaaatcggacgtattttccgtaatgaagggatggatgcaacccacaatccagagttcacatctattgaagcctaccaagcctatgctgactaccaggatattatggacttgacagaaggtattatccagcatgttacaaaaactgtaaaaggtgatggaccaattaattatcaaggcacagaaattaaaattaatgaaccattcaaacgtgttcatatggttgatgcggttaaagaaatcactggtattgacttctggaaagaaatgactcttgaagaagcacaagctttggcacaagaaaaaaatgttccgcttgaaaaacatttcacaacagttggtcacatcattaatgccttcttcgaagaatttgttgaagacactttaattcaaccaacttttgtctttggtcatccagttgaagtgtctccacttgctaagaaaaatgatacagaccctcgttttacagaccgtttcgaactctttatcatgactaaagaatacgctaatgcttttacagaattaaatgacccaattgatcagctatctcgctttgaagcacaagcatctgctaaagaacttggcgatgatgaagcaactggagttgattacgattatgttgaagcacttgaatatggtatgccacctactggtggactaggtattggtatcgaccgtctctgtatgctgttaactgatacaacaactatccgagacgtcctacttttccctacaatgaaataa

SEQ ID NO: 44987 - protein, 496 aa, Streptococcus agalactiae serotype III
MSNQHIEELNDQQIVRREKMAALTEQGIDPFGKRFERTATSGQLNEKYADKSKEDLHDIEETATIAGRLMTKRGKGKVGFAHIQDREGQIQIYVRKDSVGEENYEIFKKADLGDFLGVEGQVMRTDMGELSIKATHITHLSKALRPLPEKFHGLTDIETIYRKRHLDLISNRDSFDRFVTRSKIISEIRRFMDSNGFLEVETPVLHNEAGGASARPFITHHNAQDIDMVLRIATELHLKRLIVGGMERVYEIGRIFRNEGMDATHNPEFTSIEAYQAYADYQDIMDLTEGIIQHVTKTVKGDGPINYQGTEIKINEPFKRVHMVDAVKEITGIDFWKEMTLEEAQALAQEKNVPLEKHFTTVGHIINAFFEEFVEDTLIQPTFVFGHPVEVSPLAKKNDTDPRFTDRFELFIMTKEYANAFTELNDPIDQLSRFEAQASAKELGDDEATGVDYDYVEALEYGMPPTGGLGIGIDRLCMLLTDTTTIRDVLLFPTMK

SEQ ID NO: 44988 - DNA, 1503 bp, Sulfolobus acidocaldarius; identical to SEQ ID NO: 30409
  CDS (1)..(1503): transl_table=11

SEQ ID NO: 44989 - protein, 500 aa, Sulfolobus acidocaldarius; identical to SEQ ID NO: 30410

SEQ ID NO: 44990 - DNA, 1738 bp, Thermus thermophilus
  CDS (124)..(1602): transl_table=11
agatctccgacgcctcgcccatgggcaaggcccttttgggccaccgggtgggggacgtgctctccctggacacccccaagggcaagcgggagttccgggtggtggccatccacggctgagaccatgaacgaccagacccgccagcgcctgctcaacctggaagccttggtggaggcggggtttgccccctacccttaccgcttccccaagacccacagcgccgaggccatcctcaaggccaagcggggcgccccccctgagtccgagtggccggaggaggaggtggccgtggccgggcgcctcgtggccttgaggcgcatgggcaaggtgaccttcgcccacctcctggacgagacggggaggatccagctctacttccagagggacctcacgcccaaatatgagctcctcaagaagctggacgtgggggacatcctgggggtgagggggcaccccttcaccaccaagacgggggaggtgacggtcaaggtcctggactggacgcccctggtcaagagcctccaccccctccccgacaagtggcacggcctccgggacaaggaggtccgctaccgccagcgctatctggacctcatcgtcaaccccgaggtgcgggaggtcttccgccgccgctcggagatcgtccgctacatccggcgcttttttgaggccaaggggtttttggaggtggagacccccatcctccagcccaccacgggcggggcggaggccaggcccttcaagacctaccacaacgccctagaccacgagttctacctccgcatctccttggagctctacctcaagcgcctcctcgtcggggggtacgagaaggtctttgagatcgggcgcaacttccgcaacgagggcattgaccacaaccacaatcccgagttcaccatgctggaggcctactgggcctacgccgactaccaggacatggcgggcctggtggaggagctcctttcgggcctcgtcctccaccttttcgggagccacgaggtcccctaccaggggcgggtgctgaacttcaagccgcccttcaggcgcatctccttcgtggaggccctgaaggagaaggcgggccttccctttgaccccctggacctggagcgcctcaggctctgggccgacgcccaccaccccgagctttcccaggtgccgaactataagcttctggacaagcttttcggcatctacgtggagcccgagctccaggatcccacctttgtctttgacttccccctggccatcagccccctggccaagcggcaccgggagaagccgggcctcgtggagcgctgggacctctacgccggggggatggagcttgccccctgttactccgagctcaacgaccctttggaccagagggagcgcttcctggagcaggcgaggcgccgcaaggagggggacgaggaggcccccgagcccgacgaggacttcctcctggccctggagtacgggatgcccccggcggcgggcctgggcctcgggatagaccgcctcgccatgctcctcaccgaccagccctctctaagggacgtcctcctcttccccctcctcaagcccaagaaggaggcggtggaagaaggggtctaaatggccgaaggcgccgcccggttgagcctcgtcgtcgccctcctcgtcttggggctcaaggccttcgcctaccttctcacgggctcggtggccctgctctcggacgccctcgagtccctggtgaacgtggccgcgg

SEQ ID NO: 44991 - protein, 492 aa, Thermus thermophilus; identical to SEQ ID NO: 30418

SEQ ID NO: 44992 - DNA, 1500 bp, Thermoanaerobacter tengcongensis; identical to SEQ ID NO: 30419
  CDS (1)..(1500): transl_table=11

SEQ ID NO: 44993 - protein, 499 aa, Thermoanaerobacter tengcongensis; identical to SEQ ID NO: 30420

SEQ ID NO: 44994 - DNA, 1533 bp, Vibrio cholerae
  CDS (1)..(1533): transl_table=11
atgactgatgctgttcaaaacgagattaatcaagagcaaatcgcgcaagaagaaaacaaactgattgcagagcgtcgcagcaagttggatcacatccgcaagaactgtaaagcaaacgggcacccaaactcgttccgtcgcgacagcctagcgggtgatctgcagaagaagttcggtgaaaagagtaaagaagaactggaagcgctcaatcacgtggtgtctatcgctggtcgtgtgatggcaaaacgtggcccattcttggtgattcaagaaacctctggccgcattcaggcttatgcatcgaaagaagtgcaacaagagctgaaagacaaataccaaggtttggatatcggtgacatcatcggtgtgcaaggtgccctgcacaaatccggtaaaggcgatttgtacgtcaacatggaacaattccaactgctgaccaaagcactgcgcccgctgccagagaaattccacggtctgactgaccaagaaatgcgttaccgccagcgttacgttgacctgatcgtcaacgaaaactctcgcaacgctttcattgtacgttctaaggtgatgtcagctattcgtaacttcatgatctcaaaacagttcatggaagtggaaacgccgatgatgcatgtgatccctggtggtgcgagtgcgcgcccattcatcacgcaccacaacgcgctcgacatgccgatgtacctgcgtatcgcgcctgagctgtacctgaagcgtctggttgtcggtggttttgatcgtgtattcgaaatcaaccgtaacttccgtaacgaaggtctttctccacgtcacaacccagaattcaccatgatggaattctatatggcgtacgcggactataaagatctgatggatctaacggaagagctgctcagctctgtagcgttagaagttctcggttcaacctccatgccttacggtgagcataccgttgaatttggtggtaaatacgcgcgtatgagcatgtttgatgcaatcaagcactacaacccaaatcacgcgcagatccaagctctcaccgaagaagacatccaaaaccgtgacctcatggtttctatcgcgaaatccgttcacgttgatgtggagcctttctggacctgtggtcagcttctcgaagagatctttggtgaaacggctgagccgaaactgatgcagccaactttcatcactggctacccagcagatatctctccactggcacgtcgtagcgatgacaacccgttcttcactgaccgctttgagttcttcatcggtggccgtgaagtggcaaacggcttctcagagctgaacgatgctgaagaccaagatgcgcgtttcaaagcccaagtggaagcgaaagagtctggtgatgatgaagccatgttctatgatgccgactacattaccgctttagagcacggcttaccgccaacagcgggtcaaggtattggtattgatcgtctggttatgctcctgaccaatactcacactatccgtgatgtgattttgttcccagcgatgcgccctcagcaataa

SEQ ID NO: 44995 - protein, 510 aa, Vibrio cholerae
MTDAVQNEINQEQIAQEENKLIAERRSKLDHIRKNCKANGHPNSFRRDSLAGDLQKKFGEKSKEELEALNHVVSIAGRVMAKRGPFLVIQETSGRIQAYASKEVQQELKDKYQGLDIGDIIGVQGALHKSGKGDLYVNMEQFQLLTKALRPLPEKFHGLTDQEMRYRQRYVDLIVNENSRNAFIVRSKVMSAIRNFMISKQFMEVETPMMHVIPGGASARPFITHHNALDMPMYLRIAPELYLKRLVVGGFDRVFEINRNFRNEGLSPRHNPEFTMMEFYMAYADYKDLMDLTEELLSSVALEVLGSTSMPYGEHTVEFGGKYARMSMFDAIKHYNPNHAQIQALTEEDIQNRDLMVSIAKSVHVDVEPFWTCGQLLEEIFGETAEPKLMQPTFITGYPADISPLARRSDDNPFFTDRFEFFIGGREVANGFSELNDAEDQDARFKAQVEAKESGDDEAMFYDADYITALEHGLPPTAGQGIGIDRLVMLLTNTHTIRDVILFPAMRPQQ

SEQ ID NO: 44996 - DNA, 1518 bp, Vibrio parahaemolyticus; identical to SEQ ID NO: 30421
  CDS (1)..(1518): transl_table=11

SEQ ID NO: 44997 - protein, 505 aa, Vibrio parahaemolyticus; identical to SEQ ID NO: 30422

SEQ ID NO: 44998 - DNA, 1533 bp, Vibrio vulnificus; identical to SEQ ID NO: 30423
  CDS (1)..(1533): transl_table=11

SEQ ID NO: 44999 - protein, 510 aa, Vibrio vulnificus; identical to SEQ ID NO: 30424

SEQ ID NO: 45000 - DNA, 1533 bp, Vibrio vulnificus
  CDS (1)..(1533): transl_table=11
atgactgatgctgttcaaaacgaaactgtacaagaagcctctgcacaagaagagaataagctcattgctgaacgccgcgcaaaattggatcaaatccgaaagagctgcaaagcaaatggccacccaaacgacttccgtcgtgacagcctagctggcgaccttcaaaaagagttcggtgaaaagagtaaggaagagctagaagcacttaaccacgttgttgctattgcgggtcgtgttatggcgaaacgtggtccattcttggtgatccaagaaacttctggtcgtatccaggcttacgcggacaaagatgtacaaaaagtattgaaagacaaataccaaggtcttgatatcggtgacatcatcggtgtgaaaggtgcgctgcacaaatctggcaaaggcgacctatacgtaaacatggaagagtacgagttgctaactaaagcacttcgtccactgccagagaagttccacggtctcactgaccaagaaatgcgttaccgtcagcgttatgttgacctcatcgtgaatgaagattctcgtaatgcgtttgtagtacgttcaaaagtgatgtcggcaatccgtaatttcatgatctctaaacagttcatggaagttgaaacgccaatgatgcacgtgatccctggcggtgcgagtgcgcgtccattcatcacgcatcacaatgcgttagacatgccaatgtacctacgtattgcgccagagctatacctgaagcgtctagttgttggtggttttgatcgcgtattcgaaatcaaccgtaacttccgtaacgaaggtctttctccacgtcacaaccctgaattcactatgatggaattctacatggcgtacgcagactataaagatctgatggacctaactgaagagctactaagctcggtggctttagaagttctaggttcaacgtcaatgccttacggtgagcatactgttgagtttggtggcacatacactcgcatgagcatgtttgaagcaatcaagcactacaacccagaccacgcgcaaatccaagcgctaacggaagaagacattcaaaaccgtgacctaatggtttctatcgcgaaatcggttcacgtagaagtcgaacctttctggacatgtggtcagcttcttgaagagatctttggtgaaacagcagaacctaagctaatgcagccaacgttcatcactggctacccagcagatatctctccactggctcgtcgtagcgatgacaacccgttcttcacagaccgctttgagttcttcatcggtggccgtgaagtggcgaacggtttctctgagcttaacgatgcagaagaccaagacgcacgtttcaaagcacaggttgaagcgaaagagtcgggtgatgacgaagccatgttctacgatgcagactacatcacagcactagagcacggcctaccaccgactgctggtcaaggtatcggcatcgaccgtctagtgatgctactgaccaacacgcacacgattcgtgacgttattctattcccagcgatgcgtcctcaggcgtaa

SEQ ID NO: 45001 - protein, 510 aa, Vibrio vulnificus
MTDAVQNETVQEASAQEENKLIAERRAKLDQIRKSCKANGHPNDFRRDSLAGDLQKEFGEKSKEELEALNHVVAIAGRVMAKRGPFLVIQETSGRIQAYADKDVQKVLKDKYQGLDIGDIIGVKGALHKSGKGDLYVNMEEYELLTKALRPLPEKFHGLTDQEMRYRQRYVDLIVNEDSRNAFVVRSKVMSAIRNFMISKQFMEVETPMMHVIPGGASARPFITHHNALDMPMYLRIAPELYLKRLVVGGFDRVFEINRNFRNEGLSPRHNPEFTMMEFYMAYADYKDLMDLTEELLSSVALEVLGSTSMPYGEHTVEFGGTYTRMSMFEAIKHYNPDHAQIQALTEEDIQNRDLMVSIAKSVHVEVEPFWTCGQLLEEIFGETAEPKLMQPTFITGYPADISPLARRSDDNPFFTDRFEFFIGGREVANGFSELNDAEDQDARFKAQVEAKESGDDEAMFYDADYITALEHGLPPTAGQGIGIDRLVMLLTNTHTIRDVILFPAMRPQA

SEQ ID NO: 45002 - DNA, 1521 bp, Xylella fastidiosa; identical to SEQ ID NO: 30433
  CDS (1)..(1521): transl_table=11

SEQ ID NO: 45003 - protein, 506 aa, Xylella fastidiosa; identical to SEQ ID NO: 30434

SEQ ID NO: 45004 - DNA, 1518 bp, Yersinia pestis; identical to SEQ ID NO: 30437
  CDS (1)..(1518): transl_table=11

SEQ ID NO: 45005 - protein, 505 aa, Yersinia pestis; identical to SEQ ID NO: 30438

SEQ ID NO: 45006 - DNA, 1752 bp, Triticum aestivum; identical to SEQ ID NO: 30447
  CDS (1)..(1752)

SEQ ID NO: 45007 - protein, 583 aa, Triticum aestivum; identical to SEQ ID NO: 30448

SEQ ID NO: 45008 - DNA, 1818 bp, Zea mays; identical to SEQ ID NO: 30449
  CDS (1)..(1818)

SEQ ID NO: 45009 - protein, 605 aa, Zea mays; identical to SEQ ID NO: 30450

SEQ ID NO: 45010 - DNA, 1752 bp, Zea mays; identical to SEQ ID NO: 30451
  CDS (1)..(1752)

SEQ ID NO: 45011 - protein, 583 aa, Zea mays; identical to SEQ ID NO: 30452

SEQ ID NO: 45012 - DNA, 23 bp, Artificial sequence
  primer
atgtctgaacaagaaacacgggg

SEQ ID NO: 45013 - DNA, 22 bp, Artificial sequence
  primer
ttatttctgtgggcgcatcgcc

SEQ ID NO: 45014 - protein, 621 aa, Artificial sequence
  consensus sequence
  Variant (2)..(3): Xaa in position 2 to 3 is any amino acid
  Variant (5)..(42): Xaa in position 5 to 42 is any amino acid
  Variant (43)..(77): Xaa in position 43 to 77 is any or no amino acid
  Variant (81)..(84): Xaa in position 81 to 84 is any amino acid
  Variant (86)..(87): Xaa in position 86 to 87 is any amino acid
  Variant (89)..(89): Xaa in position 89 is any amino acid
  Variant (90)..(92): Xaa in position 90 to 92 is any or no amino acid
  Variant (94)..(97): Xaa in position 94 to 97 is any amino acid
  Variant (99)..(103): Xaa in position 99 to 103 is any amino acid
  Variant (104)..(109): Xaa in position 104 to 109 is any or no amino acid
  Variant (111)..(123): Xaa in position 111 to 123 is any amino acid
  Variant (124)..(142): Xaa in position 124 to 142 is any or no amino acid
  Variant (144)..(144): Xaa in position 144 is any amino acid
  Variant (147)..(151): Xaa in position 147 to 151 is any amino acid
  Variant (153)..(159): Xaa in position 153 to 159 is any amino acid
  Variant (160)..(168): Xaa in position 160 to 168 is any or no amino acid
  Variant (172)..(180): Xaa in position 172 to 180 is any amino acid
  Variant (181)..(183): Xaa in position 181 to 183 is any or no amino acid
  Variant (185)..(185): Xaa in position 185 is any amino acid
  Variant (187)..(187): Xaa in position 187 is any amino acid
  Variant (189)..(189): Xaa in position 189 is any amino acid
  Variant (193)..(196): Xaa in position 193 to 196 is any amino acid
  Variant (197)..(228): Xaa in position 197 to 228 is any or no amino acid
  Variant (230)..(231): Xaa in position 230 to 231 is any amino acid
  Variant (232)..(233): Xaa in position 232 to 233 is any or no amino acid
  Variant (235)..(235): Xaa in position 235 is any amino acid
  Variant (237)..(237): Xaa in position 237 is any amino acid
  Variant (241)..(241): Xaa in position 241 is any amino acid
  Variant (244)..(244): Xaa in position 244 is any amino acid
  Variant (248)..(252): Xaa in position 248 to 252 is any amino acid
  Variant (254)..(255): Xaa in position 254 to 255 is any amino acid
  Variant (257)..(258): Xaa in position 257 to 258 is any amino acid
  Variant (260)..(264): Xaa in position 260 to 264 is any amino acid
  Variant (265)..(266): Xaa in position 265 to 266 is any or no amino acid
  Variant (268)..(274): Xaa in position 268 to 274 is any amino acid
  Variant (276)..(276): Xaa in position 276 is any amino acid
  Variant (282)..(287): Xaa in position 282 to 287 is any amino acid
  Variant (291)..(291): Xaa in position 291 is any amino acid
  Variant (293)..(293): Xaa in position 293 is any amino acid
  Variant (296)..(296): Xaa in position 296 is any amino acid
  Variant (301)..(301): Xaa in position 301 is any amino acid
  Variant (303)..(307): Xaa in position 303 to 307 is any amino acid
  Variant (308)..(309): Xaa in position 308 to 309 is any or no amino acid
  Variant (313)..(313): Xaa in position 313 is any amino acid
  Variant (316)..(316): Xaa in position 316 is any amino acid
  Variant (321)..(321): Xaa in position 321 is any amino acid
  Variant (325)..(327): Xaa in position 325 to 327 is any amino acid
  Variant (328)..(328): Xaa in position 328 is any or no amino acid
  Variant (330)..(330): Xaa in position 330 is any amino acid
  Variant (332)..(333): Xaa in position 332 to 333 is any amino acid
  Variant (335)..(335): Xaa in position 335 is any amino acid
  Variant (341)..(344): Xaa in position 341 to 344 is any amino acid
  Variant (351)..(352): Xaa in position 351 to 352 is any amino acid
  Variant (354)..(354): Xaa in position 354 is any amino acid
  Variant (356)..(356): Xaa in position 356 is any amino acid
  Variant (359)..(359): Xaa in position 359 is any amino acid
  Variant (362)..(364): Xaa in position 362 to 364 is any amino acid
  Variant (366)..(367): Xaa in position 366 to 367 is any amino acid
  Variant (370)..(380): Xaa in position 370 to 380 is any amino acid
  Variant (382)..(395): Xaa in position 382 to 395 is any amino acid
  Variant (396)..(409): Xaa in position 396 to 409 is any or no amino acid
  Variant (411)..(447): Xaa in position 411 to 447 is any amino acid
  Variant (448)..(466): Xaa in position 448 to 466 is any or no amino acid
  Variant (468)..(473): Xaa in position 468 to 473 is any amino acid
  Variant (475)..(477): Xaa in position 475 to 477 is any amino acid
  Variant (478)..(478): Xaa in position 478 is any or no amino acid
  Variant (480)..(481): Xaa in position 480 to 481 is any amino acid
  Variant (483)..(484): Xaa in position 483 to 484 is any amino acid
  Variant (488)..(491): Xaa in position 488 to 491 is any amino acid
  Variant (493)..(495): Xaa in position 493 to 495 is any amino acid
  Variant (500)..(510): Xaa in position 500 to 510 is any amino acid
  Variant (511)..(514): Xaa in position 511 to 514 is any or no amino acid
  Variant (518)..(521): Xaa in position 518 to 521 is any amino acid
  Variant (523)..(523): Xaa in position 523 is any amino acid
  Variant (525)..(526): Xaa in position 525 to 526 is any amino acid
  Variant (528)..(530): Xaa in position 528 to 530 is any amino acid
  Variant (535)..(537): Xaa in position 535 to 537 is any amino acid
  Variant (539)..(540): Xaa in position 539 to 540 is any amino acid
  Variant (543)..(544): Xaa in position 543 to 544 is any amino acid
  Variant (546)..(550): Xaa in position 546 to 550 is any amino acid
  Variant (551)..(551): Xaa in position 551 is any or no amino acid
  Variant (553)..(553): Xaa in position 553 is any amino acid
  Variant (554)..(554): Xaa in position 554 is any or no amino acid
  Variant (557)..(558): Xaa in position 557 to 558 is any amino acid
  Variant (559)..(579): Xaa in position 559 to 579 is any or no amino acid
  Variant (581)..(581): Xaa in position 581 is any amino acid
  Variant (583)..(585): Xaa in position 583 to 585 is any amino acid
  Variant (589)..(589): Xaa in position 589 is any amino acid
  Variant (591)..(591): Xaa in position 591 is any amino acid
  Variant (595)..(595): Xaa in position 595 is any amino acid
  Variant (597)..(597): Xaa in position 597 is any amino acid
  Variant (599)..(599): Xaa in position 599 is any amino acid
  Variant (605)..(605): Xaa in position 605 is any amino acid
  Variant (607)..(608): Xaa in position 607 to 608 is any amino acid
  Variant (610)..(612): Xaa in position 610 to 612 is any amino acid
  Variant (613)..(613): Xaa in position 613 is any or no amino acid
  Variant (616)..(616): Xaa in position 616 is any amino acid
  Variant (618)..(618): Xaa in position 618 is any amino acid
RXXKXXXXXXXXXXXXXXXXXXXXXXXXXXXXXXXXXXXXXXXXXXXXXXXXXXXXXXXXXXXXXXXXXXXXXXXXXAGRXXXXRXXGXXXXFXXXXDXXXXXXXXXXXQXXXXXXXXXXXXXXXXXXXXXXXXXXXXXXXXDXGDXXXXXGXXXXXXXXXXXXXXXXGELXXXXXXXXXXXXLXKXLXPLPXXXXXXXXXXXXXXXXXXXXXXXXXXXXXXXXXXXXGXXXXDXEXRYRXRYXDLIXXXXXRXXFXXRXXXXXXXRXXXXXXXFXEVETPXXXXXXGGAXAXPFXTHHNXLXXXXXXXRIAXELXLKRLXVGGXXXXVXEXXRXFRNEGXXXXHNPEFTXXEXYXAYXDYXXXMXXTEXXXXXXXXXXXGXXXXXXXXXXXXXXXXXXXXXXXXXXXXRXXXXXXXXXXXXXXXXXXXXXXXXXXXXXXXXXXXXXXXXXXXXXXXXXXXXXXXXGXXXXXXFXXXXEXXLXXPTFXXXXPXXXSPLAXXXXXXXXXXXXXXXRFEXXXXGXEXXNXXXELNDXXXQXXRFXXQXXXXXXGXXEAXXXXXXXXXXXXXXXXXXXXXXXDXDXXXALEXGXPPTXGXGXGIDRLXMXXTXXXXIRXVXLFP

SEQ ID NO: 45015 - protein, 30 aa, Artificial sequence; identical to SEQ ID NO: 30456
  protein pattern
  Variant (2)..(2): Xaa in position 2 is Phe or Tyr
  Variant (4)..(4): Xaa in position 4 is Phe, Ile, Leu or Val
  Variant (5)..(5): Xaa in position 5 is Ala, Gly, Asn or Ser
  Variant (6)..(7): Xaa in position 6 to 7 is any amino acid
  Variant (13)..(13): Xaa in position 13 is any amino acid
  Variant (14)..(14): Xaa in position 14 is Asp or Ser
  Variant (15)..(16): Xaa in position 15 to 16 is any amino acid
  Variant (23)..(24): Xaa in position 23 to 24 is any amino acid
  Variant (26)..(26): Xaa in position 26 is any amino acid
  Variant (28)..(28): Xaa in position 28 is any amino acid

SEQ ID NO: 45016 - protein, 35 aa, Artificial sequence
  protein pattern
  Variant (2)..(3): Xaa in position 2 to 3 is any amino acid
  Variant (4)..(4): Xaa in position 4 is Phe, Leu or Met
  Variant (5)..(8): Xaa in position 5 to 8 is any amino acid
  Variant (9)..(9): Xaa in position 9 is Phe or Tyr
  Variant (10)..(10): Xaa in position 10 is Ile, Leu, Met or Val
  Variant (12)..(12): Xaa in position 12 is Ala, Ile or Val
  Variant (13)..(13): Xaa in position 13 is Asp or Glu
  Variant (16)..(16): Xaa in position 16 is any amino acid
  Variant (17)..(17): Xaa in position 17 is Leu or Met
  Variant (18)..(21): Xaa in position 18 to 21 is any amino acid
  Variant (25)..(25): Xaa in position 25 is any amino acid
  Variant (27)..(27): Xaa in position 27 is any amino acid
  Variant (30)..(30): Xaa in position 30 is any amino acid
  Variant (33)..(33): Xaa in position 33 is any amino acid
  Variant (35)..(35): Xaa in position 35 is Ala, Asp, Glu, Ser or Thr
RXXXXXXXXXEXXTPXXXXXXGGAXAXPFXTHXNX

SEQ ID NO: 45017 - protein, 26 aa, Artificial sequence
  protein pattern
  Variant (2)..(4): Xaa in position 2 to 4 is any or no amino acid
  Variant (6)..(6): Xaa in position 6 is any amino acid
  Variant (8)..(8): Xaa in position 8 is any amino acid
  Variant (9)..(9): Xaa in position 9 is Ala or Pro
  Variant (11)..(11): Xaa in position 11 is any amino acid
  Variant (12)..(12): Xaa in position 12 is Ala, Gly, Ser or Thr
  Variant (14)..(14): Xaa in position 14 is any amino acid
  Variant (16)..(16): Xaa in position 16 is any amino acid
  Variant (18)..(18): Xaa in position 18 is Ile, Met or Val
  Variant (21)..(21): Xaa in position 21 is Leu or Met
  Variant (22)..(22): Xaa in position 22 is any amino acid
  Variant (24)..(25): Xaa in position 24 to 25 is any amino acid
  Variant (26)..(26): Xaa in position 26 is Ala, Ser or Thr
LXXXEXGXXPXXGXGXGXDRXXMXXX

SEQ ID NO: 45018 - protein, 28 aa, Artificial sequence
  protein pattern
  Variant (4)..(9): Xaa in position 4 to 9 is any amino acid
  Variant (11)..(11): Xaa in position 11 is any amino acid
  Variant (12)..(12): Xaa in position 12 is Ala, Cys, Gly or Val
  Variant (14)..(14): Xaa in position 14 is Ala, Gly or Ser
  Variant (15)..(15): Xaa in position 15 is Phe or Tyr
  Variant (16)..(16): Xaa in position 16 is Ser or Thr
  Variant (21)..(23): Xaa in position 21 to 23 is any amino acid
  Variant (25)..(26): Xaa in position 25 to 26 is any amino acid
  Variant (28)..(28): Xaa in position 28 is Phe, Leu or Met
RFEXXXXXXEXXNXXXELNDXXXQXXRX

SEQ ID NO: 45019 - protein, 15 aa, Artificial sequence
  protein pattern
  Variant (2)..(2): Xaa in position 2 is Ile or Val
  Variant (3)..(3): Xaa in position 3 is Ala or Ser
  Variant (4)..(4): Xaa in position 4 is any amino acid
  Variant (7)..(7): Xaa in position 7 is Phe, His, Trp or Tyr
  Variant (11)..(12): Xaa in position 11 to 12 is any amino acid
RXXXELXLKRXXVGG

SEQ ID NO: 45020 - protein, 18 aa, Artificial sequence
  protein pattern
  Variant (4)..(4): Xaa in position 4 is Ile, Leu or Val
  Variant (5)..(7): Xaa in position 5 to 7 is any amino acid
  Variant (9)..(9): Xaa in position 9 is any amino acid
  Variant (10)..(11): Xaa in position 10 to 11 is any or no amino acid
  Variant (13)..(14): Xaa in position 13 to 14 is any or no amino acid
  Variant (17)..(17): Xaa in position 17 is Ala, Cys, Ser, Thr or Val
  Variant (18)..(18): Xaa in position 18 is Lys or Arg
PTFXXXXPXXXSXXPLXX

SEQ ID NO: 45021 - protein, 11 aa, Artificial sequence
  protein pattern
  Variant (3)..(3): Xaa in position 3 is any amino acid
  Variant (5)..(5): Xaa in position 5 is His or Tyr
  Variant (6)..(6): Xaa in position 6 is Ile, Leu or Val
  Variant (8)..(8): Xaa in position 8 is Ile, Leu or Met
  Variant (9)..(10): Xaa in position 9 to 10 is any amino acid
  Variant (11)..(11): Xaa in position 11 is Asp, Asn, Ser or Thr
YRXRXXDXXXX

SEQ ID NO: 45022 - DNA, 1482 bp, Escherichia coli
  CDS (1)..(1482): transl_table=11
atgtgtttaaagcaaatcattggcagcttgaaaaagaaggttcacatgtcaaacaacattcgtatcgaagaagatctgttgggtaccagggaagttccagctgatgcctactatggtgttcacactctgagagcgattgaaaacttctatatcagcaacaacaaaatcagtgatattcctgaatttgttcgcggtatggtaatggttaaaaaagccgcagctatggcaaacaaagagctgcaaaccattcctaaaagtgtagcgaatgccatcattgccgcatgtgatgaagtcctgaacaacggaaaatgcatggatcagttcccggtagacgtctaccagggcggcgcaggtacttccgtaaacatgaacaccaacgaagtgctggccaatatcggtctggaactgatgggtcaccaaaaaggtgaatatcagtacctgaacccgaacgaccatgttaacaaatgtcagtccactaacgacgcctacccgaccggtttccgtatcgcagtttactcttccctgattaagctggtagatgcgattaaccaactgcgtgaaggctttgaacgtaaagctgtcgaattccaggacatcctgaaaatgggtcgtacccagctgcaggacgcagtaccgatgaccctcggtcaggaattccgcgctttcagcatcctgctgaaagaagaagtgaaaaacatccaacgtaccgctgaactgctgctggaagttaaccttggtgcaacagcaatcggtactggtctgaacacgccgaaagagtactctccgctggcagtgaaaaaactggctgaagttactggcttcccatgcgtaccggctgaagacctgatcgaagcgacctctgactgcggcgcttatgttatggttcacggcgcgctgaaacgcctggctgtgaagatgtccaaaatctgtaacgacctgcgcttgctctcttcaggcccacgtgccggcctgaacgagatcaacctgccggaactgcaggcgggctcttccatcatgccagctaaagtaaacccggttgttccggaagtggttaaccaggtatgcttcaaagtcatcggtaacgacaccactgttaccatggcagcagaagcaggtcagctgcagttgaacgttatggagccggtcattggccaggccatgttcgaatccgttcacattctgaccaacgcttgctacaacctgctggaaaaatgcattaacggcatcactgctaacaaagaagtgtgcgaaggttacgtttacaactctatcggtatcgttacttacctgaacccgttcatcggtcaccacaacggtgacatcgtgggtaaaatctgtgccgaaaccggtaagagtgtacgtgaagtcgttctggaacgcggtctgttgactgaagcggaacttgacgatattttctccgtacagaatctgatgcacccggcttacaaagcaaaacgctatactgatgaaagcgaacagtaa

SEQ ID NO: 45023 - protein, 493 aa, Escherichia coli
MCLKQIIGSLKKKVHMSNNIRIEEDLLGTREVPADAYYGVHTLRAIENFYISNNKISDIPEFVRGMVMVKKAAAMANKELQTIPKSVANAIIAACDEVLNNGKCMDQFPVDVYQGGAGTSVNMNTNEVLANIGLELMGHQKGEYQYLNPNDHVNKCQSTNDAYPTGFRIAVYSSLIKLVDAINQLREGFERKAVEFQDILKMGRTQLQDAVPMTLGQEFRAFSILLKEEVKNIQRTAELLLEVNLGATAIGTGLNTPKEYSPLAVKKLAEVTGFPCVPAEDLIEATSDCGAYVMVHGALKRLAVKMSKICNDLRLLSSGPRAGLNEINLPELQAGSSIMPAKVNPVVPEVVNQVCFKVIGNDTTVTMAAEAGQLQLNVMEPVIGQAMFESVHILTNACYNLLEKCINGITANKEVCEGYVYNSIGIVTYLNPFIGHHNGDIVGKICAETGKSVREVVLERGLLTEAELDDIFSVQNLMHPAYKAKRYTDESEQ

SEQ ID NO: 45024 - DNA, 2008 bp, Sorghum bicolor
  CDS (111)..(1607)
  misc_feature (5)..(5): n is a, g, c or t
cgggnccgcacgagggtccaccacctgccctgctcgggtgctctctttcttcccattctccagccgccgcggcgacgcgcagacctagcactaccagagaaacacccgagatggcgatggctctgcgccgcctcgcgggcgtgtccggctcgccgtcggcctccgctgccgcggccgcgctgctactccggccggcgctgacccgcccgatctccaccggcttccgcgaggagcgcgacaccttcggtcccatccaagtccccaacgacaagctgtggggcgcgcagacgcagaggtcgctgcagaacttcgacattggcggggagcgcgagaggatgcccgtgcccatcatccgcgcttttggcgtgctaaaaaaatgcgccgctaaggtgaatatggagtatggtctggatccaacaatagggaaggccataatgcaggcagctgaggaggtcgcagagggaaagttggatgatcacttcccacttgttatctggcaaactggcagtggcacgcaaagcaacatgaatgccaatgaggtaattgcaaatagggcagccgagatccttggacacaagcgcggtgagaagtttgtgcacccaaatgatcatgtgaataggtcacaatcttcaaatgatacatttcccactgtaatgcatatagcagcggccgttgagctcgaggcgaggtttatcccaagtttgcaacagttgcatgattcacttcattcaaaaactgttgagtttaaagacataattaaaattggacgtacacatacccaagatgccaccccgttgactcttggccaagaattcagtggttacactacacaggtcaaatatggaattgaccgtattaattgtacattacctcggatgtaccagcttgctcaaggtggaactgcagttggaactggcttgaacactaagaaaggatttgatgtcaaaatagctgctgcagtggctgaggaaacaaacctaccctttgtgacagcagagaacaagtttgaagctttggcagcgcatgacgcttttgtcgagagcagtggcgcggtaaatacaatttctgcatctcttatgaagatagcaaatgacatacgcttgctaggaagtggtcctcgatgtggtcttggtgaactaatcctaccagaaaatgagcctgggagcagcattatgcctggaaaagttaatccaacccagtgcgaagctctgacaatggtttgtgctcaggttatgggtaatcatgttggtgttacagttggtggtgcaaatgggcattttgaactgaatgtttttaagccaatgatagcagccggattgcttcgatcattgaggttgttaggggatgcatctgtgtccttcgagaaaaattgtgtcaggggaattcaagcaaaccataagagaatttcacaacttttgcatgagtctctgatgttggtgacatctttgaaccctaaaattggctatgacaatgctgcagctgttgctaagaaagcccacaaagaaggaaccacgttgaagaaagctgcattagaccttggagtattaacggagcaagaattccatgaacttgttgtcccagagaaaatgatcggtccttctgattgataaccccatgttcattatgtttctttaaagcattcaggttgccacatccggagttctggtggtttcctgtgatgccaacttaatgattctagtgcacccgtaaataaaccaaataatttttcatatggtcattaggtcctctccacactggagaaatgatttttgcatggcggatggtacctgagaaaacaattgtacgcttgttccaataggacaatagggcactttgatggatgaggcaccttccattctcctggcatcggtcaagcttttgttgccaggtagctaatgctatgtaataagtgacatggcaaccatgtctagaaactatttgcattggtctttgacaagtggaagtagaaatatacccgagttttagttctttttaccgattttgagct

SEQ ID NO: 45025 - protein, 498 aa, Sorghum bicolor
MAMALRRLAGVSGSPSASAAAAALLLRPALTRPISTGFREERDTFGPIQVPNDKLWGAQTQRSLQNFDIGGERERMPVPIIRAFGVLKKCAAKVNMEYGLDPTIGKAIMQAAEEVAEGKLDDHFPLVIWQTGSGTQSNMNANEVIANRAAEILGHKRGEKFVHPNDHVNRSQSSNDTFPTVMHIAAAVELEARFIPSLQQLHDSLHSKTVEFKDIIKIGRTHTQDATPLTLGQEFSGYTTQVKYGIDRINCTLPRMYQLAQGGTAVGTGLNTKKGFDVKIAAAVAEETNLPFVTAENKFEALAAHDAFVESSGAVNTISASLMKIANDIRLLGSGPRCGLGELILPENEPGSSIMPGKVNPTQCEALTMVCAQVMGNHVGVTVGGANGHFELNVFKPMIAAGLLRSLRLLGDASVSFEKNCVRGIQANHKRISQLLHESLMLVTSLNPKIGYDNAAAVAKKAHKEGTTLKKAALDLGVLTEQEFHELVVPEKMIGPSD

SEQ ID NO: 45026 - DNA, 1437 bp, Salmonella enterica subsp. enterica serovar Typhi
  CDS (1)..(1437): transl_table=11
atgtcaaacaacattcgtatcgaagaagatctgttgggtaccagggaagttccagctgaagcctactatggtgttcacactctgagagcgattgaaaacttctacattagcaataacaaaatcagcgacatccctgaatttgtgcgtggcatggttatggtaaaaaaagcggcggcgctggccaacaaagagctgcaaaccattcctaagagtgtggcgaatgccatcattgccgcatgtgatgaagtccttaacaacggtaagtgcatggaccagttcccggtagatgtctaccagggcggcgcgggcacttccgtcaacatgaataccaacgaagtgctggccaacatcgggctggaactgatgggtcatcagaaaggtgaatatcagtacctgaacccgaacgaccacgtgaataaatgtcaatccactaacgacgcctatccgacaggcttccgtgtagcggtttacgcctctatcgtcaaactgatcgatgccatcaaccagttgcgtgaaggtttcgaacgtaaagcggttgaattccaggacatcctgaaaatgggtcgtacccagttgcaggacgccgtaccgatgacgcttggtcaagaattccgtgcgttcagcattctgctgaaagaagaagtgaaaagcatcgagcgtactgctgagctgctgctggaagtcaaccttggcgcaacggcaatcggtactggtctgaacacgccgaaagaatactctccgctggcggtgaaaaaactggctgaagtcactggtttcgcctgtgttccggctgaagatctgattgaggcgacatctgactgtggcgcgtatgttatggttcacagcgcgctgaaacgtctggcagtgaagatgtccaaaatctgtaacgacctgcgcttgctctcttctggtcctcgtgccggcctgaacgagatcaacctgccggaactgcaggcgggctcttccatcatgccagccaaagtgaacccggtagtaccggaagtcgtaaaccaggtatgctttaaagtcatcggtaacgacaccaccgttacgatggcggcggaagccggtcagttgcagttgaacgttatggagccggttatcggtcaggcgatgttcgaatccatccacattctgagcaacgcgtgctacaacctgctggaaaaatgcgttaacggcattaccgcgaataaagaagtgtgcgaagggtacgtttataactccatcggtatcgtcacttacctcaacccgttcatcggccaccacaacggcgacatcgtcggtaaaatctgtgctgaaaccggtaagagcgtacgtgaagttgtgctagagcgcggcctgttaacggaagccgagctggacgatattttctccgtacagaacttgatgcacccggcttataaagctaaacgttatactgatgaaagcgaacagtaa

SEQ ID NO: 45027 - protein, 478 aa, Salmonella enterica subsp. enterica serovar Typhi
MSNNIRIEEDLLGTREVPAEAYYGVHTLRAIENFYISNNKISDIPEFVRGMVMVKKAAALANKELQTIPKSVANAIIAACDEVLNNGKCMDQFPVDVYQGGAGTSVNMNTNEVLANIGLELMGHQKGEYQYLNPNDHVNKCQSTNDAYPTGFRVAVYASIVKLIDAINQLREGFERKAVEFQDILKMGRTQLQDAVPMTLGQEFRAFSILLKEEVKSIERTAELLLEVNLGATAIGTGLNTPKEYSPLAVKKLAEVTGFACVPAEDLIEATSDCGAYVMVHSALKRLAVKMSKICNDLRLLSSGPRAGLNEINLPELQAGSSIMPAKVNPVVPEVVNQVCFKVIGNDTTVTMAAEAGQLQLNVMEPVIGQAMFESIHILSNACYNLLEKCVNGITANKEVCEGYVYNSIGIVTYLNPFIGHHNGDIVGKICAETGKSVREVVLERGLLTEAELDDIFSVQNLMHPAYKAKRYTDESEQ

SEQ ID NO: 45028 - DNA, 1461 bp, Photobacterium profundum
  CDS (1)..(1461): transl_table=11
atgtctcagatgattgatcttgaaaagaatgaagcaactctaaatgttgctactcgcattgaagaagatttacttggtgaacgtcacgttcctgctgacgcttactggggtatccacacacttcgcgctgttgaaaacttcaacatctcaaacactacaatttctgacgttcctgattttgttcgcggtatggttttcactaagaaagcagctgcaatggcgaacaaagagctaggcgctattccttcagaagttggtaactacatcatccaagcatgtgatttaattctagacactggtaagtgtatggatcaattcccgtctgatgtttaccaaggcggtgctggtacgtcagtgaacatgaacacaaacgaagttattgccaaccttgctcttgaactgatgggcaaagacaaaggcgaatacgacgtcgttaaccctaatgatcacgtaaacaaatcgcaatcaactaactgtgcgtacccaacaggcttccgtgttgctgtatacaacagcatcatgacaatgattgaagctattgattacctaaaaggtgctttcgacgcgaaagataaagaattcgcaggcgttctaaagatgggtcgtactcagcttcaagatgctgtaccaatgactgttggtcaagagttccacgcgtactcagttcttcttaaagaagaaatcaaaaaccttaagtacacagcagatcttctacttgaagtgaacttaggtgcaacagctatcggtactggcttaaacgcagcgactggttaccaagaacttgctgttcagcgtcttgctgaaatcactggtctaccatgtacaccagcagaagatttaatcgaagcaacgtctgactgtggcgcatacgtaatgatccacggtgctcttaagcgtactgcagttaaactgtctaagatttgtaacgacttacgtctactttcttctggtcctcgtacaggtttgaacgaactaaacctaccagaaatgcaggctggttcttctatcatgccagctaaagtaaacccagtaattcctgaagtagttaaccaagtttgcttcaaggttattggtaacgacacaacaattactttcgcagcagaagctggtcagcttcagttgaacgtaatggaacctgttatcggtcaagcactgttcgaatctatttcacttctgaaaaacgcttgtgtaactctacgtgataagtgcgtatcgggtatcacagtgaataaagaagtatgtgaaagttacgtatttaactcaatcggtatcgtgacttacctaaacccattcattggccaccacgaaggtgacattgttggtaagatttgtgctgaaacaggtaaaaacgtacgcgaagttgtacttgagcgtggtcttctaacggaagagcaactagacgacatcttctcggtacaaaacctaatgcacccagaatacaaagcgaagcgttataactaa

SEQ ID NO: 45029 - protein, 486 aa, Photobacterium profundum
MSQMIDLEKNEATLNVATRIEEDLLGERHVPADAYWGIHTLRAVENFNISNTTISDVPDFVRGMVFTKKAAAMANKELGAIPSEVGNYIIQACDLILDTGKCMDQFPSDVYQGGAGTSVNMNTNEVIANLALELMGKDKGEYDVVNPNDHVNKSQSTNCAYPTGFRVAVYNSIMTMIEAIDYLKGAFDAKDKEFAGVLKMGRTQLQDAVPMTVGQEFHAYSVLLKEEIKNLKYTADLLLEVNLGATAIGTGLNAATGYQELAVQRLAEITGLPCTPAEDLIEATSDCGAYVMIHGALKRTAVKLSKICNDLRLLSSGPRTGLNELNLPEMQAGSSIMPAKVNPVIPEVVNQVCFKVIGNDTTITFAAEAGQLQLNVMEPVIGQALFESISLLKNACVTLRDKCVSGITVNKEVCESYVFNSIGIVTYLNPFIGHHEGDIVGKICAETGKNVREVVLERGLLTEEQLDDIFSVQNLMHPEYKAKRYN

SEQ ID NO: 45030 - DNA, 1764 bp, Glycine max
  CDS (34)..(1521)
gttattctccggtggctccttccttccttcgccatggcgttctacgtgctctcgcgtcgtttatcagctggatccaactcaacgacgctcctcgccctgcgttttgcttcctcttccagatccttctcctcttccttcagggaagaaagagatacctttggacccattcaagttccctccgacaaattatggggagcacaaactcaaagatcgttgcagaacttcgacatcggtgggccccgcgaacgcatgcccgaacccatcattcgcgcttttggcgtcttgaagaaatgcgctgctaaggtgaacatggagtatggtcttgatcccatcgtgggagaagcaataatgcaagcggcacaagaagtagccgagggaaaactaaacgaacattttcctctcgttgtatggcaaactggcagtggcactcaaagtaacatgaatgctaacgaggttattgcaaaccgagcagcagagattcttggccataagcgcggtgggaagttcgtgcacccaaatgaccatgtcaatagatcgcagtcttctaatgatacattcccaaccgtaatgcacattgcagccacaatggaaataaactcaagactaattcccagcttgaaaaccttacacggtacactaaactcaaagtcaattgaattcaaagatattgtcaagattggacgcactcatactcaagatgcaacacctttgactcttgggcaagagtttagtgggtatactacacaagtgaagtacggtattgatcgagtaattggcactttgccgcacctgtatcagcttgcccagggtggtacagctgtagggactggattgaatacaaagaaggggtttgatgccaagatagcagcagcagtagctgaggaaacaaatctgccttttgttacggcagaaaataagtttgaggccttggctgcccatgatgcttttgttgaaactagtggagcacttaacactattgcggcttctttgatgaagattgctaatgatatacggttgttaggaagtggtccacgctgcggtcttggtgaactcattcttcctgaaaacgaaccaggaagtagtatcatgcctgggaaggttaaccctacccagtgtgaggctttgacaatggtgtgtgcccaggtcattggaaaccatgttgcagttacagtgggtggatcaaatggtcattttgagcttaatgtgttcaagccaatgactgccagttgtctcctgcattcgctgagactgcttggagattcatctgcttcctttgaaaagaattgtgtgagaggcattcaagctaatagggaaagaatttcaaaattactgcatgagtcactgatgctcgtcacatccttaaacccaaaaattggttatgacaaggcagcagcagttgccaagacagcccacaaagaggggtgtactcttaaggaagctgcattgaaactcggagtgctcagctctgaagattttgacaagcttgtggtacctgagaaaatgcttggaccgtctgattgactaactcgcaatgtttttgttctaataattccttgtttcatcatatcggctacatttgaggtagtatttttttagctacacccgttgattggtttgagaaatggcaacccaatgaacaataatttggcttcctcagttgatattcgcgagggaagagttcttccaaatttgtaacgagacaatgtattgcagaaatttactgagccaaataaagggaaattttttattcaaaaaaaaaaaaaa

SEQ ID NO: 45031 - protein, 495 aa, Glycine max
MAFYVLSRRLSAGSNSTTLLALRFASSSRSFSSSFREERDTFGPIQVPSDKLWGAQTQRSLQNFDIGGPRERMPEPIIRAFGVLKKCAAKVNMEYGLDPIVGEAIMQAAQEVAEGKLNEHFPLVVWQTGSGTQSNMNANEVIANRAAEILGHKRGGKFVHPNDHVNRSQSSNDTFPTVMHIAATMEINSRLIPSLKTLHGTLNSKSIEFKDIVKIGRTHTQDATPLTLGQEFSGYTTQVKYGIDRVIGTLPHLYQLAQGGTAVGTGLNTKKGFDAKIAAAVAEETNLPFVTAENKFEALAAHDAFVETSGALNTIAASLMKIANDIRLLGSGPRCGLGELILPENEPGSSIMPGKVNPTQCEALTMVCAQVIGNHVAVTVGGSNGHFELNVFKPMTASCLLHSLRLLGDSSASFEKNCVRGIQANRERISKLLHESLMLVTSLNPKIGYDKAAAVAKTAHKEGCTLKEAALKLGVLSSEDFDKLVVPEKMLGPSD

SEQ ID NO: 45032 - DNA, 2014 bp, Zea mays
  CDS (30)..(1526)
tcgctgtcgacgatttcgtcccacccgagatggcgatggctctgcgccgccttgcgggcgtgtccggatcgccgtcggcctcctctgccgcggccacggtgctactccggtcggcgctgacccgcccgatctccaccggcttccgcgaggagcgcgacaccttcggtcccatccaagtccccaacgacaagctgtggggcgcgcagacgcagagatcgctgcagaactttgacattggcggggagcgtgagaggatgcccgttcccatcatccgtgcctttggcgtgctaaaaaagtgcgccgctaaggtgaatatggactatggccttgatccaacaatagggaaggccataatacaggcagctgaggaggtcgcagagggaaagttggatgatcacttcccacttgttatctggcaaactggcagtggcacacaaagcaacatgaatgccaatgaggtaattgcaaatagggcatctgagatccttggacacaagcgcggtgagaagtttgtgcacccaaatgaccatgtgaataggtcacaatcttcaaatgatacatttcccactgtaatgcatatagcgacggccgttgagatacattcgaggtttatcccaagtttgcaacagttgcatgattcacttcattcgaaaactattgagtttaaagacataattaaaattggacgtacacatacccaagatgccaccccattgactcttggccaagaattcagtggctacactacacaggtcaaatatggaattgaccgcattaattgtacattacctcggatgtaccagcttgctcaaggtggaactgcagttggaactggcttgaacaccaagaaaggatttgatgccaaaatagctgctgcagtggctgaggaaacaaacctaccctttgtgacagcagagaacaagtttgaagctttggcagcacatgacgcttttgttgagagcagtggtgccgtaaatacaatttctgcatctcttatgaagatagcaaacgacatacgtttgctaggaagtggtcctcggtgtggtcttggtgaactaatcctaccagaaaatgagcctgggagcagcattatgcctgggaaagttaatccaacccagtgtgaggctctgacaatggtttgtgcacaggttatgggtaatcatgttggtgttacaattggtggtgccaatgggcattttgaactgaatgtttttaagccaatgatcgcagccggattacttcgatcattgaggttgttaggggatgcatccgtgtcctttgagaaaaattgtgtcaggggaattcaagcaaaccacaagagaatttcacaacttttgcatgagtctctgatgttagtgacatctttgaaccctaaaattggctatgacaatgctgcagctgttgctaagaaagcccacaaagaaggaaccacgttgaaggaagctgcattagaccttggagtattaacggagcaagaattccatgagcttgtcgtcccggagaaaatgattggtccttctgattgataaccccatgttcactatgtttctttgaagcattcaggttgccacatccgcgagttctggtggccctgtgtttccaagttaatgattctagcgcacccataaataaagcaaataatttttcatatggtcattaggtcctcaccgtaccgcactagagaaatgatttttgcatggcggatggtatctgagaaaacagttgtattcttgttcaaatagggagcagtgcactttgattcatgaggcgccttccattatcttggcatcagtcaaccttttcttgccaagtagctagtgctatgtaacaagtgacatggcaaccatgtatagaaattatttgcatgggtttgtgttcttgccaggtagctaatgttatgtaataagtgacaaggaaacaatggcatgaattatttgcattgggtttaaaaaaaaaaaaaaaaaaaaaaaaaaaaaaaaaaaataaaaaaaaaaaaaaaagagaccgacacgca

SEQ ID NO: 45033 - protein, 498 aa, Zea mays
MAMALRRLAGVSGSPSASSAAATVLLRSALTRPISTGFREERDTFGPIQVPNDKLWGAQTQRSLQNFDIGGERERMPVPIIRAFGVLKKCAAKVNMDYGLDPTIGKAIIQAAEEVAEGKLDDHFPLVIWQTGSGTQSNMNANEVIANRASEILGHKRGEKFVHPNDHVNRSQSSNDTFPTVMHIATAVEIHSRFIPSLQQLHDSLHSKTIEFKDIIKIGRTHTQDATPLTLGQEFSGYTTQVKYGIDRINCTLPRMYQLAQGGTAVGTGLNTKKGFDAKIAAAVAEETNLPFVTAENKFEALAAHDAFVESSGAVNTISASLMKIANDIRLLGSGPRCGLGELILPENEPGSSIMPGKVNPTQCEALTMVCAQVMGNHVGVTIGGANGHFELNVFKPMIAAGLLRSLRLLGDASVSFEKNCVRGIQANHKRISQLLHESLMLVTSLNPKIGYDNAAAVAKKAHKEGTTLKEAALDLGVLTEQEFHELVVPEKMIGPSD

SEQ ID NO: 45034 - DNA, 1726 bp, Brassica napus
  CDS (76)..(1554)
ataatttgccattttgtttgccctatcttctgcaactctccaccatctcgtctcccaaggcagaagaagaaccccatggcgatttacgtcgcatcacggcggctttccgccagaacaaccgcggcggcgctgcgttacgccactgctctgagatcttattcgacctcgttcagggaggagagggacaccttcggcccgatccaagttccttccgataagttgtggggagcccagacgcagagatcgctgcagaacttcgagatcggcggcgagcgcgagcgaatgcccgagccaatcgtccgcgcttttggcgtcttgaagaagtgcgctgccaaggttaacatggagtatggacttgatccaactattgggaaagcgattatggaagctgctcaggaagttgctgagggcaaactcaatgatcatttcccccttgttgtttggcaaactggtagtggcactcagagtaacatgaatgctaatgaggtcattgctaacagagcagctgagattcttggtcgcaaacgtggtgaaaaatgtgtccaccctaatgaccatgtcaacagatctcagtcttctaacgacactttccctaccgtcatgcacattgcagctgcaaccgagattaattcaaggctcatccctagtctgaaaactttgcataccactctcgactctaagtccttcgagtttaaagatattgtgaaaattggaagaactcacactcaagatgctactcctttgactctaggacaagaatttggtggctatgctactcaggttaagtatggacttaatcgagtcacatgcactctaccccgcctctatcagcttgcacaaggtggaactgcggttgggacaggattaaacaccaagaaagggtttgatgtaaagatagctgctgcagtagccgaagaaacaaacctgccgtttgtcactgcagaaaacaagtttgaagctctggctgcacatgatgcttgtgttgaaaccagtgggtcacttaacacaatcgccacatcgttgatgaagattgccaatgatatacgttttcttggaagtggtccaagatgtggtcttggtgaacttgttctgcctgaaaatgagccaggaagcagcatcatgcctgggaaggtaaatcctacacagtgtgaggccttgactatggtttgtgctcaggtaatgggcaaccatgtagctgtgacagttggtgagtcaaatggtcatttcgaactgaatgtatttaagccggtgattgcaagcgctctcttgcattccgtgaggttaatagcagatgcttcagcttcgtttgagaaaaactgtgtaaggggtattgaggccaacagagaaaggatctcaaagcttttgcacgagtctcttatgcttgtgacatcattgaatccgaaaatcggatatgacaatgctgcagcagttgccaagaaagctcacaaagaaggatcgacactgaaggaagcggctctgaagttaggtgttcttacttctgaagagtttgatacccttgttgttcccgagaagatgatcggtccctccgattgatgttgagccaaaagcttcattttgccatgttttattcttgataaagaggttgtaatgacaaataagcaaatccccagactcaaattttgcatttggaaggattcaattctttatgtatcacacagttacttttatgttgaataaaagagcaactatgcaaaaaaaaaaaaaa

SEQ ID NO: 45035 - protein, 492 aa, Brassica napus
MAIYVASRRLSARTTAAALRYATALRSYSTSFREERDTFGPIQVPSDKLWGAQTQRSLQNFEIGGERERMPEPIVRAFGVLKKCAAKVNMEYGLDPTIGKAIMEAAQEVAEGKLNDHFPLVVWQTGSGTQSNMNANEVIANRAAEILGRKRGEKCVHPNDHVNRSQSSNDTFPTVMHIAAATEINSRLIPSLKTLHTTLDSKSFEFKDIVKIGRTHTQDATPLTLGQEFGGYATQVKYGLNRVTCTLPRLYQLAQGGTAVGTGLNTKKGFDVKIAAAVAEETNLPFVTAENKFEALAAHDACVETSGSLNTIATSLMKIANDIRFLGSGPRCGLGELVLPENEPGSSIMPGKVNPTQCEALTMVCAQVMGNHVAVTVGESNGHFELNVFKPVIASALLHSVRLIADASASFEKNCVRGIEANRERISKLLHESLMLVTSLNPKIGYDNAAAVAKKAHKEGSTLKEAALKLGVLTSEEFDTLVVPEKMIGPSD

SEQ ID NO: 45036 - DNA, 1860 bp, Glycine max
  CDS (135)..(1622)
gctgaacaaaaatactagactattcatttggggtccaacttggaagaagactgcggaatcgcgtatcctgattggtcagacaagtgttatgctccggtgactccttccttcgccacccccactcaaattcaaccatggcgttgtacgtgctctcgcgtcgtttatcagctggatccaactcaaccacgctcctcgccttgcgttttgtttcctctaccagatcctactcctcttccttcagggaagaaagagatacctttggagccattcaagttccctccgagaaattatggggagcacaaactcaaagatcgttgcagaacttcgatatcggtgggccccgcgaacgcatgcccgaacccatcattcgcgcctttggcgtcttgaagaaatgcgctgctaaggtgaacatggagtatggtcttgatcccgccgttggaaaagcgattatgcaagcggcacaagaagtggccgagggaaaactaaacgaccattttcctctcgttgtatggcaaactggcagtggcactcaaagtaacatgaatgctaacgaggttattgcaaaccgagcagcagagattctttggcataagcggggtgggaagttagtgcacccaaatgaccatgtcaatagatcacagtcttcaaatgatacattcccaactgtaatgcacattgcagccgcaatggaaataaactcaagactaattcccagcctgaaaaccttacatggtacactaaactcaaagtcaattgaattcaaagatattgtcaagattggacgcactcatactcaagatgcaacacctttgactcttggacaagagtttagtgggtatactacacaagtgaagtatggtattgatagagtaattggcactttgccgcacatgtatcagcttgcccagggtgggacagctgtagggactggattgaatacaaagaaggggtttgatgccaaaatagcagcagcagtagctgaggaaaccaatctgccttttgttacggcagaaaataagtttgaggccttggctgcccatgatgcttttgttgaaactagtggagcccttaacactattgcggcttctttgatgaagattgctaatgacatacggttgttaggaagtggtccacgctgcggtcttggtgaactcattcttcctgaaaacgaaccagggagcagtatcatgcctgggaaggttaaccctacccagtgtgaggctttgacaatggtgtgtgcccaggtcataggaaaccatgttgcagttacagtgggtggatcaaatggtcattttgagcttaatgtgttcaagccaatgattgccagttgtctcctgcattcactgagactgcttggagattcatctgcttcctttgaaaagaattgcgtgagaggcattcaagctaacagggaaagaatttcaaaattactgcatgagtcactaatgcttgtcacatccttaaacccgaaaattggttatgacaaggcagcagcagttgccaagacagcccacaaagaggggtgtactcttaaggaagctgcattgaaactcggagtgctcagctctgaagattttgacaagcttgtggtacctgagaaaatgcttggaccatctgattgactggctcgtaatgttttgttctaattattccttgttttatcatcggctacattgaggtagtattttttagccacacccgttgataggtttgagaaatggcaatccaatgaacaataatttggcttcctcagttgatattcgcgagggaagagctcttccaaatttgtaatgagacaatgtattgcagaaatttactgacccaaataaagggaaaatttgtattcaaaaaaaaaaaaaa

SEQ ID NO: 45037 - protein, 495 aa, Glycine max
MALYVLSRRLSAGSNSTTLLALRFVSSTRSYSSSFREERDTFGAIQVPSEKLWGAQTQRSLQNFDIGGPRERMPEPIIRAFGVLKKCAAKVNMEYGLDPAVGKAIMQAAQEVAEGKLNDHFPLVVWQTGSGTQSNMNANEVIANRAAEILWHKRGGKLVHPNDHVNRSQSSNDTFPTVMHIAAAMEINSRLIPSLKTLHGTLNSKSIEFKDIVKIGRTHTQDATPLTLGQEFSGYTTQVKYGIDRVIGTLPHMYQLAQGGTAVGTGLNTKKGFDAKIAAAVAEETNLPFVTAENKFEALAAHDAFVETSGALNTIAASLMKIANDIRLLGSGPRCGLGELILPENEPGSSIMPGKVNPTQCEALTMVCAQVIGNHVAVTVGGSNGHFELNVFKPMIASCLLHSLRLLGDSSASFEKNCVRGIQANRERISKLLHESLMLVTSLNPKIGYDKAAAVAKTAHKEGCTLKEAALKLGVLSSEDFDKLVVPEKMLGPSD

SEQ ID NO: 45038 - DNA, 1401 bp, Dichelobacter nodosus VCS1703A
  CDS (1)..(1401): transl_table=11
atgacagcaactcgtcaagaacatgatttattaggttatcgcgatgttcccgccgatgcatattatggtattcaaacgctccgtggcgttgaaaactttaatatcaccggtgtaaaactccatcaattttcaacctttattcgtgctttagcgacagtgaaaaaagccgcggcaattgccaatcatgaagtgggaattttagatagcaaaattaaggatgctattgttgccgcgtgtgatgaaattattgccgataaattccatgatcattttgtggtagacatgatccaaggcggcgccggcacatcaaccaatatgaatgccaacgaagttattgccaaccgcgctttggaaattttgggacacaaacgcggtgaatatcaatatgttcaccccaataatcacgtcaacctctcgcaatcaaccaacgatgcttatccaaccgcgttgcatatcgctttagatgattattgcgcgcgtttgctcgataaaatggtgattttgcgggacagtttcttgaagaaaagtgaagagtttgccgataaactcaaaatgggacggacgcatttgcaagacgccgttccgatgaccgctgggcaagaattccatgcttttgccacgatgatcagcaaagaaatggaacgcattgaacaaacccgtaatttactttacgaaattaatatgggtgcaaccgctatcggtaccgaattaaacgcgccgaaaggttatgctaaagcctgcgcgcaagcgttagccgatttaaccggtaaaccgtattacacttctaaagatttgattcaagccacgcaagataccagtccttatgcggcgttatcaggaaatttacgtttattggcagcgcggttgtcaaaaattgcgcacgatttgcgtttggaatcttcaggtccgcgcgcgggtttggcgcaatatcgtttgccggaaatgcaacccggtagttctattatgcctggcaaagtcaatcccgtaattccggaagtcgttaaccaaacttgtttccatgtgatgggcattgaccatgctattttattggcgtgcgaatcagggcaattgcaattgaacgtttttgagccagtgatgacgtttaacctctttaccggcattaatatgttagccaatgcttgcgaaactttcgcaaaacgttgcattgacggcattatgctcaatgaagaacattgccgcgaacaagttttatccaatattggtttgatcacagctttaaatcctcatattggttatgaagcttcaaaccgcattgctcgcaaagcgcaagaaaccggcggcagcgtttatgaactggttttggcagaaggtctgctcaaacgcgaagaactcgatcgcatcatcgctccagagaatatggtgcaccccaataaagattaa

SEQ ID NO: 45039 - protein, 466 aa, Dichelobacter nodosus VCS1703A
MTATRQEHDLLGYRDVPADAYYGIQTLRGVENFNITGVKLHQFSTFIRALATVKKAAAIANHEVGILDSKIKDAIVAACDEIIADKFHDHFVVDMIQGGAGTSTNMNANEVIANRALEILGHKRGEYQYVHPNNHVNLSQSTNDAYPTALHIALDDYCARLLDKMVILRDSFLKKSEEFADKLKMGRTHLQDAVPMTAGQEFHAFATMISKEMERIEQTRNLLYEINMGATAIGTELNAPKGYAKACAQALADLTGKPYYTSKDLIQATQDTSPYAALSGNLRLLAARLSKIAHDLRLESSGPRAGLAQYRLPEMQPGSSIMPGKVNPVIPEVVNQTCFHVMGIDHAILLACESGQLQLNVFEPVMTFNLFTGINMLANACETFAKRCIDGIMLNEEHCREQVLSNIGLITALNPHIGYEASNRIARKAQETGGSVYELVLAEGLLKREELDRIIAPENMVHPNKD

SEQ ID NO: 45040 - DNA, 1410 bp, Oryza sativa (japonica cultivar-group)
  CDS (1)..(1410)
atggcgatggtcctgcggcgcctcgcgggcgcgtccgccggtggcgccccgtcgccggcggcggcagcggccgcggccgcgctgctgctccgcccggcgctggctcgcccgatctccaccggcttccgcgaggagcgcgacaccttcggccccatccgagtccccaacgacaagctgtggggcgcgcagacgcagaggtcgctgcagaacttcgacatcggcggcgagcgcgagcggatgccggtgcccatcatccgcgcctttggggtgctcaaaaagtgcgccgctaaggtgaatatggagtatggccttgatccaacaatcgggaaggcaataatgcaggctgctcaggaggttgctgaaggacagttagatgaccactttccacttgttatctggcaaactgggagtggcacacaaagcaacatgaacgccaatgaggttattgcaaatagggccgctgagattcttggacataagcgtggcgagaagtttgtacaccctaatgatcatgtgaacagatcacagtcctcaaatgatacatttcccactgtcatgcacatagcagcagccacagagatcaattcaaggtttgtcccaagcttgcaacagttgcataagtcacttgattcaaaggtgaaatatggaattgatagaattgtttgtaccttaccacggatgtatcagcttgctcaaggtggaactgcagttggaacgggcttgaacactaagaaaggatttgatgtcaaaattgctgctgcagtagctgaggaaacggaactacctttcgtgacagctgagaacaagttcgaagctttggcagcgcatgatgcttttgttgagagcagtggtgctgtaaacacaatttctgcatctcttatgaagatagcaaatgacatacgcttgttaggaagcggcccccgatgtggacttggtgaacttatcctacctgaaaatgagcctgggagcagcattatgcctggaaaagttaaccctacccagtgtgaggccttgaccatggtttgtgctcaggttatgggtaatcatgttggtgtcacagtaggtggttcgaatggacattttgagttgaatgtctttaagccaatgattgcagctggattacttagatcactgagattgctaggggatgcctctgtgtcctttgagaaaaactgtgtcaggggaattcaagcaaaccataagagaatttcacaattattgcacgagtctttgatgttggtgacatctttgaaccctaaaattggctatgacaatgctgcagctgttgctaagaaagcacacaaagaaggaagcacattgaaggaagctgctctagacctcggagtattgacagaatcagaattccatgagcttgttgttccagagaaaatgattggtccttctgattga

SEQ ID NO: 45041 - protein, 469 aa, Oryza sativa (japonica cultivar-group)
MAMVLRRLAGASAGGAPSPAAAAAAAALLLRPALARPISTGFREERDTFGPIRVPNDKLWGAQTQRSLQNFDIGGERERMPVPIIRAFGVLKKCAAKVNMEYGLDPTIGKAIMQAAQEVAEGQLDDHFPLVIWQTGSGTQSNMNANEVIANRAAEILGHKRGEKFVHPNDHVNRSQSSNDTFPTVMHIAAATEINSRFVPSLQQLHKSLDSKVKYGIDRIVCTLPRMYQLAQGGTAVGTGLNTKKGFDVKIAAAVAEETELPFVTAENKFEALAAHDAFVESSGAVNTISASLMKIANDIRLLGSGPRCGLGELILPENEPGSSIMPGKVNPTQCEALTMVCAQVMGNHVGVTVGGSNGHFELNVFKPMIAAGLLRSLRLLGDASVSFEKNCVRGIQANHKRISQLLHESLMLVTSLNPKIGYDNAAAVAKKAHKEGSTLKEAALDLGVLTESEFHELVVPEKMIGPSD

SEQ ID NO: 45042 - DNA, 1419 bp, Pasteurella multocida subsp. multocida str. Pm70
  CDS (1)..(1419): transl_table=11
atgacagtaacaagaaaagaagtggatttactcggagaacgtgaagtaccagcagacgcatactggggaattcataccttaagagcggtagaaaattttaatatttcgaatgccgttatctcagatgtgcctgattttgtacgcggtatggtgatggtgaaaaaggcgaccgccttagcaaacggtgaattaggggcgattcctgataaaattgcaaaagcgattgtagctgcttgtgatgaaatcttaaccacaggcaaatgcttagatcaattcccgtcagatatttatcaaggcggtgcaggtacctcagtgaatatgaataccaatgaggttgtggcgaatttggcgttagagttattaggacataagaaaggggaataccaatatttagatccaatggatcatgttaacgctagccaatcaaccaatgacgcctatccaacaggtttccgtattgctgtctataacagtattatgaagctcgtggcaaaagtgctttatttacaacaaggttttgaaaataaagcaaaagaattttcgcacattcttaaaatgggacgcacgcaattacaagatgctgtgccaatgacagtaggacaagaatttaaagccttctctgttttattagatgaagaagttcgcaatttaacacgtacagcagaatacttattagaagttaatttaggtgcgacagcaattggtacgggcttaaatacaccaaaagggtatgcgccattagcggtcaaatacctgtctgaagtcacaggattaccttgtgtattagctgaaaacttaatcgaagctacctcggattgtggggcgtatgtgatggtacacggtgcattaaaacgtactgcggtgaaactatcaaaagtatgtaatgacttacgtctattatcttcaggtccgcgtgcagggttaaatgagattaatttgcctgaattacaagcgggttcatcgattatgccagcaaaagtcaacccagtggtacccgaagtggttaaccaagtttgctataaagtgatggggaacgatactaccattacctttgccgcagaggctggacaattacaattaaatgtcatggagccagtgattgcacaagcgatgtttgagtctattgatattttaaccaatgcttgtgtgaacttacgcgataaatgtattgatggcattacggtgaataaagaaacttgtgaaaactatgtctttaattctatcggtatcgtgacttatttaaatccatttattggacaccataatggtgacttagtcggtaaaatctgtgcgaaaacagggcgcggagtgaaagaggtcgtactcgaaaaaggactcctcacagaagcagaattagatgatattctctcagtggagaacttaatgaatccaacctataaagcgaagttgaataaataa

SEQ ID NO: 45043 - protein, 472 aa, Pasteurella multocida subsp. multocida str. Pm70
MTVTRKEVDLLGEREVPADAYWGIHTLRAVENFNISNAVISDVPDFVRGMVMVKKATALANGELGAIPDKIAKAIVAACDEILTTGKCLDQFPSDIYQGGAGTSVNMNTNEVVANLALELLGHKKGEYQYLDPMDHVNASQSTNDAYPTGFRIAVYNSIMKLVAKVLYLQQGFENKAKEFSHILKMGRTQLQDAVPMTVGQEFKAFSVLLDEEVRNLTRTAEYLLEVNLGATAIGTGLNTPKGYAPLAVKYLSEVTGLPCVLAENLIEATSDCGAYVMVHGALKRTAVKLSKVCNDLRLLSSGPRAGLNEINLPELQAGSSIMPAKVNPVVPEVVNQVCYKVMGNDTTITFAAEAGQLQLNVMEPVIAQAMFESIDILTNACVNLRDKCIDGITVNKETCENYVFNSIGIVTYLNPFIGHHNGDLVGKICAKTGRGVKEVVLEKGLLTEAELDDILSVENLMNPTYKAKLNK

SEQ ID NO: 45044 - DNA, 1398 bp, Neisseria meningitidis MC58
  CDS (1)..(1398): transl_table=11
atgactgtccgtatcgaacacgatttattgggcgaccgcgagattcccgccgaagtgtattggggcatccacaccctgcgcgccattgaaaactttaaaatctccacacaaaaaatttctgacgtgccgcagtttgtccgcagtatggtgatggtgaaaaaggcgacggcacaggcaaacggtgagttgggcgcggtcaagcccgaaatcgccgccgccattgaaaaagcctgcgacgaagttctgctgaacaaccgctgcctcgaccaattcccgtccgacgtgtatcagggcggtgcgggtacttcggtcaatatgaacaccaacgaagtcatcgccaacctcgcattggaagtcttgggatacgaaaaaggccgctacgacatcgtcaatccgatggatcacgtcaatgccagccaatcgaccaacgatgcctatcccacgggcttccgccttgccgtgtattacagcatcggcgaattgctcgacaaactgactgtcctgaaaaacgcctttgccgccaaagccgaagaatttaaagacgttttgaaaatgggccgcacccagcttcaagatgccgtgccgatgactgccggccaagaattccaatctttccaagtgttgttggaagaagaaatcctcaacctcgaccgcacccgccaactgctgttggaagtcaatttgggcgcaacggcaatcggcacgggcgtgaacacgcccaaaggctacgccgaactggtggtcaaaaaactctccgaagtcagcggcttgccttgcaaactgaccgaaaacctgattgaggcgacctccgactgcggcgcatatgtgatggtacacggcgcattgaagcgcacggcggtcaaactctccaaaatctgcaacgacttgcgcctgctctcttccggcccgcgtgccggcttgaaagaaatcaacctgcccgaattgcaggccggttcttccataatgcccgccaaagtcaatcccgtgattcccgaagtggtcaaccaagtctgcttcaaagtcatcggcaacgacacgacgattaccttcgccgccgaagccgggcaactgcaattaaacgtgatggagccggtcatcgcccaatgtatgtttgaaaccatttccctcttgggcaatgccgcagtcaacctgtccgacaaatgcgtcaaaggcattacggtcaaccgcgaaatctgcgaacgttacgttttcaactccatcggtttggtgacttatctgaatccgtatatcggacaccacaacggcgatttggtcggcaaaatctgcgcccaaaccggcaaaggcgtgcgcgaggttgtcttggaacgcgggctgttgagcgaagaagaactcaaccgcatcctctctcccgagaacctgatgaacccccatctgtaa

SEQ ID NO: 45045 - protein, 465 aa, Neisseria meningitidis MC58
MTVRIEHDLLGDREIPAEVYWGIHTLRAIENFKISTQKISDVPQFVRSMVMVKKATAQANGELGAVKPEIAAAIEKACDEVLLNNRCLDQFPSDVYQGGAGTSVNMNTNEVIANLALEVLGYEKGRYDIVNPMDHVNASQSTNDAYPTGFRLAVYYSIGELLDKLTVLKNAFAAKAEEFKDVLKMGRTQLQDAVPMTAGQEFQSFQVLLEEEILNLDRTRQLLLEVNLGATAIGTGVNTPKGYAELVVKKLSEVSGLPCKLTENLIEATSDCGAYVMVHGALKRTAVKLSKICNDLRLLSSGPRAGLKEINLPELQAGSSIMPAKVNPVIPEVVNQVCFKVIGNDTTITFAAEAGQLQLNVMEPVIAQCMFETISLLGNAAVNLSDKCVKGITVNREICERYVFNSIGLVTYLNPYIGHHNGDLVGKICAQTGKGVREVVLERGLLSEEELNRILSPENLMNPHL

SEQ ID NO: 45046 - DNA, 1407 bp, Campylobacter jejuni subsp. jejuni NCTC 11168
  CDS (1)..(1407): transl_table=11
atgggaacaagaaaagaacatgattttattggggaattggaaatctctgatgaggtttattatggagtgcaaacttttagagctgttgaaaattttgatatttctcatgatagattaaaagattttcctcgctttgttagggctttggctagagtaaaaaaagctgcagctatggcaaatcatgaattaggtcttttggataaaaatatccaagatgcgattattaaagcgtgtgataaaattttagaaggtgggtattatgatcaatttgtagtagatatgatccaaggaggtgctggaacaagtacaaatatgaatgctaatgaagttatagcaaacataggacttgaacttatgggtcataaaaaaggtgaataccaatatcttcatccaaatgatcatgttaatttaagccaaagtactaatgatgcttatcctacagctttacaccttgccttgcatgattatttaagtgatttggcaaaagctatggaacatctaaaaaaagcttatgagagaaaagctgaagaatttaaagatgttcttaaaatgggtagaacccaactgcaagatgctgtacctatgactttaggtcgtgaatttaaaacttttgccgtaatgataggtgaagatatacaaagagtattagaagctagaaaattgattttagagatcaatttgggtggaactgctattggaacaggaattaattctcatcctgattatccgaaggttgtagaaagaaaaataagagaagtgacaggttttgaatatactgtggctgaggatttaatcgaggcgactcaagatacgggagcttatgtacaaatttcaggtgttttaaaacgtgttgcaacaaaactttctaaagtatgtaatgacttaagacttttaagtagtggtccaaaatgtggtcttaatgagattaatcttccaaaaatgcaaccaggtagttctatcatgccaggtaaggtaaatcctgttattcctgaagtagttaatcaagtttgttattttgttattggagcagacgtaactgtaacttttgcttgtgagggtggacaattacaacttaatgtttttgaaccagttgtagcatatagcttatttaattctgttgtaatgctagaaaaagcaatgtatactttagctgataaatgtatagatggtattaccgcaaatgaaaaaatttgttcagactttgtctataattcagtaggtatagtaacagctttaaatccttatattggttatgaaaattcagcttctatagccaaagaggcaatgaacactggaaaaagagtggctgatattgcgcttgaaagagggcttttaagcaaagaacaaattgatgaaattttaactccatcaaatatgctaaatcctcacatggaagctaaaaaatag

SEQ ID NO: 45047 - protein, 468 aa, Campylobacter jejuni subsp. jejuni NCTC 11168
MGTRKEHDFIGELEISDEVYYGVQTFRAVENFDISHDRLKDFPRFVRALARVKKAAAMANHELGLLDKNIQDAIIKACDKILEGGYYDQFVVDMIQGGAGTSTNMNANEVIANIGLELMGHKKGEYQYLHPNDHVNLSQSTNDAYPTALHLALHDYLSDLAKAMEHLKKAYERKAEEFKDVLKMGRTQLQDAVPMTLGREFKTFAVMIGEDIQRVLEARKLILEINLGGTAIGTGINSHPDYPKVVERKIREVTGFEYTVAEDLIEATQDTGAYVQISGVLKRVATKLSKVCNDLRLLSSGPKCGLNEINLPKMQPGSSIMPGKVNPVIPEVVNQVCYFVIGADVTVTFACEGGQLQLNVFEPVVAYSLFNSVVMLEKAMYTLADKCIDGITANEKICSDFVYNSVGIVTALNPYIGYENSASIAKEAMNTGKRVADIALERGLLSKEQIDEILTPSNMLNPHMEAKK

SEQ ID NO: 45048 - DNA, 1494 bp, Agrobacterium tumefaciens str. C58
  CDS (1)..(1494): transl_table=11
ttgcagcgctttcattgccggcgcgatgattctatatatcggccgcgcaaggcgggcgaagtgccgttttggcggaggaaaacgagtaaaaaggcaagattgatgacagccacacggacagaaaccgatacatttggccctattgaagttcaggccgatcgctactggggcgcgcaggcgcagcgctcgctcggcaacttcaagatcggctgggaaaagcagcccgcctctgtcgttcgtgcgctcggcatcgtcaagcaggccgctgcccgcgccaacatggcgcttgcaggtctcgaccccaaggtgggagatgccatcatcgccgccgcgcaggaagtcatcgacggcaagctgaccgagcatttcccgctcgtcgtctggcagaccggctccggcacccagtccaacatgaatgccaacgaggtgatttccaaccgcgcgatcgaaatgctcggcggcgaaatgggcaccaagaagcctgttcacccgaatgaccacgtcaatatgagccagtcctcgaacgacacctacccgacggcgatgcacatcgcctgcgtggaagagatcgttcaccacctgttgccggccctcaagcacctgcacacggcgctggaagccaaggtcaagcagttcgaaaagatcatcaagatcggccgtacccacacgcaggacgcgaccccgctgacgctcggccaggaattctccggttacgccgctcaggtcgcctcggcgatcgccaatatcgaactcacactgcccgcactgtcgaagctcgcccagggcggtacggcggttggcacgggcctcaatgcccctgttggttttgccgaaaaggtcgccgaggaaatctctgagattaccggcctttccttcgtcaccgcgccgaacaagttcgaagcgcttgcctcgcatgattccatggtcttctcgcacggcgcgatcaacgccgctgccgctgcactcttcaagatcgccaacgacatccgcttcctcggttccggcccgcgcgccggtctcggcgaattgtcgctgccggaaaacgagcccggctcgtcgatcatgccgggcaaggtcaacccgacgcagtcggaggcactgacgcaggtttgcgcccatatcttcggcaacaatgcagcgctttccttcgcaggctcgcagggccacttcgaactcaacgtctataatccgatgatggcctacaactttctgcagtcggtccagcttctgggcgatgcggccgtgtccttcaccgacaactgcgtcgtcggcatcgaggcgcgcgaagacaatatccggaagggcgtcgagaactcgctgatgctcgtcacggcgctcaacggcaagctcggctacgacatctgcgccaagatcgccaagaccgcccacaagaacggcacgacgctgcgcgaagaagccgttggtggtggatacctcaccaacgaggaattcgaccagtatgtgcgccccgaaaacatgatcggcccgaagtaa

SEQ ID NO: 45049 - protein, 497 aa, Agrobacterium tumefaciens str. C58
MQRFHCRRDDSIYRPRKAGEVPFWRRKTSKKARLMTATRTETDTFGPIEVQADRYWGAQAQRSLGNFKIGWEKQPASVVRALGIVKQAAARANMALAGLDPKVGDAIIAAAQEVIDGKLTEHFPLVVWQTGSGTQSNMNANEVISNRAIEMLGGEMGTKKPVHPNDHVNMSQSSNDTYPTAMHIACVEEIVHHLLPALKHLHTALEAKVKQFEKIIKIGRTHTQDATPLTLGQEFSGYAAQVASAIANIELTLPALSKLAQGGTAVGTGLNAPVGFAEKVAEEISEITGLSFVTAPNKFEALASHDSMVFSHGAINAAAAALFKIANDIRFLGSGPRAGLGELSLPENEPGSSIMPGKVNPTQSEALTQVCAHIFGNNAALSFAGSQGHFELNVYNPMMAYNFLQSVQLLGDAAVSFTDNCVVGIEAREDNIRKGVENSLMLVTALNGKLGYDICAKIAKTAHKNGTTLREEAVGGGYLTNEEFDQYVRPENMIGPK

SEQ ID NO: 45050 - DNA, 1446 bp, Agrobacterium tumefaciens str. C58
  CDS (1)..(1446): transl_table=11
gtggaggaaaaagtgagtgtgacgcgcagggagcatgatttgctcgggacgaaggaaattccggctgatgtctattggggcgtgcacaccgcgcgcgccgtggaaaacttcaagatcaccggggtaaccattggccataacccttatctcgtcaggggactggcctatgtgaaggaggcagccgcacgcgcaaatcacgaactcggcctgctcgacaaggagcgcatggaagcgatcgcggaagcctgccgcgaaatccgcgccggcgcgctgcacgagcaattcgtggtcgacgagatccaggggggagccggcacttccactaacatgaacgccaacgaggtcatttccaaccgtgcgctggaactgctcggccacgaaaaaggcgattattcccgtcttcacccgaatgaccatgtcaatctcagccagtccaccaacgacgcctatccaacggcgatcaatgtcgggctgatcgaggcgatcgacgatctggcggtctccatgggcgtgctgaaagacgctttcgaccgcaaggcgcaggaatttgccggcttcatcaagatcggtcgcacccagctgcaggatgccgtgccgatgacgctcggccaggaattccgcactttcgtggtgatgctcggcgaagatcaggctcgcctgatcgaatccgccgcactgctgcacgaaatcaatctcggcgccaccgccatcggcaccggtctcaatgcgccgcgcggttatgccgagcttgcctgccagcatctggctaagctgaccggacggccactggtgacggcagcagacctgatcgaagccacacaggatcccggtgccttcgtgcacctttccggcgtgctgaagcgcgttgccgtcaagctgtccaagacctgcaacgaccttcgcctgctctcctccggtccgcgcgccggcatcggcgagatcaccctgccctccgttcaggcgggttccagcatcatgcctggcaagatcaacccggtcattcccgaagtggtcaaccaggtcgcctatgcggtgatcggcaacgacatcaccatcaccatggcggccgaagccgggcagctgcaattgaacgcctttgaacccatcatcgtgcgggcattgtcgcagagcatcagccagctcagcgccgcctgccgcacattggcggaacgctgcgttgagggcatcgtcgcaaaccccggcatcatggcgcagcgcgtggaagaatcgatcggtctcgccaccgcgctcaatccgctgatcggttattacgccgcgacggaagtggcgaaggaagcgcttgccagcggccgcaccgtgccgcaggtcgttctggaacggggttatctgacggaaacgcaattgcagcaggcgctcagcccgcgtcatcttgccaacctgcccgcggttaccgttacggctggcgaagccgatcttcgccgatga

SEQ ID NO: 45051 - protein, 481 aa, Agrobacterium tumefaciens str. C58
MEEKVSVTRREHDLLGTKEIPADVYWGVHTARAVENFKITGVTIGHNPYLVRGLAYVKEAAARANHELGLLDKERMEAIAEACREIRAGALHEQFVVDEIQGGAGTSTNMNANEVISNRALELLGHEKGDYSRLHPNDHVNLSQSTNDAYPTAINVGLIEAIDDLAVSMGVLKDAFDRKAQEFAGFIKIGRTQLQDAVPMTLGQEFRTFVVMLGEDQARLIESAALLHEINLGATAIGTGLNAPRGYAELACQHLAKLTGRPLVTAADLIEATQDPGAFVHLSGVLKRVAVKLSKTCNDLRLLSSGPRAGIGEITLPSVQAGSSIMPGKINPVIPEVVNQVAYAVIGNDITITMAAEAGQLQLNAFEPIIVRALSQSISQLSAACRTLAERCVEGIVANPGIMAQRVEESIGLATALNPLIGYYAATEVAKEALASGRTVPQVVLERGYLTETQLQQALSPRHLANLPAVTVTAGEADLRR

SEQ ID NO: 45052 - DNA, 1374 bp, Thermoplasma acidophilum DSM 1728
  CDS (1)..(1374): transl_table=11
atgaggacagaaagggatgttatcggggaggtgcagctgcccgacaatgtattttatggcataaacacggcaagggcaagggagaacttcaggatcaccgggctgaccgctgattctgatcacatcgtatcaattgcgcaggtcaagaaggctgcagcgcttgcaaatgccgacggaggcgcactggataaggagaaggcagattacatttcaaaggcatgcgacgagataatcggcgggaagtaccatgaccagttcgtgatagacgtctaccaggctggcgcaggaacatcctacaacatgaacgcaaatgaggtcatagccaacgttgcgctgacactgatgggcaagaataagggagagtactcggtgatacatccaaacgaccacgtgaacatgagccagtctacgaacgatgtttatccgacgatgatgcgattaacagtctccaagaagatcaggaagctcaaggatgcactcaacgaactcatagagagcttagaggcaaagagcagggaattcagggggatcgcaaagcccgggaggacccatctccaggatgctgcgcctgtaacgcttgggcttgagttcggagcctacgcctacgccatgaagaaggaccgtgatgagataatagatgcctcggactacataatggagctgaacataggggggacagcggttggcacggggataaacactgcgaagaactatcaggaaaacgtggtgaagcacataaacgagataacgaaggagaacttcaggaaaagcacgaatctgctcggcataatgcagttcatgacggatttctccagggtcatgaatgcggtcacgaacctcgccctggatgttgagaagatagcaaacgacataaggctgctttactccggccctggcgcaggcatccatgagataataattccagctgtacagcagggatcatccataatgccgggcaagataaacccgtccatcgccgaggccatgaacatgatctgccactcagtcataggagcgcagcaggcggttaatatgagcgttcaggcagggcagcttgagctgaacgtgatgatgcccaacatcgactacgagctgacgagatccatagacataatgacaaacggcctgaagatgttcaagcagaaactcatagacggcatcaaagctaacgttcctgtatgcagagaacacctggcgaacagcttcggttcagcagcgctccttaacccctatctcggatacgataacgttgcaaagatagtgagagaggccgttgaaactgggaaatcaataaaaagcctagtactcgcaaccggaaaactgacagaagagcagtacatgaagataatggacagtggggttccaaaggactga

SEQ ID NO: 45053 - protein, 457 aa, Thermoplasma acidophilum DSM 1728
MRTERDVIGEVQLPDNVFYGINTARARENFRITGLTADSDHIVSIAQVKKAAALANADGGALDKEKADYISKACDEIIGGKYHDQFVIDVYQAGAGTSYNMNANEVIANVALTLMGKNKGEYSVIHPNDHVNMSQSTNDVYPTMMRLTVSKKIRKLKDALNELIESLEAKSREFRGIAKPGRTHLQDAAPVTLGLEFGAYAYAMKKDRDEIIDASDYIMELNIGGTAVGTGINTAKNYQENVVKHINEITKENFRKSTNLLGIMQFMTDFSRVMNAVTNLALDVEKIANDIRLLYSGPGAGIHEIIIPAVQQGSSIMPGKINPSIAEAMNMICHSVIGAQQAVNMSVQAGQLELNVMMPNIDYELTRSIDIMTNGLKMFKQKLIDGIKANVPVCREHLANSFGSAALLNPYLGYDNVAKIVREAVETGKSIKSLVLATGKLTEEQYMKIMDSGVPKD

SEQ ID NO: 45054 - DNA, 1437 bp, Yersinia pestis CO92
  CDS (1)..(1437): transl_table=11
atgtcaaataacattcgtattgaagaagacctgttaggtacacgagaagtccccgcagaggcttactacggtgttcataccctgcgtgcgattgaaaacttctatatcagtaacagtaaaatcagtgacgtgccggaatttgtacgtggcatggtcatggtaaaaaaagcggcggcaatggctaacaaagagttgcataccatcccgcgtaaaattgcagacatcattattcaggcatgtgatgaagttctggataaagggaaatgtatggatcagttccccgttgatgtgttccagggcggcgcaggtacctctctcaatatgaacaccaacgaggtcttggccaatattggcctggagctgatgggccaccaaaaaggggaatatcagtaccttaaccctaacgaccatctgaacaaatgccagtccaccaacgatgcctacccaaccggtttccgcattgcggtctacgcctccatcctcaagttgatcgatgctatcaaccaattaggcgaaggtttcggtagaaaatctaaagaattcgagaaaattctgaaaatgggccgtacccaattacaggatgccgtacccatgactctgggccaggaattccgcgctttccaggtgttattgaatgaagaaaccaagaacctgcaacggaccgccgagttgctattggaagtcaacctgggtgccactgccatcggcactgcgctgaatacaccagaaggttattcacaacttgccgtgcagaaactggcagaaatcagcggattagcctgtgttcctgccgaagatttgatcgaagcgacctctgattgcggcgcttacgtgatggtacacagcgccctgaaacgcctggctgttaagatgtcaaaaatctgtaacgacctacgtttgctctcatctggcccacgtactggtttgaatgaaatcaacctgccagaattgcaggcgggctcttctatcatgcctgcaaaagtgaacccggtgatccctgaagttgtaaatcaggtttgttttaaggtgatcggcaacgatacttgcattactatggcggctgaagcgggtcagcttcagttaaacttgatggaaccggtaattggtcaggccatgtttgagtctatccatatcctgactaatgcgtgttacaacctgttagagaagtgcatcaatggcattaccgctaacaaagaggtctgcgagcgctacgtctttaactccataggcatcgtcacttatcttaacccgttcattggccaccataatggtgacattgtgggtaaaatctgtgcggaaaccggtaaaaatgtgcgggaagtggttctggagcgcggtttgttaactgaagccgaactggacgacattttctctgttgaaaacctgatgcacccagcctataaagcgaaacgttataccgatgaaaatgaacaataa

SEQ ID NO: 45055 - protein, 478 aa, Yersinia pestis CO92
MSNNIRIEEDLLGTREVPAEAYYGVHTLRAIENFYISNSKISDVPEFVRGMVMVKKAAAMANKELHTIPRKIADIIIQACDEVLDKGKCMDQFPVDVFQGGAGTSLNMNTNEVLANIGLELMGHQKGEYQYLNPNDHLNKCQSTNDAYPTGFRIAVYASILKLIDAINQLGEGFGRKSKEFEKILKMGRTQLQDAVPMTLGQEFRAFQVLLNEETKNLQRTAELLLEVNLGATAIGTALNTPEGYSQLAVQKLAEISGLACVPAEDLIEATSDCGAYVMVHSALKRLAVKMSKICNDLRLLSSGPRTGLNEINLPELQAGSSIMPAKVNPVIPEVVNQVCFKVIGNDTCITMAAEAGQLQLNLMEPVIGQAMFESIHILTNACYNLLEKCINGITANKEVCERYVFNSIGIVTYLNPFIGHHNGDIVGKICAETGKNVREVVLERGLLTEAELDDIFSVENLMHPAYKAKRYTDENEQ

SEQ ID NO: 45056 - DNA, 1488 bp, Drosophila melanogaster
  CDS (1)..(1488)
atggtgctaccattattgcaacgctccacgcttcgcggcgttcaacaaatgacgaaaccctgggccgccattggaagtttgcgtctggcctcccaggagtttcgcgtggagagcgacacctttggcgaactgaaggtgcccgcggataagtactatggcgcccaaacgatgcgatcccagatcaatttccccatcggcggagccaccgaacggatgcccaaacccgtggtccaggccatgggcatcctgaagaaggccgccgccgaggtgaacaaggagttcggactggacagcaaggttagcgaggcgatctcgaaggcggccgacgatgtgatctctggcaagctatacgacgaccacttcccgctggtcatctggcagacgggctcgggcacgcagagcaacatgaatgtgaatgaggtgatcagcaatcgtgccattgagctgctgggcggcaaactgggctccaagacgcccgtgcatcccaacgatcatgtgaacaaatcgcagagctccaacgataccttccccaccgccattcacatctcggtggcgctggagctgaacaacaaccttaagccggcgattaagacgctgcacgatgcgctgcgtgccaagtcggaggagttcaaggacattatcaagatcggacgcacgcatacgatggatgcggtgccattgacgctgggccaagagttcagcggctatgcccagcaattggcctacgcccaggagcgcatcgatgcctgtctgccgcgcgtctatgagctggctctgggcggcactgctgtgggtacgggtctgaacacacgcaagggattcgccgagaagtgcgctgcaaagatcgccgagctgaccagcctgcccttcgttaccgcgcccaacaagttcgaggcactggctgcccgcgatgccatggtggaggtgcatggtgtgctcaacacgatcgccgttagcctgatgaagattgccaacgatattcgtttccttggctccggaccgcgttgcggtttgggtgagctctcgctaccggagaacgagccaggtagctccatcatgcccggcaaggtgaatcccacgcaatgcgagtcgctgacaatgctctccgcccaggtgatgggcaatcaggtggcggtgaccatcggtggatccaatgggcacttcgagctgaatgtattcaagcccctgatcgtgtccaatgtgctgcgctccattcggctattgtctgatggcagcaggaccttcactgccaactgtgtgaatggcatccaggcgaaccgcgagaatattgccaagatcatgaacgagtcgctcatgctggtgaccgctctgaatccgcacattggttacgacaaggctgcgaaaattgcaaagacggcgcacaagaatggcaccacactcaaggaggaggccatcaatttgggttacctgacggagcagcagttcaacgactgggtgcgacccgaacagatgctgggacccaagtga

SEQ ID NO: 45057 - protein, 495 aa, Drosophila melanogaster
MVLPLLQRSTLRGVQQMTKPWAAIGSLRLASQEFRVESDTFGELKVPADKYYGAQTMRSQINFPIGGATERMPKPVVQAMGILKKAAAEVNKEFGLDSKVSEAISKAADDVISGKLYDDHFPLVIWQTGSGTQSNMNVNEVISNRAIELLGGKLGSKTPVHPNDHVNKSQSSNDTFPTAIHISVALELNNNLKPAIKTLHDALRAKSEEFKDIIKIGRTHTMDAVPLTLGQEFSGYAQQLAYAQERIDACLPRVYELALGGTAVGTGLNTRKGFAEKCAAKIAELTSLPFVTAPNKFEALAARDAMVEVHGVLNTIAVSLMKIANDIRFLGSGPRCGLGELSLPENEPGSSIMPGKVNPTQCESLTMLSAQVMGNQVAVTIGGSNGHFELNVFKPLIVSNVLRSIRLLSDGSRTFTANCVNGIQANRENIAKIMNESLMLVTALNPHIGYDKAAKIAKTAHKNGTTLKEEAINLGYLTEQQFNDWVRPEQMLGPK

SEQ ID NO: 45058 - DNA, 1410 bp, Corynebacterium glutamicum ATCC 13032
  CDS (1)..(1410): transl_table=11
atgaccgagcaggaattccgtattgagcacgacaccatgggtgaagtgaaggttccagcaaaggctctgtggcaggcacagacccagcgcgctgttgagaacttccctatctctggtcgtggtctggaatccgcacagatccgcgcaatgggtctgctgaaggcagcttgtgcgcaggtaaacaaggactccggtgcgctggatgcagagaaggcagatgccatcattgcagctggtaaggagatcgcgtccggtaagcatgacgctgagttcccaattgatgtgttccagactggttccggtacttcctccaacatgaacaccaatgaggttatcgcttccatcgcgaaggctaacggcgttgaggttcacccaaatgaccacgtcaacatgggtcagtcctccaatgacaccttccctactgcaactcacgttgctgcaaccgaagctgctgtcaatgacctcatcccaggcctgaaggttctgcacgagtctttggcgaagaaggctaacgagtggtctgaggttgttaagtccggccgcacccacctgatggacgctgttccagtaaccctgggccaggagttcggtggctacgctcgccagatccagctcggcatcgagcgcgttgaggctactcttcctcgccttggtgagctggctattggtggcaccgctgctggtaccggtatcaacacctccgctgatttcggcggcaaggttgttgctgaactgatcaacttgaccgacgtcaaggagctcaaggaagctgagaaccacttcgaggctcaggctgcacgcgacgctcttgttgagttctccggcgcaatgcgcgttatcgctgtctccttgtacaagatcgctaacgatatccgcctcatgggctccggcccactgaccggtcttggcgagatccgtctcccagacctgcagccaggttcctccatcatgccaggcaaggtcaacccagttctctgtgagaccgctacccaggtttccgctcaggttatcggcaatgacgcagctgttgcgttctccggcacccagggccagttcgagctcaacgtgttcatcccagtgatggctcgcaacgtgcttgagtccgctcgcctgctggctaacacttcccgcgtgttcgcaacccgtctcgttgatggcattgagccaaacgaggcacacatgaaggagctcgctgagtcttcaccttccatcgttaccccactgaactctgcaatcggctacgaagctgctgcaaaggtggctaagactgctttggctgagggcaagaccatccgccagactgtcatcgatttgggcttggttgatggcgagaagctcaccgaggaagagctggacaagcgcctcgacgttcttgctatggctcacaccgagcgcgagaacaagttctaa

SEQ ID NO: 45059 - protein, 469 aa, Corynebacterium glutamicum ATCC 13032
MTEQEFRIEHDTMGEVKVPAKALWQAQTQRAVENFPISGRGLESAQIRAMGLLKAACAQVNKDSGALDAEKADAIIAAGKEIASGKHDAEFPIDVFQTGSGTSSNMNTNEVIASIAKANGVEVHPNDHVNMGQSSNDTFPTATHVAATEAAVNDLIPGLKVLHESLAKKANEWSEVVKSGRTHLMDAVPVTLGQEFGGYARQIQLGIERVEATLPRLGELAIGGTAAGTGINTSADFGGKVVAELINLTDVKELKEAENHFEAQAARDALVEFSGAMRVIAVSLYKIANDIRLMGSGPLTGLGEIRLPDLQPGSSIMPGKVNPVLCETATQVSAQVIGNDAAVAFSGTQGQFELNVFIPVMARNVLESARLLANTSRVFATRLVDGIEPNEAHMKELAESSPSIVTPLNSAIGYEAAAKVAKTALAEGKTIRQTVIDLGLVDGEKLTEEELDKRLDVLAMAHTERENKF

SEQ ID NO: 45060 - DNA, 1386 bp, Thermoanaerobacter tengcongensis MB4
  CDS (1)..(1386): transl_table=11
atgccgcgtattgaaaaagatttcttgggtgaattaacacttgaagataatgaactttatggaattcatacaaaacgagctttgaaaaacttctctgtatcttcacaaaagattgatatagatcttgtacgagcaattgtgatggtcaaaaaagcatgcgcaattgcaaattttgaggttggaaacctcgatgaaaaaataaaagatgcaattgtctttgcatgtgatgagattttagccggcaaatacaccgagcaatttgtggtagacaaattccaaggcggtgctggaacatctacaaatatgaacgtaaatgaagtaattgccaacatagcactcatttatcttggcaaaaaaccaggagagtatcaatacatccatcctatagaccatgttaatatgtcacaatcgacaaatgatgtctacccaaccgctttgaggattgcaacaatatggaatgtgagagaactttctgaagagtgtgcagaactccaaaaaagcttgcaaaaaaaagagcatgagtttgaaggtgtaattaaggctgggcgcactcaacttcaagatgcccttcccatcaccttagggcaagagtttggggcgtatgcacaggcgatatcacgcgatagatggcgaatatataaaattgaagaaagattaagagtggtaaacttgggcgcaacagctgttggaacaggagtgaatgcaagcttaaaatatatgtttaaagtgatagaacttttgcgcgattttactaaaataggcttggctcggtctgattacctcatggatgcaacacaaaatgcagatgtatttgtggaatgctcgggtcttttaaaagccttggcggtgaatctatcaaaaattgcaaatgacttaaggctcttatcatctggtccaaacacgggtttaaacgagataaacttacctgctgcacaagcaggttcaagcattatgcctggtaaagtaaatcctgtcatacctgaacttataaacaccatatcattccaggttatgtcaaatgatgttgcaataaccttagcagcccaagcaggtcagcttgagctaaatgcattcttgcctttaattgcaaacaatttgcttgaaagcctcaaaattctcaaaaacggaatcaggatattcagaaaacagtgcattgatggaataacagcaaacaaagaaagatgtcttgagtttgccaaaaagactccttctattgccgctgcattgattgataaaatagggtatgacaaggcaagtgaaattgctaaaaaagccattgccgagaataaggaaataattgaggtggtaaaggaattgaagatcttaaatgagaatgaggctgaagcactactaaatccttttgaatttgtaaagtttaaagagtaa

SEQ ID NO: 45061 - protein, 461 aa, Thermoanaerobacter tengcongensis MB4
MPRIEKDFLGELTLEDNELYGIHTKRALKNFSVSSQKIDIDLVRAIVMVKKACAIANFEVGNLDEKIKDAIVFACDEILAGKYTEQFVVDKFQGGAGTSTNMNVNEVIANIALIYLGKKPGEYQYIHPIDHVNMSQSTNDVYPTALRIATIWNVRELSEECAELQKSLQKKEHEFEGVIKAGRTQLQDALPITLGQEFGAYAQAISRDRWRIYKIEERLRVVNLGATAVGTGVNASLKYMFKVIELLRDFTKIGLARSDYLMDATQNADVFVECSGLLKALAVNLSKIANDLRLLSSGPNTGLNEINLPAAQAGSSIMPGKVNPVIPELINTISFQVMSNDVAITLAAQAGQLELNAFLPLIANNLLESLKILKNGIRIFRKQCIDGITANKERCLEFAKKTPSIAAALIDKIGYDKASEIAKKAIAENKEIIEVVKELKILNENEAEALLNPFEFVKFKE

SEQ ID NO: 45062 - DNA, 1413 bp, Drosophila melanogaster
  CDS (1)..(1413)
atgagctccaccaagaaggttgagacccgccaagagagcgacaccctgggacccatggaggtgcccatggatcgctattacggcgcccagacgatgcgctgcctcataaactttcgcattggcggcgaggaggagcgaatgccgcgccagataatccaggccatgggcatactgaagaaggcggcagccgaaacaaaccaagaattcggattggatcccaagttgagcacggccatctcgaatgcggccgacgatgtgatctccggaaagctttacgatgagggtcacttcccgctgcccatttggcagacgggttcgggcacccagagcaacatgaacagcaacgaggttatcgggaatcgtgccatcgagctgctgggcggacgtattggtaccaaggacccagtgcatcccaacgaccatgtgaacaagtcgcagagctccaacgacacctttccgtcggccattcacattgcggtggccactgcgctgaccaaggatctccgaccggcggtcaccgctctgcgggattcactgcaggccaagtcgaatgaatggaaggatatcattaagattggacgcactcacacccaggatgcagtgccgctaacgctgggccaggagttcagtggctatgcccaacagctgaccaacgggctgcagaggatcgatgcggtcctgccgcgagtttatcagctcgcactgggtggaaccgctgtgggaactggattgaatacccgccggggattcgccgagaagtgtgtcaagcggatcgcccagctcagtggattgcccttcgtggtggcgcccaattttttcgaggccctcgcctgtcgagatgccatggtggaggtgcatggagcgctcaatgtcctggctgttagcctgatgaaggtcaccaatgatatacgtttcctgggatcgggaccacgttgcggtctgggcgagctgtttctgccggagaatgagccgggcagttctattatgcccggcaaggtgaatcccacgcagtgcgaggccatgaccatgatctgcgcccaggtgatgggcaaccacgtggccgtctccgtcggcggtgccaatggacactttgagctcaacgttttcaagccactgatcgcatccaatgtgctccgctccatcaagctgctggctgatgggtgcatcagcttcaactgcaactgcgtcaagggcattaagcccaacaaggagaagctggcaaagatcgtgaatgagtcgctaatgctggtgacagccctcaatccgcacattggctatgacaagtccgcccagattgccaaggcggcccacaagaatggaactactctaaaggtggaggcattgaacgccggcatatcggagaaggatttcaacgagtgggtgcgtcccgagaagatgctgggtccttcttag

SEQ ID NO: 45063 - protein, 470 aa, Drosophila melanogaster
MSSTKKVETRQESDTLGPMEVPMDRYYGAQTMRCLINFRIGGEEERMPRQIIQAMGILKKAAAETNQEFGLDPKLSTAISNAADDVISGKLYDEGHFPLPIWQTGSGTQSNMNSNEVIGNRAIELLGGRIGTKDPVHPNDHVNKSQSSNDTFPSAIHIAVATALTKDLRPAVTALRDSLQAKSNEWKDIIKIGRTHTQDAVPLTLGQEFSGYAQQLTNGLQRIDAVLPRVYQLALGGTAVGTGLNTRRGFAEKCVKRIAQLSGLPFVVAPNFFEALACRDAMVEVHGALNVLAVSLMKVTNDIRFLGSGPRCGLGELFLPENEPGSSIMPGKVNPTQCEAMTMICAQVMGNHVAVSVGGANGHFELNVFKPLIASNVLRSIKLLADGCISFNCNCVKGIKPNKEKLAKIVNESLMLVTALNPHIGYDKSAQIAKAAHKNGTTLKVEALNAGISEKDFNEWVRPEKMLGPS

SEQ ID NO: 45064 - DNA, 1437 bp, Yersinia pestis KIM
  CDS (1)..(1437): transl_table=11
atgtcaaataacattcgtattgaagaagacctgttaggtacacgagaagtccccgcagaggcttactacggtgttcataccctgcgtgcgattgaaaacttctatatcagtaacagtaaaatcagtgacgtgccggaatttgtacgtggcatggtcatggtaaaaaaagcggcggcaatggctaacaaagagttgcataccatcccgcgtaaaattgcagacatcattattcaggcatgtgatgaagttctggataaagggaaatgtatggatcagttccccgttgatgtgttccagggcggcgcaggtacctctctcaatatgaacaccaacgaggtcttggccaatattggcctggagctgatgggccaccaaaaaggggaatatcagtaccttaaccctaacgaccatctgaacaaatgccagtccaccaactatgcctacccaaccggtttccgcattgcggtctacgcctccatcctcaagttgatcgatgctatcaaccaattaggcgaaggtttcggtagaaaatctaaagaattcgagaaaattctgaaaatgggccgtacccaattacaggatgccgtacccatgactctgggccaggaattccgcgctttccaggtgttattgaatgaagaaaccaagaacctgcaacggaccgccgagttgctattggaagtcaacctgggtgccactgccatcggcactgcgctgaatacaccagaaggttattcacaacttgccgtgcagaaactggcagaaatcagcggattagcctgtgttcctgccgaagatttgatcgaagcgacctctgattgcggcgcttacgtgatggtacacagcgccctgaaacgcctggctgttaagatgtcaaaaatctgtaacgacctacgtttgctctcatctggcccacgtactggtttgaatgaaatcaacctgccagaattgcaggcgggctcttctatcatgcctgcaaaagtgaacccggtgatccctgaagttgtaaatcaggtttgttttaaggtgatcggcaacgatacttgcattactatggcggctgaagcgggtcagcttcagttaaacttgatggaaccggtaattggtcaggccatgtttgagtctatccatatcctgactaatgcgtgttacaacctgttagagaagtgcatcaatggcattaccgctaacaaagaggtctgcgagcgctacgtctttaactccataggcatcgtcacttatcttaacccgttcattggccaccataatggtgacattgtgggtaaaatctgtgcggaaaccggtaaaaatgtgcgggaagtggttctggagcgcggtttgttaactgaagccgaactggacgacattttctctgttgaaaacctgatgcacccagcctataaagcgaaacgttataccgatgaaaatgaacaataa

SEQ ID NO: 45065 - protein, 478 aa, Yersinia pestis KIM
MSNNIRIEEDLLGTREVPAEAYYGVHTLRAIENFYISNSKISDVPEFVRGMVMVKKAAAMANKELHTIPRKIADIIIQACDEVLDKGKCMDQFPVDVFQGGAGTSLNMNTNEVLANIGLELMGHQKGEYQYLNPNDHLNKCQSTNYAYPTGFRIAVYASILKLIDAINQLGEGFGRKSKEFEKILKMGRTQLQDAVPMTLGQEFRAFQVLLNEETKNLQRTAELLLEVNLGATAIGTALNTPEGYSQLAVQKLAEISGLACVPAEDLIEATSDCGAYVMVHSALKRLAVKMSKICNDLRLLSSGPRTGLNEINLPELQAGSSIMPAKVNPVIPEVVNQVCFKVIGNDTCITMAAEAGQLQLNLMEPVIGQAMFESIHILTNACYNLLEKCINGITANKEVCERYVFNSIGIVTYLNPFIGHHNGDIVGKICAETGKNVREVVLERGLLTEAELDDIFSVENLMHPAYKAKRYTDENEQ

SEQ ID NO: 45066 - DNA, 1452 bp, Brucella suis 1330
  CDS (1)..(1452): transl_table=11
atgacaaccctggaaaatattcatcccctgacacggcgcgagcaggattcccttggggagcgcgatattcccacggatgcctatttcggcatccagaccctacgggcagttgaaaacttctcgctttccgatgttgcgctgaaccatattcctgccctcgttcgcgcccttgcaatggtcaagaaagcggctgccaccgccaattacaagctgcggcagctgccggagcccaaatatgcggccatcgtcgccgcctgcgacgacatcattgacgggcttttgatggagcaattcgtcgtggatgtgtttcagggcggcgcgggcacctcaagcaatatgaacgcaaatgaggttatcgcaaaccgcgcccttgaacatctggggcggccgcgaggcgactaccagacgatccatcccaatgatgacgtcaacatgtcgcagtccaccaatgatgtgtatccaaccgcggtaaggctggcgcttcttctcagccagaaccaggttcagacggcgctgcaccggctgattgccgcctttgaagcaaaggggcgggaattcgcgacggtcatcaagatcgggcgcacacagttgcaggatgcggttccgatcactcttggacaggagttcgaggcatttgccgcaacgttgcgggaggacacagcccggctggaggaggttgccgcgcttttccgcgaagtaaacctcggtggaaccgctatcggcacgcgcatcaacgcctcgcacgcctatgccgaacaggccatcgcggaactttcgcagatttccggtatcgaactgaaagccgccggcaatctcgtggaagcgagctgggataccggtgcgttcgtcaccttttccgggatattgcgccggatcgcagtcaagctttccaagatcgccaacgatctgcggctactctcaagcgggccgcgaagcggccttggtgaaatccgcctgcctgcggttcagccgggatcgtcgatcatgccgggaaaggtcaatccggtcataccggaatcggtcaatcaggtctgctatcaggtgatcggcaatgacctgactgtaaccatggcagccgaaagcgggcaattgcagctcaacgcgttcgagccgctgatcgtctacaatatcctcagttccatgcgactgctcggccgcgccatgaccaatctggccgaacgttgcgtcgacggaattgaagccaatgtggaacgctgtcgcgcaggcgcggaggaaagcatttcgcttgcaaccgccctcgtcccggtcgtgggctatgccagggcggcagagatcgccaagcaggcgcttgcctcagggcagaccgtcatggaagtggcgatttccaaggggctggacgcatctgcgctcacgataatgcttgaccccttgagaatggcattcccgccggaaacgcacgacaaggaggcacatcatgcatctgtcggctaa

SEQ ID NO: 45067 - protein, 483 aa, Brucella suis 1330
MTTLENIHPLTRREQDSLGERDIPTDAYFGIQTLRAVENFSLSDVALNHIPALVRALAMVKKAAATANYKLRQLPEPKYAAIVAACDDIIDGLLMEQFVVDVFQGGAGTSSNMNANEVIANRALEHLGRPRGDYQTIHPNDDVNMSQSTNDVYPTAVRLALLLSQNQVQTALHRLIAAFEAKGREFATVIKIGRTQLQDAVPITLGQEFEAFAATLREDTARLEEVAALFREVNLGGTAIGTRINASHAYAEQAIAELSQISGIELKAAGNLVEASWDTGAFVTFSGILRRIAVKLSKIANDLRLLSSGPRSGLGEIRLPAVQPGSSIMPGKVNPVIPESVNQVCYQVIGNDLTVTMAAESGQLQLNAFEPLIVYNILSSMRLLGRAMTNLAERCVDGIEANVERCRAGAEESISLATALVPVVGYARAAEIAKQALASGQTVMEVAISKGLDASALTIMLDPLRMAFPPETHDKEAHHASVG

SEQ ID NO: 45068 - DNA, 1455 bp, Drosophila melanogaster
  CDS (1)..(1455)
atgtctttcgatcagaaggagattttcagtttgatgtacaaactggctcggctaatagtgccggatactcgagttgaatatgattcgatgggtgccgtgcacattcctctcgatcgaatgttcggtccgcaaaccatgagatccctgatgaaatttccaattggcggagttgaggaacgaatgccacgacccctaataaaagccctgggcatagtgaagaaatcagctgcggagacgaacaaaatccattgtctggaggagcatctatgcgatgccatttccaaggcctgcgatgatgttatatcgggcaaactctatgacgaggaacactttccgttggttatatggcaggatggaagcggcgagcacacaaacatgaacgtaaacgaggttatatgcaatcgagccatcgaaattctgggcggtcagatgggctccaaggagccggtggatcccaatgaacatgtcaacatggcgcaaagttcccatgacaccttctcgacagccgtgcgcatcgccgtggccatgcagttgcaggagacgctgtatcccagcttaaggacctttattgatttgctgggcaagaagtcgaacgattggatggatttgatcaagattggtagaacgcatctgatggacgcagttcctctgtccctcggccaggagttcagtggctatcagcagcaacttgtgaacggaaggacgcgattggactgtgccatgtgccgattgtatcagttgcccatgggcggcaccagtgtgggcaccaaagtggacaccaaggcggaatattctgcgcagtgcatcaagcgtatagccgagctaacattcctaccctttgtcgagtccccgaacttttttgaatccatctccgcctgcgattgcctggtggaactgcacggtgaactcaacacgattgcagcgagtgtgatgaagatagcgaatgatatacgattccttggatcgggaccacgttgcggatttggtgaactacatctgccggagaacgaaccaggtagttccataatgcccggcaaagtgaatcccacgcaatgcgaggccatgtccatgatctgtgcccaggtgatgggcaaccatgtggccgtctccatgggtggttcctctggccactttcagctgaacacctttatgcccatgattgcctccaatgttttgcgctcgattacacttttgggcgatggcatgaagtccttttgcaccaattgcctcgagggcatcgagcccaataggagcaagattggtagcatcgtcaaggagtccctgatgctggtcactgccctcagtccacacattggctacgaacgatccgctgcgatcgccaaggcagcgcatcacaatggaaccactttggaacaggaggccatacttgatggcattcaacgggaggacttcagggagtgggtgcagcccagcaagatgctgggtcccgaatag

SEQ ID NO: 45069 - protein, 484 aa, Drosophila melanogaster
MSFDQKEIFSLMYKLARLIVPDTRVEYDSMGAVHIPLDRMFGPQTMRSLMKFPIGGVEERMPRPLIKALGIVKKSAAETNKIHCLEEHLCDAISKACDDVISGKLYDEEHFPLVIWQDGSGEHTNMNVNEVICNRAIEILGGQMGSKEPVDPNEHVNMAQSSHDTFSTAVRIAVAMQLQETLYPSLRTFIDLLGKKSNDWMDLIKIGRTHLMDAVPLSLGQEFSGYQQQLVNGRTRLDCAMCRLYQLPMGGTSVGTKVDTKAEYSAQCIKRIAELTFLPFVESPNFFESISACDCLVELHGELNTIAASVMKIANDIRFLGSGPRCGFGELHLPENEPGSSIMPGKVNPTQCEAMSMICAQVMGNHVAVSMGGSSGHFQLNTFMPMIASNVLRSITLLGDGMKSFCTNCLEGIEPNRSKIGSIVKESLMLVTALSPHIGYERSAAIAKAAHHNGTTLEQEAILDGIQREDFREWVQPSKMLGPE

SEQ ID NO: 45070 - DNA, 1404 bp, Drosophila melanogaster
  CDS (1)..(1404)
atggcctcccaggagtttcgcgtggagagcgacacctttggcgaactgaaggtgcccgcggataagtactatggcgcccaaacgatgcgatcccagatcaatttccccatcggcggagccaccgaacggatgcccaaacccgtggtccaggccatgggcatcctgaagaaggccgccgccgaggtgaacaaggagttcggactggacagcaaggttagcgaggcgatctcgaaggcggccgacgatgtgatctctggcaagctatacgacgaccacttcccgctggtcatctggcagacgggctcgggcacgcagagcaacatgaatgtgaatgaggtgatcagcaatcgtgccattgagctgctgggcggcaaactgggctccaagacgcccgtgcatcccaacgatcatgtgaacaaatcgcagagctccaacgataccttccccaccgccattcacatctcggtggcgctggagctgaacaacaaccttaagccggcgattaagacgctgcacgatgcgctgcgtgccaagtcggaggagttcaaggacattatcaagatcggacgcacgcatacgatggatgcggtgccattgacgctgggccaagagttcagcggctatgcccagcaattggcctacgcccaggagcgcatcgatgcctgtctgccgcgcgtctatgagctggctctgggcggcactgctgtgggtacgggtctgaacacacgcaagggattcgccgagaagtgcgctgcaaagatcgccgagctgaccagcctgcccttcgttaccgcgcccaacaagttcgaggcactggctgcccgcgatgccatggtggaggtgcatggtgtgctcaacacgatcgccgttagcctgatgaagattgccaacgatattcgtttccttggctccggaccgcgttgcggtttgggtgagctctcgctaccggagaacgagccaggtagctccatcatgcccggcaaggtgaatcccacgcaatgcgagtcgctgacaatgctctccgcccaggtgatgggcaatcaggtggcggtgaccatcggtggatccaatgggcacttcgagctgaatgtattcaagcccctgatcgtgtccaatgtgctgcgctccattcggctattgtctgatggcagcaggaccttcactgccaactgtgtgaatggcatccaggcgaaccgcgagaatattgccaagatcatgaacgagtcgctcatgctggtgaccgctctgaatccgcacattggttacgacaaggctgcgaaaattgcaaagacggcgcacaagaatggcaccacactcaaggaggaggccatcaatttgggttacctgacggagcagcagttcaacgactgggtgcgacccgaacagatgctgggacccaagtga

SEQ ID NO: 45071 - protein, 467 aa, Drosophila melanogaster
MASQEFRVESDTFGELKVPADKYYGAQTMRSQINFPIGGATERMPKPVVQAMGILKKAAAEVNKEFGLDSKVSEAISKAADDVISGKLYDDHFPLVIWQTGSGTQSNMNVNEVISNRAIELLGGKLGSKTPVHPNDHVNKSQSSNDTFPTAIHISVALELNNNLKPAIKTLHDALRAKSEEFKDIIKIGRTHTMDAVPLTLGQEFSGYAQQLAYAQERIDACLPRVYELALGGTAVGTGLNTRKGFAEKCAAKIAELTSLPFVTAPNKFEALAARDAMVEVHGVLNTIAVSLMKIANDIRFLGSGPRCGLGELSLPENEPGSSIMPGKVNPTQCESLTMLSAQVMGNQVAVTIGGSNGHFELNVFKPLIVSNVLRSIRLLSDGSRTFTANCVNGIQANRENIAKIMNESLMLVTALNPHIGYDKAAKIAKTAHKNGTTLKEEAINLGYLTEQQFNDWVRPEQMLGPK

SEQ ID NO: 45072 - DNA, 1512 bp, Drosophila melanogaster
  CDS (1)..(1512)
atgctgaagcaaaacaatggtctgcatctggctaggcgcaatctctgggtggtttgcagtggcctccgtgccaaggattgcgacagtggcggtaagggcggcaagggcaaggagaatggcaagtttcgtacggagaaggacaccttcggggagctaaaggtgccggcggacaagctgtacggcgcacagacgatgcgctccaaattgaattttcccattggcgacataggcgaacgtatgccgatgccggtgatccaggccatgggcatactgaagaaggcatgtgccgaggtcaacaaggattacggactagatggcaaggtgtcggatgccgtatcctgcgcctgcgacgatgtcatttccggcaagctatacaaacagggtcacttcccattggtcatctggcaaaccggttcgggcacccagaccaatatgaacaccaacgaggtgatcagcaatgcggccattaagatgatgggcggcgaactgggcagcaagaagccggtgcatcccaacgatcatgtgaacaagtcgcagagctccaacgacaccttccccacggccattcacatttcggtgggcatggagctgaacgagcggcttgttccggcggttacacacttgagggatgccctcaagtccaagtcggatgagttcaaggacatcatcaagatcggacgcacccacttgatggacgcagttccgctgactttgggccaggaattcagcggttatacacagcagttgaccaacggtctggaaaggatcaagggctgtctgccgcgcgtctatgagctggctctgggcggcactgctgtgggtacgggtctgaacacacgcaagggattcgccgagaaggtggccaagcgcatttcggagctaacctgcttgcccttcgtgtcggcgcccaacaagttcgaggcactggctgcccgcgatgccatggtggaggtgcatggtgtgctcaacacgatcgccgtcagcctgatgaagatcgccaacgatatccgattgctgggatcgggtccgcgttgcggtctgggcgaactaatgctgccggagaacgagcccggtagctccatcatgcccggcaaggtgaatcccacgcaatgcgaatcaatgaccatgctgtgtgcccaggtgatgggcaatcaggtggcggtgaccatcggcggctccaacgggcacttcgagctaaatgtattcaaacccctggtcgtgtccaatgtgctgcgctccattcgcttgttggctgatggcagcatgaccttcagcaagaactgcgtggagggactgcaggccaacaaggagaggatcgacaagatcatgaacgagtccttgatgctggtgaccgcgctgaatccgcacattggctatgacaaggccgccctgatcgccaagacggcgcacaagaataagacgaccttgaaggaggaggcactgaagaccggaattaccgaagagcagttcaaggagtgggtcaatcccaaggagatgctgggaccgaagtga

SEQ ID NO: 45073 - protein, 503 aa, Drosophila melanogaster
MLKQNNGLHLARRNLWVVCSGLRAKDCDSGGKGGKGKENGKFRTEKDTFGELKVPADKLYGAQTMRSKLNFPIGDIGERMPMPVIQAMGILKKACAEVNKDYGLDGKVSDAVSCACDDVISGKLYKQGHFPLVIWQTGSGTQTNMNTNEVISNAAIKMMGGELGSKKPVHPNDHVNKSQSSNDTFPTAIHISVGMELNERLVPAVTHLRDALKSKSDEFKDIIKIGRTHLMDAVPLTLGQEFSGYTQQLTNGLERIKGCLPRVYELALGGTAVGTGLNTRKGFAEKVAKRISELTCLPFVSAPNKFEALAARDAMVEVHGVLNTIAVSLMKIANDIRLLGSGPRCGLGELMLPENEPGSSIMPGKVNPTQCESMTMLCAQVMGNQVAVTIGGSNGHFELNVFKPLVVSNVLRSIRLLADGSMTFSKNCVEGLQANKERIDKIMNESLMLVTALNPHIGYDKAALIAKTAHKNKTTLKEEALKTGITEEQFKEWVNPKEMLGPK

SEQ ID NO: 45074 - DNA, 1617 bp, Corynebacterium efficiens YS-314
  CDS (1)..(1617): transl_table=11
atgtcgaacgaggataagaaggtgtccgaggacacgtccagcgagcaggcggagcaggtggaccagacggaccagaccggaaacccggaggattccgcggtggacggggaggccctggtgaccaccacggagaccacctccaccggtgagaagaccgcggcggcgaaggccgcggaaaaccgcaggaagatcaagaggaatttccgtgtggaatccgacctgctgggggagatggagatcccggccgatgcctactacggtgtccacaccctgcgtgccgtggagaacttccagatctcacgcaccaccatcaaccacgtcccggagttcatccgcggcatggtgcaggtgaagaaggccgccgccctggccaaccgccgcctgcacaccctgcccgccgacaaggccaaggcgatcatctgggcctgtgatcagatcctcgtcgagggccgctgcatggaccagttcccgatcgacgtgttccagggcggggcgggcaccagcaccaacatgaacaccaatgaggtggtggccaacctggcgctggagtacatggggtacgagaagggacgctacgacatcctgcaccccatggatgacgtgaacatgtcccagtccaccaatgatgcctatcccacgggtttccgactcggcatctatgctgcgatgaccaacctcatcgcggagatcgaacagctccaggtcgccttccgggagaagggcaatgagttcatcgacatcatcaagatgggccgcacccagctccaggatgcggtgccgatgagcctgggtgaggagttccaggccttcgccgcgaacctggccgaggaacagtccgtgctgcgcgcctccatggaccgtctcctcgaggtcaacctcggtgccaccgccatcggtaccggcgtgaacaccccggccggataccggcaccaggtggtcgcctccctctccgaggtcaccggcctggagatcaaatccgcccgtgatctcatcgaggccacctcggacaccggtgcctacgtcctggcgcattccgcggtcaagcgtgcagccatgaaactgtccaagatctgcaacgatctgcgcctgctgtcctccggcccgcgcgccggactcaacgagatcaacctcccgccgcgtcaggccggatcctccatcatgccggcgaaggtcaacccggtcatccccgaggtggtcaaccaggtctgcttcaaggtcttcggcaatgacctcaccgtggccatggccgccgaggccggtcagctgcagctcaatgtgatggaaccggtcatcggggagtcgctgttccagtcgatccgtatcctgggcaatgcgagcaagaccctgcgggagaagtgcgtggtgggcatcaccgcgaatgcggatgtctgccggtcctatgtggagaactccatcggcatcatcacctacctcaacccgtttttgggccatgacatcggtgatgccatcggtaaggaggccgcggagacgggccggtccgtccgggagctgatcctggagaagaacctcatggatgcggcgaccctggataccgtgttgtccaaggagaacctgatgcacccgatcttccggggcaagctgtacctggatcagtag

SEQ ID NO: 45075 - protein, 538 aa, Corynebacterium efficiens YS-314
MSNEDKKVSEDTSSEQAEQVDQTDQTGNPEDSAVDGEALVTTTETTSTGEKTAAAKAAENRRKIKRNFRVESDLLGEMEIPADAYYGVHTLRAVENFQISRTTINHVPEFIRGMVQVKKAAALANRRLHTLPADKAKAIIWACDQILVEGRCMDQFPIDVFQGGAGTSTNMNTNEVVANLALEYMGYEKGRYDILHPMDDVNMSQSTNDAYPTGFRLGIYAAMTNLIAEIEQLQVAFREKGNEFIDIIKMGRTQLQDAVPMSLGEEFQAFAANLAEEQSVLRASMDRLLEVNLGATAIGTGVNTPAGYRHQVVASLSEVTGLEIKSARDLIEATSDTGAYVLAHSAVKRAAMKLSKICNDLRLLSSGPRAGLNEINLPPRQAGSSIMPAKVNPVIPEVVNQVCFKVFGNDLTVAMAAEAGQLQLNVMEPVIGESLFQSIRILGNASKTLREKCVVGITANADVCRSYVENSIGIITYLNPFLGHDIGDAIGKEAAETGRSVRELILEKNLMDAATLDTVLSKENLMHPIFRGKLYLDQ

SEQ ID NO: 45076 - DNA, 1380 bp, Pseudomonas putida KT2440
  CDS (1)..(1380): transl_table=11
atgatgagtgatacccgtatcgagcgtgacagcatgggtgagctgcaggtgccggcccaggccctctacggcgcccagacccagcgcgcggtcgacaacttcccgatcagcggccagcgtatgccggcccagttcattcgtgccttgttgctggccaaggccgctgcggccaaggccaacgtcgaactggagcaactgtctgccgggcagggccaggctatcgtcaaggctgtcgagcaattgctggccgaggacttcatccagcacttcccggtggatgtgttccagacaggctctggcaccagttcgaacatgaacgccaatgaggtgatcgccaccttggctacccatgtactgggtgaggcggtcaatgccaatgaccacgtcaactgtggccagagcagcaatgacatcattccgaccaccatccatgtcagcgccgcgttggccctgcacgagcagttgctgccagccctggcgcacctggtacaggtgatcgaggtcaagtcggcacaagtacatcaatacgtgaagaccggtcgtactcacctgatggacgcgatgcccgtgcgcatgagccaggtgctggatggctgggctgcgcagatcaatgctgccaagtcgcacatcgaaggtgtgctgccgcacttgcaggcgctggcccagggcggaaccgccgtgggtaccggcatcaacgcccatccgcagttcgctgtcggtttcgctcgccagctcagtggcctgaccaaggtcgagttcacgcccggccagaacctgttcgcactgatcggctcgcaggacactgccgtggctttgtctggccagctcaagaccaccgctgtggcgttgatgaaaatcgccaacgatctgcgctggatgaactccggcccgctggccggtctgggcgaaatcgagctgcaagctctgcagccgggctcttcgatcatgccaggcaaggtcaacccggtgatcccggaggccactgccatggtcgccgcccaagtgattggcaacgacgcgaccatcgccgtcgcaggtcaagccggtaacttcgagctgaacgtgatgctgccggtgatcgcccgcaacctgctggaaagcatcgagctgatggccaatgtcagccgcttgctggccgacaaagccatcgccagcttcaaggtcaacgaagacaaactcaaggaagccctcgcgcgcaacccgattctggtcacggcgttgaatccgatcatcggctacctcaaggccgccgaaatcgccaagaccgcctacaagcagggtcgtccaatcatcgatgtggcgctggagcacaccgacctgtcccgcgaccagcttgaagcgctgctggacccggaaaaactcaccgccggcggtatctga

SEQ ID NO: 45077 - protein, 459 aa, Pseudomonas putida KT2440
MMSDTRIERDSMGELQVPAQALYGAQTQRAVDNFPISGQRMPAQFIRALLLAKAAAAKANVELEQLSAGQGQAIVKAVEQLLAEDFIQHFPVDVFQTGSGTSSNMNANEVIATLATHVLGEAVNANDHVNCGQSSNDIIPTTIHVSAALALHEQLLPALAHLVQVIEVKSAQVHQYVKTGRTHLMDAMPVRMSQVLDGWAAQINAAKSHIEGVLPHLQALAQGGTAVGTGINAHPQFAVGFARQLSGLTKVEFTPGQNLFALIGSQDTAVALSGQLKTTAVALMKIANDLRWMNSGPLAGLGEIELQALQPGSSIMPGKVNPVIPEATAMVAAQVIGNDATIAVAGQAGNFELNVMLPVIARNLLESIELMANVSRLLADKAIASFKVNEDKLKEALARNPILVTALNPIIGYLKAAEIAKTAYKQGRPIIDVALEHTDLSRDQLEALLDPEKLTAGGI

SEQ ID NO: 45078 - DNA, 1437 bp, Pseudomonas putida KT2440
  CDS (1)..(1437): transl_table=11
atgatatacatcatgtcctctgctgcatcgttccgcgtcgaaaaagacttgttgggtacccttgaagttcctgcagatgcctactacggcatccagaccctgcgcgctgccaacaacttccacctctccggtgttccgctgtcgcactacccgaagctggtcgtggccctggccatggtcaagcaggccgctgccgacgccaaccgtgagctgggtcacctgagcgatgccaagcacgctgccatttccgcagcctgcgcccgcctgatcaaaggcgatttccacgaccagttcgtggtagacatgatccagggcggcgctggtacttctaccaacatgaacgccaacgaagtcattgccaacgttgcgctggaggccatgggccaccagaagggtgagtaccagtacctgcaccctaacaacgacgtgaacatggcgcagtcgaccaacgacgcctacccgaccgcaatccgcctgggcctgctgctgggccacgacgcgctgctggccagccttgatagcctgatccaggccttcgctgccaagggtaaagaattcgaccacgtactgaagatgggccgtacccagctgcaggacgccgtaccgatgaccctgggccaggaattccgcgccttcgccaccaccatgactgaagacctgcagcgcctgcgctcgctggctccggaactgctgaccgaaatcaacctgggcggtaccgccatcggtactggcatcaacgccgaccctggctaccaggccttggccgtacagcgcctggccaccatcagcggccacccgctggtaccggctgccgacctgatcgaagccacctccgacatgggcgccttcgtgctgttctccggcatgctcaagcgcaccgcggtcaagctgtcgaagatctgcaacgacctgcgcctgctgtccagcggcccacgcaccggcatcaacgagatcaacctgccagcgcgtcagccaggcagctcgatcatgccaggcaaggtcaacccggttattccagaagctgtgaaccaggtggccttcgccatcatgggcaacgacctggccctgaccgtcgccgccgaaggtggtcagctgcagctgaacgtgatggagccgctgatcgcctacaagatcttcgactcgatccgcctgctgcaacgcgccatggacatgctgcgcgagcactgcatcgtcggcatcaccgccaacgaacagcgctgccgtgaactggtcgagcactcgatcggcctggttaccgcactgaacccgtacatcggctacgaaaacgccacccgtattgcccgcgttgccctggaaagcggccgcggcgtactggaactggtgcgcgaagagaagctgctggacgacgcgatgctcgacgacatcctgcgtccggaaaacatgatcgctccacgtctggttccgctgaaggcgtaa

SEQ ID NO: 45079 - protein, 478 aa, Pseudomonas putida KT2440
MIYIMSSAASFRVEKDLLGTLEVPADAYYGIQTLRAANNFHLSGVPLSHYPKLVVALAMVKQAAADANRELGHLSDAKHAAISAACARLIKGDFHDQFVVDMIQGGAGTSTNMNANEVIANVALEAMGHQKGEYQYLHPNNDVNMAQSTNDAYPTAIRLGLLLGHDALLASLDSLIQAFAAKGKEFDHVLKMGRTQLQDAVPMTLGQEFRAFATTMTEDLQRLRSLAPELLTEINLGGTAIGTGINADPGYQALAVQRLATISGHPLVPAADLIEATSDMGAFVLFSGMLKRTAVKLSKICNDLRLLSSGPRTGINEINLPARQPGSSIMPGKVNPVIPEAVNQVAFAIMGNDLALTVAAEGGQLQLNVMEPLIAYKIFDSIRLLQRAMDMLREHCIVGITANEQRCRELVEHSIGLVTALNPYIGYENATRIARVALESGRGVLELVREEKLLDDAMLDDILRPENMIAPRLVPLKA

SEQ ID NO: 45080 - DNA, 1452 bp, Vibrio vulnificus CMCP6
  CDS (1)..(1452): transl_table=11
atggctaccctaactgaagctccaaaagcatcaactccggccactcgtattgaagaagatctattaggccaacgtcacgttccggctgacgcttactacggtattcacacgctgcgcgccatcgaaaacttcaacatctcaaatgtcactatttctgacgtaccagaattcgttcgtggcatggttatgaccaaaaaagccgctgcgcttgctaacaaagaattgggcgcaattcctaagaatgtcgcggattacatcattcaagcgtgtgacctaatgttggaaactggcaaatgcatggatcagttcccatcagacgtattccaaggcggtgcgggcacttctgtgaacatgaacaccaacgaagtacttgccaacattgctctagaattaatgggcaaagagaaaggcgattacgacgtggtgaacccaaacgatcacgtgaacaagagccaatcaaccaactgtgcctacccaacgggcttccgtattgcggtttacaacagcatccataaattgatggaagcgattgaatacctaaaaggtgcgtttgagctgaaatctcaagagtttaacggcatcctaaaaatgggccgtactcagttgcaagatgcggttccaatgacagtaggtcaagagtttcacgcttgggcagtgacgctaaacgaagagatccgtgcgctagactacacctcgaagctacttcttgaagtgaacctaggtgcaacggcaatcggtactggcttgaacacacctcctggttaccaagcacttgccgtgaaacacctagcggaagtgactggcctagcagtggttccagcagaagaccttatcgaagcaacttcagactgtggtgcttacgtaatggcacacggcgctctaaaacgcctagcggtgaaattgtctaagatctgtaacgacttgcgtctgctttcttctggtcctcgcgctggtttgaacgaacttaacttgccagaaatgcaagccggttcttcaatcatgccagcaaaagttaacccagttatcccagaagtggttaaccaagtgtgtttcaaagtactgggtaacgacaacacgatttctttcgcagccgaaggcggtcagctacagctgaacgtaatggagcctgtgattggtcaagcgatgtttgaatcgatttcactactacaaaacgcgtgtgtgaacctacgtgacaagtgtatcgacggcatcactgtgaacaaagagatctgtgaaaactacgtttacaactctatcggtatcgttacttacctaaacccatacatcggccaccacgaaggtgacatcgttggtaagatctgtgcggaaaccggtaagagcgtccgtgaagtagtgcttgagcgtggcttgctgacatctgaagagttggatgacatcctgtctgtgcagaacttcatgcacccaacttacaaagcaaaacgttacgaataa

SEQ ID NO: 45081 - protein, 483 aa, Vibrio vulnificus CMCP6
MATLTEAPKASTPATRIEEDLLGQRHVPADAYYGIHTLRAIENFNISNVTISDVPEFVRGMVMTKKAAALANKELGAIPKNVADYIIQACDLMLETGKCMDQFPSDVFQGGAGTSVNMNTNEVLANIALELMGKEKGDYDVVNPNDHVNKSQSTNCAYPTGFRIAVYNSIHKLMEAIEYLKGAFELKSQEFNGILKMGRTQLQDAVPMTVGQEFHAWAVTLNEEIRALDYTSKLLLEVNLGATAIGTGLNTPPGYQALAVKHLAEVTGLAVVPAEDLIEATSDCGAYVMAHGALKRLAVKLSKICNDLRLLSSGPRAGLNELNLPEMQAGSSIMPAKVNPVIPEVVNQVCFKVLGNDNTISFAAEGGQLQLNVMEPVIGQAMFESISLLQNACVNLRDKCIDGITVNKEICENYVYNSIGIVTYLNPYIGHHEGDIVGKICAETGKSVREVVLERGLLTSEELDDILSVQNFMHPTYKAKRYE

SEQ ID NO: 45082 - DNA, 1401 bp, Bradyrhizobium japonicum USDA 110
  CDS (1)..(1401): transl_table=11
atgagccgtacggagcaggatttcctcggacagcgtgagatcgccgacgatatttactacggcgtccagaccatccgcgggaaggagaacttccacatcaccggcattccgatgaaccaggagccttacttcgtgaaggcgctgggttacgtgaagaaggccgcggcgatggccaatcgcgatctcggcgtgatcgacgccagggtggccgatgcgatcatcctcggctgcgaccgcgtgattgccggcgacatgatggatcaattcgtcaccgacttcatccagggcggcgccggcacctcgaccaacatgaacgccaacgaggtgatcgccaacctcgcgctggaatcgctgggcttcaagaagggcgactaccagcacgtcagcccgaacgatcatgtgaactacggccagtcgaccaacgacacctatccgaccgcctttcgcctcgcgctgatcctgcggctcgagagctacatgacggcgctgcgccagctccaggaggcgttcttcgccaagggccgtgagttcgatcgcgtgctgaagatgggccgtacgcatcttcaggacgccgtgccgatgtcgctcggcgccgaattccgcggctggggtaccaccatgggcgaggaggtcgatcgtatctccgaggcacgggcgctgctgcgcgagatcaatctcggcgcgaccgcgatcggcacctccgtcaccgcggcgcacggctatcccaagctcgccgtccggcatctgagcgcgctgaccggcatcgacttcattctcgccggcgacctcgtcgaagcgacctcggacaccggtgcctatgtgcagctctccggcgtgctcaagcgcacggcgagcaagctgacaaaaatctgcaacgacatccggttgctggcttcgggcccgcgcgccggcttcaacgagatcaacctgccgcagctccagccgggctcctcgatcatgccggggaaggtcaatcccgtgatccccgaggtcgtcaaccagaccagcttccttgtcatcggcctcgacaccacggtgacgcttgccgcgtccgccggccagctccaactcaatgtgatggaaccggtgatctcgttcgcgctgttcttctcgatccgcaccatggagcgcgcggtcaacagcctgcgcgagaactgcgtcgtcggcatcaccgccaacgcggagcacacccgcaacatggtgctgaactcgctcggtatcgtcacggtgctgaagccgctgctcggctacaagcaatgcgccgagatcgcgcgcgagggttacaagagcggcaagtcgctgcaccagatcgtggtggtcgagcgcaagctgctgacgcaggagaagtgggacgagatgttctcgttcgagcggctgatcaatccggacctgattgcgtga

SEQ ID NO: 45083 - protein, 466 aa, Bradyrhizobium japonicum USDA 110
MSRTEQDFLGQREIADDIYYGVQTIRGKENFHITGIPMNQEPYFVKALGYVKKAAAMANRDLGVIDARVADAIILGCDRVIAGDMMDQFVTDFIQGGAGTSTNMNANEVIANLALESLGFKKGDYQHVSPNDHVNYGQSTNDTYPTAFRLALILRLESYMTALRQLQEAFFAKGREFDRVLKMGRTHLQDAVPMSLGAEFRGWGTTMGEEVDRISEARALLREINLGATAIGTSVTAAHGYPKLAVRHLSALTGIDFILAGDLVEATSDTGAYVQLSGVLKRTASKLTKICNDIRLLASGPRAGFNEINLPQLQPGSSIMPGKVNPVIPEVVNQTSFLVIGLDTTVTLAASAGQLQLNVMEPVISFALFFSIRTMERAVNSLRENCVVGITANAEHTRNMVLNSLGIVTVLKPLLGYKQCAEIAREGYKSGKSLHQIVVVERKLLTQEKWDEMFSFERLINPDLIA

SEQ ID NO: 45084 - DNA, 1413 bp, Clostridium tetani E88
  CDS (1)..(1413): transl_table=11
atgcaatacagattagaaagtgattcagtaggtgaaaaaagaataccaaaggatgcttattatggtgtgcaaagtcttagagcacaagagaattttatgataacaggaaaaaaagtccacacggaaatgataaaagcattagcagaggtaaaaaaagcaacagctatgacaaatatgcaagtggaacttttaagtaaaaaagcaggtaacgccattgtaaaagcttgtgatgaaataattgaaggaaatttacaagaacagtttataactgatcctatacaaggtggcgcaggaacatctatgaacatgaatttaaacgaagtaattgctaatagagcagtagaaatattaggtggggaaaagggagattatagtatagttcatcctaatgatcatgtaaatatgggacaatctactaacgatgttattcctacagggggaaaaatagcaactataagacttttagatagagcattaatgtcattagaaaatttagtagatgcacttacaaataaatctaaggaatttgatcatattataaaaatggggagaactcaaatgcaagatgctgtaccaataagattaggacaagaatttaaggcatattcaaatgctataaaaagggacatagttagaattaagagagcaaaagaagaattatatcatgtaagtattggggctacagctataggtacaggtataaatgctgatgaggagtatgtaaaaaatataacaccaaatttatcaaaagtaacaacacttagcctaattcaatgtgaagatttagtagatggaactcaaaatctagattgttttgcttcagtatcatcaaatttaaaggtttgtgctttaagtttatctaaaatagctaatgatttaagacttatgtcctcaggacctagaaccggttttggagaaataaatcttccagcaaaacaaaatgggtcatctataatgccaggaaaagtaaatccagtaatagctgaagttgtaaaccaagttgcatttagtattgtaggaaatgatgtaactattagcatggctgttgaagcaggacaattagaattaaacgcatttgagccggtgttatattataagttatttgaatctattgaaatattgaaaaatggtgtggatacatttattcataattgtataaatggtataacagcaaatgaggaaagatgtaaaaagttagtggataatagtgttggaataattactgcaatatgtccacatgtaggatataaaaaagcagctaaagtagcaaaaactgctatacagactggagaatctgtaaaggagcttgtattaaaagaaaatttattatcagaaaaagaattggatacaatacttgacccatttggaatgactaaaccaggaatatctgggaaagagctgttaaaaaagtaa

SEQ ID NO: 45085 - protein, 470 aa, Clostridium tetani E88
MQYRLESDSVGEKRIPKDAYYGVQSLRAQENFMITGKKVHTEMIKALAEVKKATAMTNMQVELLSKKAGNAIVKACDEIIEGNLQEQFITDPIQGGAGTSMNMNLNEVIANRAVEILGGEKGDYSIVHPNDHVNMGQSTNDVIPTGGKIATIRLLDRALMSLENLVDALTNKSKEFDHIIKMGRTQMQDAVPIRLGQEFKAYSNAIKRDIVRIKRAKEELYHVSIGATAIGTGINADEEYVKNITPNLSKVTTLSLIQCEDLVDGTQNLDCFASVSSNLKVCALSLSKIANDLRLMSSGPRTGFGEINLPAKQNGSSIMPGKVNPVIAEVVNQVAFSIVGNDVTISMAVEAGQLELNAFEPVLYYKLFESIEILKNGVDTFIHNCINGITANEERCKKLVDNSVGIITAICPHVGYKKAAKVAKTAIQTGESVKELVLKENLLSEKELDTILDPFGMTKPGISGKELLKK

SEQ ID NO: 45086 - DNA, 1401 bp, Lactobacillus plantarum WCFS1
  CDS (1)..(1401): transl_table=11
atgcgaattgaagctgattgtattggtaagttagctgttccggatgatgctttgtatggaattcatacgttacgtgccgttcataattttccgattacgacggaattgatgcatccactgatcatgcaaagtcttgttcaaatcaagaaagcggcggccagtgtgaatgcggctgccggaactttgtctaatgataaggcacacgccattattgcggcatgtaatcagttactactggggcgttacgcggataacttcattgtgccagcgattcaggggggtgctgggacctcggctaacatgaacgtcaatgaagtggtggctaatttggctcaccggttgatgccggcagtcgccgttcatcccaatgatgatgttaatcaatcacaatcaaccaatgatacttttccaacggccggtaaaatggcgctttgcatgcaactcccaggactattaacggcactcagccggttggtacaaacgttactggttaaatcgcagcgttatcaagatgccatcaaagttggccgaactcagcttgaagatgcggtaccgacgacgtacgggcgaacctttcatgcttattaccaattattcaagcgtgatttgacccgtgtacggcaggcgggcgaacatctccgaatcgtaaatttgggtgggactgcaatcggtaccggcatcaacgcgactcacacgtatcaacagcagattttagtgaaattaaatcaaaatactgatttagatttagtagccgcaccagacttgatcgatgcaacgcaaaactgcgatttgttcgtggaattctctgcggccatgaagacgttagccgttgacctttccaagtttagcaatgacttaagattgctggcgagcggcccacaagctggctttggtgaattgaatttgcccgcgcagcaagcaggctcttctattatgccaggtaaaatcaatccggttattccggaggttgttaaccaagttgcgtttgaagtgattggtcacgacacgacggtaacaatggcagcggaagcgggccaattggaattaaacgcttttgagccaattatgttacgggcattgctagccagtgagcagcatttacagcaggccttgactacattagtcgatcactgtgtgcggcaattgacggtcaatcgccaacgctgtgcagatcaagtggcacattcggccattacggcaactgttttggcgccataccttggttacgagacgactaccgcgctgattaaagaagcgctcaccactaaccaagcaattcctgaattattacatcgacgtcgcttgcttagcgatgatttggtcgagcagctgttttcaccggccggactaactcagccacgtccagaggttattgaacaactacgagcggttgcaaagtag

SEQ ID NO: 45087 - protein, 466 aa, Lactobacillus plantarum WCFS1
MRIEADCIGKLAVPDDALYGIHTLRAVHNFPITTELMHPLIMQSLVQIKKAAASVNAAAGTLSNDKAHAIIAACNQLLLGRYADNFIVPAIQGGAGTSANMNVNEVVANLAHRLMPAVAVHPNDDVNQSQSTNDTFPTAGKMALCMQLPGLLTALSRLVQTLLVKSQRYQDAIKVGRTQLEDAVPTTYGRTFHAYYQLFKRDLTRVRQAGEHLRIVNLGGTAIGTGINATHTYQQQILVKLNQNTDLDLVAAPDLIDATQNCDLFVEFSAAMKTLAVDLSKFSNDLRLLASGPQAGFGELNLPAQQAGSSIMPGKINPVIPEVVNQVAFEVIGHDTTVTMAAEAGQLELNAFEPIMLRALLASEQHLQQALTTLVDHCVRQLTVNRQRCADQVAHSAITATVLAPYLGYETTTALIKEALTTNQAIPELLHRRRLLSDDLVEQLFSPAGLTQPRPEVIEQLRAVAK

SEQ ID NO: 45088 - DNA, 1452 bp, Vibrio parahaemolyticus RIMD 2210633
  CDS (1)..(1452): transl_table=11
atggctaccctatctgatgctccaaaaacagcaaaccaagccactcgtattgaagaagatctattaggtcaacgtcatgtccctgctgatgcgtactacggcattcataccctacgtgcgatcgaaaacttcaacatctctaacgtaactatttctgacgtacctgagttcgtacgcggcatggtgatgacgaagaaagcagcggcgttggcgaacaaagaacttggcgctattcctaaagaagttgctaactacatcctagaagcgtgtgatttgatcctagaaacaggcaagtgtatggatcagttcccttcagacgtattccaaggcggcgcgggtacttccgttaacatgaacactaacgaagttatcgcgaacgttgcacttgaactaatgggcaaagaaaaaggccaatacgagttcatcaacccgaacgaccacgttaacaagagccaatctactaactgtgcgtacccaactggtttccgtatcgcggtttacaacagcgtacacaaactaatggaagcgattgaatacctaaaaggcgcattcgatcttaaagcaactgaattcaaagacgtattgaagatgggtcgtactcagcttcaagacgcggtaccaatgactgttggtcaagagttccacgcttgggctgtaacgctaaacgaagagattcgtgctctagattacacatctaaactcctactagaaatcaacctaggtgcaaccgcaatcggtactggtcttaacacaccaactggttaccaagctctagcagtaaaacacctagcggaagtaactggccttgacgttgtgcctgcagaagacctaatcgaagcgacttctgactgtggtgcatacgtaatgactcacggcgcgctaaaacgtctagcagtgaaactatcgaagatctgtaacgaccttcgtctactttcttctggtcctcgcgcgggtctaaacgaattgaacctacctgaaatgcaagcaggttcttcaatcatgccagcgaaagtaaacccagttatcccagaagtagtaaaccaagtttgcttcaaagttctaggtaacgacaacacggtttctttcgcagcagaaggcggtcagctacagctaaacgtaatggaaccagttatcgcacaaagcatgtttgagtctatctctctactacacaatgcgtgtgtgaacctacgtgataaatgtatcgacggcatcactgtaaacaaagaaatctgtgagaactacgtttacaactcaatcggtatcgtaacttacctaaacccatacattggccaccacgaaggtgacattgtcggtaagatttgtgcagaaactggtaagagtgttcgtgaagtcgtgcttgagcgcggcctgctaactgcagaagaacttgatgaaatcttaacagttgaaaacttcatgcatcctacttacaaagcgaaacgctacgagtaa

SEQ ID NO: 45089 - protein, 483 aa, Vibrio parahaemolyticus RIMD 2210633
MATLSDAPKTANQATRIEEDLLGQRHVPADAYYGIHTLRAIENFNISNVTISDVPEFVRGMVMTKKAAALANKELGAIPKEVANYILEACDLILETGKCMDQFPSDVFQGGAGTSVNMNTNEVIANVALELMGKEKGQYEFINPNDHVNKSQSTNCAYPTGFRIAVYNSVHKLMEAIEYLKGAFDLKATEFKDVLKMGRTQLQDAVPMTVGQEFHAWAVTLNEEIRALDYTSKLLLEINLGATAIGTGLNTPTGYQALAVKHLAEVTGLDVVPAEDLIEATSDCGAYVMTHGALKRLAVKLSKICNDLRLLSSGPRAGLNELNLPEMQAGSSIMPAKVNPVIPEVVNQVCFKVLGNDNTVSFAAEGGQLQLNVMEPVIAQSMFESISLLHNACVNLRDKCIDGITVNKEICENYVYNSIGIVTYLNPYIGHHEGDIVGKICAETGKSVREVVLERGLLTAEELDEILTVENFMHPTYKAKRYE

SEQ ID NO: 45090 - DNA, 1461 bp, Bacteroides thetaiotaomicron VPI-5482
  CDS (1)..(1461): transl_table=11
atgtgttattgttataaaacaaccgatatggaacagaaattatcaaaaaaaactcgtacagagagcgacttgataggtagtcgtgaagtgccggaaagtgcattgtatggagtacagacactccgtggtattgaaaactttcgcatcagcaagtttcatttgaatgagtatcccctgtttattcaggcattggccatcactaaaatgggagctgccgttgccaaccgtgaactggatttattgactgaggaacagacggatgccatactgaaggcttgtaaagaaatactggaaggaaaacatcatgaccaattccctgtagatatgatacagggtggagccggaaccaccaccaatatgaatgccaatgaagtgattgccaaccgtgcactggaactgatgggacatgcacgcggagagtatcactactgctcgcctaacgatcacgtcaatcgttcgcaatctaccaatgatgcgtatcctacagccattcacattggtctgtattatacccatcttaaattggtgaaacactttgcaacactgatcgaggctttccgaaagaaaggagcggagtttgcacacatcatcaagatgggacgtacccaactggaagatgccgtaccgatgacactaggacaaacctttaatggattcgcaagtattttggaacatgaactgaagaatctcgattttgccgcacaggattttctgacggtcaacatgggtgcgacagccatcggaaccggaattaccgccgaaccggaatatgcggaaaagtgcattgctgccctgcgcaagattacaggactggatatcaaactggcagatgacctgataggcgctacttcggatacttcctgcatggtaggatattcttcggccatgcggcgtgtagctgtcaagatgaacaagatttgtaatgatctgaggctattggcttccggtcctcgttgcggactgggagaaatcaatctgcctgccatgcagccgggctcttccattatgccgggaaaggtgaatcctgtcattccggaagtcatgaatcaggtctcttataaagtgataggaaacgacctttgtgtggctatgagtggagaggctgcgcagatggaactgaatgcgatggaacctgtcatggcacaatgctgttttgaatctgcggatttgttgatgaacggttttgatacattgcgtaccttatgtattgatggtatcacagccaatgaagaaaaatgccgtcgggatgtacacaacagtatcggagtagtgaccgcactgaatcccgtaattggctataaacattctacaaagatagcgaaggaggctctggaaacgggtaaaggagtgtatgagctggtgctggaacataacattctttccaaagaagacctggatacgatcttgaaaccggaaaatatgattaaaccggtgaaactggatattcatccgaatcattga

SEQ ID NO: 45091 - protein, 486 aa, Bacteroides thetaiotaomicron VPI-5482
MCYCYKTTDMEQKLSKKTRTESDLIGSREVPESALYGVQTLRGIENFRISKFHLNEYPLFIQALAITKMGAAVANRELDLLTEEQTDAILKACKEILEGKHHDQFPVDMIQGGAGTTTNMNANEVIANRALELMGHARGEYHYCSPNDHVNRSQSTNDAYPTAIHIGLYYTHLKLVKHFATLIEAFRKKGAEFAHIIKMGRTQLEDAVPMTLGQTFNGFASILEHELKNLDFAAQDFLTVNMGATAIGTGITAEPEYAEKCIAALRKITGLDIKLADDLIGATSDTSCMVGYSSAMRRVAVKMNKICNDLRLLASGPRCGLGEINLPAMQPGSSIMPGKVNPVIPEVMNQVSYKVIGNDLCVAMSGEAAQMELNAMEPVMAQCCFESADLLMNGFDTLRTLCIDGITANEEKCRRDVHNSIGVVTALNPVIGYKHSTKIAKEALETGKGVYELVLEHNILSKEDLDTILKPENMIKPVKLDIHPNH

SEQ ID NO: 45092 - DNA, 1413 bp, Streptomyces avermitilis MA-4680
  CDS (1)..(1413): transl_table=11
atgaccgccgcagcccaccgcagcgaacacgacctgctcggagaccgcgacgtccccgccgaggcgtactggggcatccactccctgcgcgccaaggagaacttccccatcacggggacgccgatctccacgtacccgcatctgatcgacgccctcgccgccgtgaaggaggccgccgccctcgccaacgaggaactcggcctgctggagccgaagaaggccgcggccatcgtggccgcctgccgggagatccgggacggcaagctgcacgaccagttcgtcgtcgacgtcatccagggcggcgcgggcacctcgacgaacatgaacgccaacgaggtcatcgccaaccgggcccttgaactgctcggccacgccaagggcgagtaccggcacctgcaccccaacgaggacgtcaacctcggccagtcgaccaacgacgtctacccgaccgccgtgaagatcgcgaccgtgttcgcggtgcgcggtctgctcaaggccatggcggtgctccaggacgccttcgcccgcaaggccgtcgagttccgtgacgtgctgaagatgggccgcacccagctccaggacgcggtgcccatgacgctggggcaggagttctccgcgtacgccgtcatgctcgacgaggaccgcagccggctcgccgaggccgtcgaactgatccacgagatcaacctgggcgccacggcgatcggcaccggactcaacgcgcccgccggatacgccgagtcggcccgccgccagctcgccgccctcaccgggctgccgctggtcaccgccgccaacctggtcgaggccacccaggactgcggtgccttcgtccagatgtcgggggtgctcaagcggatcgccgtcaagctctccaagagctgcaacgacctgcggctgctgtcgtccgggccgcgcgcggggctcaacgagatcaacctgccgccggtacaggccggttcgagcatcatgcccggcaaggtcaacccggtcatccccgaggtcgtcaaccaggtcgccttcgaggtcatcggcaacgacgtcgcgatcaccatggccgccgaggcggggcagctccagctcaacgccttcgagccgatcatcctgcactcgctgtccgagagcatcacgcatctgcgggccgcctgcctgacgctcgccgagcggtgcgtcgacgggatcacggccaacaccgaggaactgcgcgccgccgtggagaactccatcggcctggtgaccgccctcaacccgcacatcgggtacacggcggccaccgccatcgccaaggaggccctcgccaccgggcgcggggtcgccgaactcgtcctggagaagggcctgttgccggccgaccggctcgcgtcgctgctgcggcccgaggtgctcgcgggcagcggctccccgcagatctga

SEQ ID NO: 45093 - protein, 470 aa, Streptomyces avermitilis MA-4680
MTAAAHRSEHDLLGDRDVPAEAYWGIHSLRAKENFPITGTPISTYPHLIDALAAVKEAAALANEELGLLEPKKAAAIVAACREIRDGKLHDQFVVDVIQGGAGTSTNMNANEVIANRALELLGHAKGEYRHLHPNEDVNLGQSTNDVYPTAVKIATVFAVRGLLKAMAVLQDAFARKAVEFRDVLKMGRTQLQDAVPMTLGQEFSAYAVMLDEDRSRLAEAVELIHEINLGATAIGTGLNAPAGYAESARRQLAALTGLPLVTAANLVEATQDCGAFVQMSGVLKRIAVKLSKSCNDLRLLSSGPRAGLNEINLPPVQAGSSIMPGKVNPVIPEVVNQVAFEVIGNDVAITMAAEAGQLQLNAFEPIILHSLSESITHLRAACLTLAERCVDGITANTEELRAAVENSIGLVTALNPHIGYTAATAIAKEALATGRGVAELVLEKGLLPADRLASLLRPEVLAGSGSPQI

SEQ ID NO: 45094 - DNA, 1434 bp, Bacillus anthracis str. Ames
  CDS (1)..(1434): transl_table=11
atgatagcaacgaaggatatacgtatagaaaaagactttttaggtgaaaaggaagtaccaagtatagcttattacggtgtacaaacattacgcgctgtagaaaacttcccgattacaggatatcgcattcatccgtcactcattacggcaatggcaattgtgaaaaaagcggcggcacttgcaaatatggatactggatacttagcgaaagatattggacatgaaattgcggaggcagcgcaagagattgttgatggaaagttccatgatcaatttattgtggatccaatccaaggtggtgctggaacttctattaatatgaatacaaacgaagtaatcgctaatcgagcgttagaacgtatgggatatgaaaaaggcgagtatgcaaaaattagcccaaatacgcatgtaaacatggctcaatcaacgaatgatgcgtttccaacggggattcatattgcaactcttatgaggttagaagaacttcttattacaatggaagaacttcatgctgcttttcgtgcaaaagcaaaagagttcgatcacgtcattaaaatgggacgtacacatttacaagatgctgtgccgattcgtcttggtcaagaatttgaagcgtatagccgagtgcttgcgcgtgatataaaaagaattaaacagtctcgccaacatttatatgaagtgaatatgggggcgacagctgttggtacgggattaaatgcaaaccctacgtacattgaacaagtggttaaacacttgcgaacatttagcggatttccacttgttggtgcagagcatttggttgatgcaacgcaaaatacagatgcatacacagaagtatctgcagcattaaaagtatgtatgatgaatatgtctaaaattgcgaatgaccttcgtattatggcatctggtccacgtgttggattggcggaaattcaattaccagctcgccaaccaggttcatctattatgccgggtaaagtaaatcctgttatggcagaagtaattaatcaagtggctttccaagtaattggtaatgatcatacaatttgcttagcgtcagaagccggacaattggagctcaacgtaatggagccggtgcttgtatttaatttaattcaatctattagtattatgaataacggattccgtgtattccgtgaatattgtattaaaggaattacagcaaatgaagaattgctgaagcaatatgttgagaaaagtgttggaattattacagcagttaaccctcatattggttatgaagcagcatctcgcattgcacgtgaagcgattgaaacaggaaaatctgttagggagttatgtttagaacatggtgtactgacagaagaagaattggatattattttagatccattcgaaatgacgcatcctgaaattgctggggcttctttattaaaggataagaagatgtaa

SEQ ID NO: 45095 - protein, 477 aa, Bacillus anthracis str. Ames
MIATKDIRIEKDFLGEKEVPSIAYYGVQTLRAVENFPITGYRIHPSLITAMAIVKKAAALANMDTGYLAKDIGHEIAEAAQEIVDGKFHDQFIVDPIQGGAGTSINMNTNEVIANRALERMGYEKGEYAKISPNTHVNMAQSTNDAFPTGIHIATLMRLEELLITMEELHAAFRAKAKEFDHVIKMGRTHLQDAVPIRLGQEFEAYSRVLARDIKRIKQSRQHLYEVNMGATAVGTGLNANPTYIEQVVKHLRTFSGFPLVGAEHLVDATQNTDAYTEVSAALKVCMMNMSKIANDLRIMASGPRVGLAEIQLPARQPGSSIMPGKVNPVMAEVINQVAFQVIGNDHTICLASEAGQLELNVMEPVLVFNLIQSISIMNNGFRVFREYCIKGITANEELLKQYVEKSVGIITAVNPHIGYEAASRIAREAIETGKSVRELCLEHGVLTEEELDIILDPFEMTHPEIAGASLLKDKKM

SEQ ID NO: 45096 - DNA, 1533 bp, Arabidopsis thaliana
  CDS (1)..(1533)
atggccgctttgacaatgcagtttgaaggagagaagaaaaacgtatccgaagttgcagacgtaaccctcaagcaagaagatgaacaacaagaacgtagatcttattcgacgccgtttagggaagagagagacacctttggcccgatccaagttccttccgataaattatggggagcacagacgcagagatcgcttcagaacttcgagattggtggtgaccgcgagcgaatgcccgaaccaatcgtccgagcttttggtgtcttgaagaaatgtgctgccaaggttaacatggagtatggtcttgatccaatgattggggaagccataatggaagctgcacaagaagtagcagaaggaaagctcaatgatcatttccctcttgttgtatggcaaactggtagtgggacgcagagtaatatgaatgctaatgaggtcattgccaatagagcagctgagattcttggtcacaaacgtggtgaaaaaattgtgcacccaaatgaccatgtgaacagatcacaatcttctaatgacacttttccaactgtcatgcacattgcagctgcaaccgagattacttcgaggctaatccctagtttgaaaaatttgcatagctctttggaatctaagtccttcgagtttaaagatatagtgaaaatcggaagaactcatactcaagatgctacacctttgacattaggacaagaatttggtggctatgctactcaagttgagtatggacttaatagagtcgcatgtactctaccccgcatctatcagcttgcacaaggtggaactgctgttgggaccggattaaacactaagaaagggtttgatgtaaagatcgctgctgcagtagctgaagaaacaaacttgccattcgtcaccgcagaaaacaagtttgaagctctggctgcacacgatgcttgtgttgaaacaagtggatctcttaacacaatcgccacatcattgatgaagattgccaatgatatacgttttcttggaagtggtccaagatgtggtcttggtgaactttctctgcctgagaatgaaccaggaagcagtattatgcctggaaaggtaaatcctacacagtgtgaggccttgactatggtttgtgctcaagttatgggaaaccatgtagccgtgacaattggtgggtcgaatggtcattttgaattgaatgtattcaagccggttatcgcaagcgctctcttacattccattagactaatagcagatgcttcagcttcatttgagaaaaactgtgttagaggcattgaggccaacagagaaaggatctcaaagctattgcacgagtctcttatgcttgtgacatcattgaatcctaaaattggctatgacaatgctgcagcagtagccaaaagagctcacaaagaaggatgcacattaaaggtaaacaataaactattaacgttttcatcactaaataaatcggaatttaaacccatttttagcaagagaaaacatgttcatgtttgttacaatatatttgttgttctattttggatttaa

SEQ ID NO: 45097 - protein, 510 aa, Arabidopsis thaliana
MAALTMQFEGEKKNVSEVADVTLKQEDEQQERRSYSTPFREERDTFGPIQVPSDKLWGAQTQRSLQNFEIGGDRERMPEPIVRAFGVLKKCAAKVNMEYGLDPMIGEAIMEAAQEVAEGKLNDHFPLVVWQTGSGTQSNMNANEVIANRAAEILGHKRGEKIVHPNDHVNRSQSSNDTFPTVMHIAAATEITSRLIPSLKNLHSSLESKSFEFKDIVKIGRTHTQDATPLTLGQEFGGYATQVEYGLNRVACTLPRIYQLAQGGTAVGTGLNTKKGFDVKIAAAVAEETNLPFVTAENKFEALAAHDACVETSGSLNTIATSLMKIANDIRFLGSGPRCGLGELSLPENEPGSSIMPGKVNPTQCEALTMVCAQVMGNHVAVTIGGSNGHFELNVFKPVIASALLHSIRLIADASASFEKNCVRGIEANRERISKLLHESLMLVTSLNPKIGYDNAAAVAKRAHKEGCTLKVNNKLLTFSSLNKSEFKPIFSKRKHVHVCYNIFVVLFWI

SEQ ID NO: 45098 - DNA, 1440 bp, Wigglesworthia glossinidia endosymbiont of Glossina brevipalpis
  CDS (1)..(1440): transl_table=11
atgttaaattctattcgaatcgaacaagatatgattggaatacgtgaaatttcaaatgaattttattatggcattcatactcttagagctatagaaaatttcaaaattagtaaaaatactattaacgattatcctgaattaatcaagggaatggtgatggtgaaaaaagcatctgctcttgcaaacaaacatttaaaagttttatcagaaaaaaacgcaaaaattatagtaagagcttgtgattgtattttaaaaaaacaaaatatttatcttgatcaatttccagtagacgcttttcaaggaggagctggaacatctgtaaatatgaatgttaatgaagttttgactaatattggattagaaataatgggtaagaaaaaaggagattataagtttcttaatccaaatgatcatttaaatttaagtcaatccacaaacgatgcatatccaactggacttcgtttatcaatatataaatctatatacaaattaattaaatcaatcatattaattgaagatagtttttataaaaaatcaaaagaattttctaaaataataaaaatgggtagaacgcaattacaagatgctgtcccaatgacattgggtcaagaattttatgcttttaaaacatctttaaaaaaagaaagaataaatttaattaatacatctaaattattattagatattaatcttggaggaacagcaataggaactaaattaaatactcctaaaggatatcaaaaagtagttgtaaaacaattatcaattgttagcggaatacagttcaatccagtaaaagatcttatagaatctacatatgattgtggaatatatactattgtgcatggaaatttaaaaaatttagctattagattatctaaaatttgtaatgatttaagattattgtcatctgggccaagagctgggttaaatgaaataaatttacctgaacttcaagctggatcttcgataatgcctgctaaagttaacccagttttaccagaagtagttaatcaggtatgttttaaggtatgtggaaatgatatttgcgtaatgatggcagcagagtcaggtcaattacaattaaatgctatggaaccagtaataagtcaatctatatttgaatcaataaatattctcaaaaatgctattttatctttaaaagaaaaatgtatagatggaatcacagcaaataaaaaaatttgtgaatcttatgtattaaattctataggaatagttgcatatttaaatccttttattggtcatcataacggagatataatcggaaaaatttgttctaaaagcggtagaagtgtaaaagaagttgtattggaaaaaggatttttaacagaaaaagaacttaatgatattttttcatttaataatttaatacatccaaaatataaaaataaaaatagttctgaagatttatcaatctaa

SEQ ID NO: 45099 - protein, 479 aa, Wigglesworthia glossinidia endosymbiont of Glossina brevipalpis
MLNSIRIEQDMIGIREISNEFYYGIHTLRAIENFKISKNTINDYPELIKGMVMVKKASALANKHLKVLSEKNAKIIVRACDCILKKQNIYLDQFPVDAFQGGAGTSVNMNVNEVLTNIGLEIMGKKKGDYKFLNPNDHLNLSQSTNDAYPTGLRLSIYKSIYKLIKSIILIEDSFYKKSKEFSKIIKMGRTQLQDAVPMTLGQEFYAFKTSLKKERINLINTSKLLLDINLGGTAIGTKLNTPKGYQKVVVKQLSIVSGIQFNPVKDLIESTYDCGIYTIVHGNLKNLAIRLSKICNDLRLLSSGPRAGLNEINLPELQAGSSIMPAKVNPVLPEVVNQVCFKVCGNDICVMMAAESGQLQLNAMEPVISQSIFESINILKNAILSLKEKCIDGITANKKICESYVLNSIGIVAYLNPFIGHHNGDIIGKICSKSGRSVKEVVLEKGFLTEKELNDIFSFNNLIHPKYKNKNSSEDLSI

SEQ ID NO: 45100 - DNA, 1428 bp, Haemophilus ducreyi 35000HP
  CDS (1)..(1428): transl_table=11
atgagtaatgtgcgtattgaagtggatttactcggcgaaagagaagtgccaaatcaggtctattggggaattcatactttaagagcggttgaaaattttaatatttctaacaatactatttcagatatacctgaatttgtccgtggtatggttatggtgaaaaaagccaccgcattagcaaatggcgaattaggtgcaattcccaaaaaagtggcacaggctattgtgcaagcgtgtgatgaaattttagtgaatggtcgttgtatggatcaatttccgtcagatgtttatcaaggcggtgccggtacctcggttaatatgaacactaatgaggttattgctaacttagcgcttgaaatgctagggcataaaaaaggggaatatcatattattgatccaatggatcacgttaatgctagtcaatcaacgaatgatgcttatcctacaggattccgcattgctgtgtataacagcttaatgcatttaattgaacaagtcctttatttacaacagggctttgaagagaaagcggtcgaatttgccaatgttcttaaaatggggcggacacagttgcaagatgcagtgcctatgacagttggtcaagaatttaaagcatttgcggtgttattagcagaagaagtacgtaatttaaaacgtactgctcaattattacttgaggttaacttaggcgcaactgcaattggcacggggttaaatacaccggcaggttattcagaattagcggtaaaatatttatcagaagtaacaggtttagcttgtgttttatcagaaaatttaattgaagcaacttcagattgtggtgcttatgtaatggtacacggtgcgttgaaacgtactgcggttaagttatctaaagtatgtaatgatttacgcttactttcatctggacctagagcgggtttgaatgaaattaatctgccggaattgcaagcgggttcttctattatgccagctaaagtaaatccagtggtacctgaggtggttaatcaagtatgctttaaagtgataggtaatgatacaaccgttacttttgcagcagaagcggggcagttacaattgaatgtaatggagccggtgattggacaggcaatgtttgaatctattgccattttagcaaatgcgtgtgtcaatttacgtgataaatgcgtcgatggcatcagtgtcaataaagaaatctgcgaaaattttgtgtttaattcaattgggattgtcacttatcttaatccatttattggccatcataatggcgatattgtgggtaagatttgtgctgaaacggggaaaggtgtacgtgaagtcattctcgaaaaaggattgctcaccgaagctcagttagatgatattctttcagtggaaaatttaatgcacccaatttataaagcaaaacggtttacggaagatgaataa

SEQ ID NO: 45101 - protein, 475 aa, Haemophilus ducreyi 35000HP
MSNVRIEVDLLGEREVPNQVYWGIHTLRAVENFNISNNTISDIPEFVRGMVMVKKATALANGELGAIPKKVAQAIVQACDEILVNGRCMDQFPSDVYQGGAGTSVNMNTNEVIANLALEMLGHKKGEYHIIDPMDHVNASQSTNDAYPTGFRIAVYNSLMHLIEQVLYLQQGFEEKAVEFANVLKMGRTQLQDAVPMTVGQEFKAFAVLLAEEVRNLKRTAQLLLEVNLGATAIGTGLNTPAGYSELAVKYLSEVTGLACVLSENLIEATSDCGAYVMVHGALKRTAVKLSKVCNDLRLLSSGPRAGLNEINLPELQAGSSIMPAKVNPVVPEVVNQVCFKVIGNDTTVTFAAEAGQLQLNVMEPVIGQAMFESIAILANACVNLRDKCVDGISVNKEICENFVFNSIGIVTYLNPFIGHHNGDIVGKICAETGKGVREVILEKGLLTEAQLDDILSVENLMHPIYKAKRFTEDE

SEQ ID NO: 45102 - DNA, 1404 bp, Chromobacterium violaceum ATCC 12472
  CDS (1)..(1404): transl_table=11
atgtccacccgtatcgaacacgacctgctcggcaaccgcgacgtgccggccgacgcctactggggcgtgcacacgctgcgcgccatcgaaaacttcccgatcaccggccagaccatcgccggctacggcgacctgatccgcgcgctggcctgcatcaagcaagccgccgcccaggccaaccgcgatctcggcattctcgaccccaagctggcccaggccatcgtcgacgcctgcgaggagatccgcgccggcaagctgcacgaccagttcgtcgtcgacgtgatccagggcggcgccggcacttccaccaatatgaacgccaacgaggtgatcgccaaccgcgcgctggagctgctgggccacgccaagggcgagtaccagcatctgcacccgaacgagcacgtcaacctgtgccagagcaccaacgacgtctacccgaccgcgctgcgcctggccgccttctggggcgtgctgaagctggtgtcgcggatggaaacgctgcgcaaggccttcgaggacaaggccgaggaattcaaggacatcctgaagatgggccgcacccagctgcaggacgcggtgccgatgacgctgggccaggagttccagacctatgctgtgatgctgggcgaggacgagcagcgtctgaaggaagccagcgccctgatgctggagatcaacctcggcgccaccgcgatcggcaccggcatcaccgcccacccggactacgccaagctggtgtgcctgcatctgtccgagctggtgggcagccagctgatcaccgcgcccaacctgatcgaggccacccaggactgcggcgccttcgtccagctgtccggcgtgatcaagcgcgcggcggtcaaactgtccaagacctgcaacgacctgcgcctgctgtcgtccggcccgcgcgcaggcttcggcgagatcaatctgccggcgcgccaggccggctcgtccatcatgccgggcaaggtcaatccggtgattccggaagtggtgagccaggtggcgtatgaagtcatcggcaacgacgtcaccatcaccatggcggccgaggccggccagctgcagctgaacgccttcgagccggtgatcgcctacagcctgttccgcagcgccggccacctggccaacgcctgcgacacgctgaccgagcactgcgtcaagggcatcaccgccaaccgcgagcggctgcgcctgagcgtggaaagctcgatcggcctggtcaccgcgctgaacccggtgatcggctacgaggccgccacccgcgtcgccgccgaagcccacgccaacggcagcagcgtcgccgacgtggtgctggcccatggcctgctcacccgcgagcagctggacgacatcctgcagccggagaccctgacccggccgcgctgggtgacgctgtaa

SEQ ID NO: 45103 - protein, 467 aa, Chromobacterium violaceum ATCC 12472
MSTRIEHDLLGNRDVPADAYWGVHTLRAIENFPITGQTIAGYGDLIRALACIKQAAAQANRDLGILDPKLAQAIVDACEEIRAGKLHDQFVVDVIQGGAGTSTNMNANEVIANRALELLGHAKGEYQHLHPNEHVNLCQSTNDVYPTALRLAAFWGVLKLVSRMETLRKAFEDKAEEFKDILKMGRTQLQDAVPMTLGQEFQTYAVMLGEDEQRLKEASALMLEINLGATAIGTGITAHPDYAKLVCLHLSELVGSQLITAPNLIEATQDCGAFVQLSGVIKRAAVKLSKTCNDLRLLSSGPRAGFGEINLPARQAGSSIMPGKVNPVIPEVVSQVAYEVIGNDVTITMAAEAGQLQLNAFEPVIAYSLFRSAGHLANACDTLTEHCVKGITANRERLRLSVESSIGLVTALNPVIGYEAATRVAAEAHANGSSVADVVLAHGLLTREQLDDILQPETLTRPRWVTL

SEQ ID NO: 45104 - DNA, 1428 bp, Porphyromonas gingivalis W83
  CDS (1)..(1428): transl_table=11
atggaattaaaaaagactacacgtatcgaaagcgatcttatcggagaacgcgagatacccggccatattctatatggcgtacagacgctgcgtggtatagaaaacttccccatcagcaattttcatctgaacgattaccccctgtttatcaatggcttggccatgacgaaatgggcggctgcagtggccaatcatcggctcggtctcttgaccgatgcccagaaagacggcatcgtgaaagcctgcaaggaaatcctcgaaggcaagcaccacgagcatttccccgtggatatgatccaaggcggtgcaggaacgaccacgaatatgaacgccaacgaggtgatttgcaaccgtgccttgcagatcatgggacacgaggcaggcgaatttgcccacctctcccccaatgatcacgtgaactgctcgcagagcaccaacgatgcttatccgacagctatccacctcggcctttacgctacatatctgaagttccgcccccatcttctggatctcatcgagtcgctgcgtgccaagagccgcgaatttgcccatgtactcaagatgggacgtactcagctcgaagatgctgtgcctatgtctctgggacagacgttcggcggatttgcttccatcttgcaggatgaaatcaaaaatctggactttgccgccgaagagttcctgaccgtgaatatgggtgctacggctatcggcacgggtatctgcgcccagccgaactatgccgaatactgcatagaggctcttcgtgaagtcaccggctgggacattcgtctcagtgccgatctggtaggggcaacgagcgacacttccgtgatggtaggatattcgtctgccttgcgccgtatctgtgtgaaggtgaacaagatttgcaacgacctgcgtctccttgccagcggtcctcgttgcggtttgcacgaattcaatctgcctgccatgcagccgggttcgtccatcatgccgggtaaggtgaatcctgtgattccggaagtaatgaatcagatctgctataaggtgatgggcaacgacctgaccgtaacgatggcaggcgatgcagcccaaatggagctgaacgctatggagcctgtgatggcacaatgctgcttcgaaagttcggatctgctcatgaacggattcgatacgctgcgtacactctgtatcgatggcatcacggccaacgaggacgaatgccgtgggtatatccgcaacagcatcggtatcgttacggctctgaatccgatcatcggctataagaattcgaccaagatcgccaaggaagcgatggaaacgggacgtggcgtttacgacctcgttttggaacacgacatcctgtcgaaagaggatctggatacgatactctcaccggagaatatgatcaagccggtcaagctcgacatcaaaccgcgtcgctga

SEQ ID NO: 45105 - protein, 475 aa, Porphyromonas gingivalis W83
MELKKTTRIESDLIGEREIPGHILYGVQTLRGIENFPISNFHLNDYPLFINGLAMTKWAAAVANHRLGLLTDAQKDGIVKACKEILEGKHHEHFPVDMIQGGAGTTTNMNANEVICNRALQIMGHEAGEFAHLSPNDHVNCSQSTNDAYPTAIHLGLYATYLKFRPHLLDLIESLRAKSREFAHVLKMGRTQLEDAVPMSLGQTFGGFASILQDEIKNLDFAAEEFLTVNMGATAIGTGICAQPNYAEYCIEALREVTGWDIRLSADLVGATSDTSVMVGYSSALRRICVKVNKICNDLRLLASGPRCGLHEFNLPAMQPGSSIMPGKVNPVIPEVMNQICYKVMGNDLTVTMAGDAAQMELNAMEPVMAQCCFESSDLLMNGFDTLRTLCIDGITANEDECRGYIRNSIGIVTALNPIIGYKNSTKIAKEAMETGRGVYDLVLEHDILSKEDLDTILSPENMIKPVKLDIKPRR

SEQ ID NO: 45106 - DNA, 1410 bp, Gloeobacter violaceus PCC 7421
  CDS (1)..(1410): transl_table=11
atgcaaccaagaaccgagcgcgactcgatgggcgagcgcaccctggaggccggagcctattacggcatccagaccctgcgcgccgtcgagaatttcccgattagcggcatcggcccgctgcccgacttcgtgcgcgcctgcaccctcatcaaacgggccgccgcccgggtgaacgccgagcttgaatgcatccccaaagacgtggcccaggcgatcattggcgcctcggacgaggtgctggcgggccagtggagcgatcagttcgtggtcgatatctttcaggcgggcgccggcacctcccaccacatgaatatcaacgaggtgctcgccaaccgcgccctcgagctgctgggttacgcgcggggcgactacaagcaggtcaaccccaacgatcacgtcaactacggccagtccaccaacgacgtgatccccactgccatccgtctgggagcgctctttgcaagcgcgccgctgttggaggcgctaagcaccctgcaacaaagtttcgaggccaagggcaacgagtttttgcccatcgtcaaatccgggcgcacccacctgcaggacgcggtgcccataaggcttggggatgaatttctggcctatgcccagatcgtcggcgagcaccgcgcccgcatcgaaaccgcctgccgcgagctattggtgctgggcctggggggcagcgccgccggtaccggcctcaacacccatccccagtaccgggtgcgcgtcgtcgccgaactggcccggctgacagggcaccccctcacccccgccccccgaccgatggcggcaatgcagagcatggcgcccttcgtggccgtctccggcagcctgcgcaatctggcccaggatctggtcaagatcgcgggcgatctgcgcctgatggattccggccccaagacgggcctgcgtgagatcgaactgccgccggtgcagccgggttcgtcgatcatgcccggcaagtacaacccggtgctgtgcgagatgctcacgatggtcgcctttcaggtgatgggctacgaccaggcgattgccttggccgcccaggcgggccaactggaattgaacgtgatgatgccgctgatcgcctacgacttgctccacagcttcacgatcctcaccaacgccctcacggtctttcgagcgcgctgcatcgacggcatccaggcccaacccgagcgctgcctggcctacgccgagggctcgatcgccctggtgaccgctctcaatccccacatcggctatctcaacgccgccgccgtcgccaaagaatcgctcgcgaccggccgctccctgcgcgagatcgttctcgagcgggggctactgaccgaagcgcaactcgccgagatcctcgaccttgaagcgatgagccggttgccggagacgcaggccgcctcagaccggtag

SEQ ID NO: 45107 - protein, 469 aa, Gloeobacter violaceus PCC 7421
MQPRTERDSMGERTLEAGAYYGIQTLRAVENFPISGIGPLPDFVRACTLIKRAAARVNAELECIPKDVAQAIIGASDEVLAGQWSDQFVVDIFQAGAGTSHHMNINEVLANRALELLGYARGDYKQVNPNDHVNYGQSTNDVIPTAIRLGALFASAPLLEALSTLQQSFEAKGNEFLPIVKSGRTHLQDAVPIRLGDEFLAYAQIVGEHRARIETACRELLVLGLGGSAAGTGLNTHPQYRVRVVAELARLTGHPLTPAPRPMAAMQSMAPFVAVSGSLRNLAQDLVKIAGDLRLMDSGPKTGLREIELPPVQPGSSIMPGKYNPVLCEMLTMVAFQVMGYDQAIALAAQAGQLELNVMMPLIAYDLLHSFTILTNALTVFRARCIDGIQAQPERCLAYAEGSIALVTALNPHIGYLNAAAVAKESLATGRSLREIVLERGLLTEAQLAEILDLEAMSRLPETQAASDR

SEQ ID NO: 45108 - DNA, 1425 bp, Photorhabdus luminescens subsp. laumondii TTO1
  CDS (1)..(1425): transl_table=11
atgtcaaacaacattcgtatcgaagaagacctgttaggtaaacgagaagtccctgctgaagcctattatggtattcacaccttacgtgcgattgaaaacttccatatcagtaacaacaccattaatgatgtacccgaattcatccgtggcatggtgatggtaaaaaaagccgcagccttagctaacaaagagctacaaactattcctaaaaaaattgctgacatcatcatcaaagcatgtgacgaagtgctctataccggcagatgcatggatcagtttccggtcgatgtgtttcaaggcggtgccggtacttcactcaacatgaataccaatgaggttctggcaaacattggtctggaactgttaggccataaaaaaggcgaatatgagtacctgaatcccaatgaccatctgaataaaagccagtcaactaacgacgcctacccaactggcttccgcatcgcggtttataactccatcctgaaactgatcgagtctattgagctgttaattgtgggtttcgataaaaaatccagagaatttaatgacattctaaaaatgggtcgtacccaattacaggatgctgttcccatgacactggggcaggaattcaacgcattctctatcctgttgaaagaagaagttaaaaacctcaaccgaacctctgaattactgctggaaattaaccttggcgctactgctatcggtacccgcttgaatacagcaccaggttatcagaaattggcggttgaaaaactggcggaagtttcaggtttaccttgcgtaccagccgaagacctgattgaagccacttctgactgtggggcttacgttatggtccacggtgctctgaagcgcctggctgtcaaactgtctaaaatttgtaatgacctgcgtttgctttcttctggccctcgtgctggcctgaatgaaatcaacctaccagaattacaggcaggctcttctattatgccggcaaaagtgaacccggttattccagaagttgtgaatcaggtttgcttcaaagttattggtaacgatatttgtgttactatggcgtccgaagcaggccagttacagctcaatgtaatggaacctgctatcggtcaggccatgtttgaatctatctccctgctaagcaacgcttgccgcaacctggtagaaaaatgcgttaatggcatcacggctaacaaagaagtttgcgaaaatttcgtattcaactcgatcggtatcgtgacatatctgaacccattcatcggtcaccataatggtgacattgttggtaaaatttgtgctgaaaccggtaaaagtgttcgtgaagtcgttctggaacgaggcttactgaccgaaactcaattggatgacatcttctctgtagagaacctaaaatgcccatcttacaaggcaaaacgttttgacgattaa

SEQ ID NO: 45109 - protein, 474 aa, Photorhabdus luminescens subsp. laumondii TTO1
MSNNIRIEEDLLGKREVPAEAYYGIHTLRAIENFHISNNTINDVPEFIRGMVMVKKAAALANKELQTIPKKIADIIIKACDEVLYTGRCMDQFPVDVFQGGAGTSLNMNTNEVLANIGLELLGHKKGEYEYLNPNDHLNKSQSTNDAYPTGFRIAVYNSILKLIESIELLIVGFDKKSREFNDILKMGRTQLQDAVPMTLGQEFNAFSILLKEEVKNLNRTSELLLEINLGATAIGTRLNTAPGYQKLAVEKLAEVSGLPCVPAEDLIEATSDCGAYVMVHGALKRLAVKLSKICNDLRLLSSGPRAGLNEINLPELQAGSSIMPAKVNPVIPEVVNQVCFKVIGNDICVTMASEAGQLQLNVMEPAIGQAMFESISLLSNACRNLVEKCVNGITANKEVCENFVFNSIGIVTYLNPFIGHHNGDIVGKICAETGKSVREVVLERGLLTETQLDDIFSVENLKCPSYKAKRFDD

SEQ ID NO: 45110 - DNA, 1452 bp, Vibrio vulnificus YJ016
  CDS (1)..(1452): transl_table=11
atggctaccctaactgaagctccaaaagcatcaactccggccactcgtattgaagaagatctattaggccaacgtcacgttccggctgacgcttactacggtattcacacgctgcgcgccatcgaaaacttcaacatctcaaatgtcactatttctgacgtaccagaattcgttcgtggcatggttatgaccaaaaaagccgctgcgcttgctaacaaagaattgggcgcaattcctaagaatgtcgcggattacatcattcaagcgtgtgacctaatgttggaaactggcaaatgcatggatcagttcccatcagacgtattccaaggcggtgcgggcacttctgtgaacatgaacaccaacgaagtacttgccaacattgctctagaattaatgggcaaagagaaaggcgattacgacgtggtgaacccaaacgatcacgtgaacaagagccaatcaaccaactgtgcctacccaacaggcttccgtatcgcggtttacaacagcatccataaattgatggaagcgattgaatacctaaaaggtgcgtttgagctgaaatctcaagagtttaacgacatcctaaaaatgggccgtactcagttgcaagatgcagttccaatgactgtcggtcaagagttccacgcttgggcagtgacactaaacgaagagatccgtgcgctagactacacctcgaagctacttcttgaagtgaacctaggtgcaacggcaatcggtactggcttaaacacacctcctggttaccaagcacttgccgtgaaacacctagcggaagtaactggcctagaagtggttccagcagaagaccttatcgaagcaacttcagactgtggtgcttacgtaatggcacacggcgctctaaaacgcctagcggtgaaattgtctaagatctgtaacgacttgcgtctgctttcttctggtcctcgcgctggtttgaacgaacttaacttgccagaaatgcaagccggttcttcaatcatgccagcaaaagttaacccagttatcccagaagtggttaaccaagtgtgtttcaaagtactgggtaacgacaacacgatttctttcgcagccgaaggcggtcagctacagctgaacgtaatggagcctgtgattggtcaagcgatgtttgaatcgatttcactactacaaaacgcgtgtgtgaacctacgtgacaagtgtatcgacggcatcactgtgaacaaagagatctgtgaaaactacgtttacaactctatcggtatcgttacttacctaaacccatacatcggccaccacgaaggtgacatcgttggtaagatctgtgcggaaaccggtaagagcgtccgtgaagtagtgcttgagcgtggcttgctgacatctgaagagttggatgacatcctgtctgtgcagaacttcatgcacccaacttacaaagcaaaacgttacgaataa

SEQ ID NO: 45111 - protein, 483 aa, Vibrio vulnificus YJ016
MATLTEAPKASTPATRIEEDLLGQRHVPADAYYGIHTLRAIENFNISNVTISDVPEFVRGMVMTKKAAALANKELGAIPKNVADYIIQACDLMLETGKCMDQFPSDVFQGGAGTSVNMNTNEVLANIALELMGKEKGDYDVVNPNDHVNKSQSTNCAYPTGFRIAVYNSIHKLMEAIEYLKGAFELKSQEFNDILKMGRTQLQDAVPMTVGQEFHAWAVTLNEEIRALDYTSKLLLEVNLGATAIGTGLNTPPGYQALAVKHLAEVTGLEVVPAEDLIEATSDCGAYVMAHGALKRLAVKLSKICNDLRLLSSGPRAGLNELNLPEMQAGSSIMPAKVNPVIPEVVNQVCFKVLGNDNTISFAAEGGQLQLNVMEPVIGQAMFESISLLQNACVNLRDKCIDGITVNKEICENYVYNSIGIVTYLNPYIGHHEGDIVGKICAETGKSVREVVLERGLLTSEELDDILSVQNFMHPTYKAKRYE

SEQ ID NO: 45112 - DNA, 1575 bp, Corynebacterium diphtheriae NCTC 13129
  CDS (1)..(1575): transl_table=11
atggcttcccaagctaaaaacacaaagggctcgaaaaacgccgaggtaaccaatgatgttctcgacggaaaaaccgaaggcaccgcggagaaagtaaacgatgcccccattgcatcagatgtaacaacaaagcacgccactaagaaagctgcaccaggattccgtatcgaagaagacctcttgggtgagatggaagttcccgacgaggtttattatggcgtccatactcttcgtgccatcgacaattacaagatctctagcaccaccattaatgatgtgccagagttcattcgtggcatggttcaggtaaaaaaggccaccgcgcttgccaaccgacgactccatactctgccgaaagacaagtgcgatgccattgtatgggcttgcgatcaaatcttggatcacggtcgttgcatggatcagttcccaatcgatgtgttccaaggaggcgctggcacaagcgtcaacatgaacactaatgaggtaatcgccaacctcgcactggagcatctgggtaagccaaagggatcctatgacatcatcaacccaaacgatgacgtcaacatgagccaatcaactaacgatgcctacccaactggattccgtttgggtgtctatgaggcgatgcaggaactgatcactcgtattgacaatctacagttcgcattccatgccaaaggtgatgagttcaccgatattctgaagatgggtcgcacacagctccaagatgctgtaccgatgactttaggcgaggaattccaggcattcgctcataacttggctgaggagcaaagcgttctgcgtatggcttccgaccggctcaaggaagttaacttgggcgcaaccgctatcggtactggcttgaacaccccagccggttaccgttatcaggttgtagccgcattgtccgagtgcaccggcttggaaattaagtctgcacgcgatcttattgaagctacttcagacactggtgcgtatgtccttgcccatgcagctgttaagcgtactgcgatgaagctttctaagatctgcaatgatcttcgactgctcagctccggaccacgcgcaggtctcaacgagattaatcttcccgctcgagctgcaggttcatcgatcatgccggcaaaggtcaacccagttatccctgaggttgttaaccaggtttgcttcaaggtttttggtaacgatcttactgtcaccatggcggcagaagctggccagctccagctcaatgtgatggaaccggttatcggccaagccttgtttgagtcgattcgaattctcggtaatgctgcagtcacccttcagcacaagtgtgtcgaagggattaccgcaaatgctgacgtatgtcgcgcctacgtagataattccattggtatcgttacctatctcaaccctttcattggtcaccatatgggtgacgtgattggcaaggaagctgctgagaccggcaagtccgtacgtgagcttgtattggaaaagggactaatggatgaagagactttgaaccaaatcctgtccaaggaaaatctaatgcacccttcgtttcgtggaaccctctacctagataactag

SEQ ID NO: 45113 - protein, 524 aa, Corynebacterium diphtheriae NCTC 13129
MASQAKNTKGSKNAEVTNDVLDGKTEGTAEKVNDAPIASDVTTKHATKKAAPGFRIEEDLLGEMEVPDEVYYGVHTLRAIDNYKISSTTINDVPEFIRGMVQVKKATALANRRLHTLPKDKCDAIVWACDQILDHGRCMDQFPIDVFQGGAGTSVNMNTNEVIANLALEHLGKPKGSYDIINPNDDVNMSQSTNDAYPTGFRLGVYEAMQELITRIDNLQFAFHAKGDEFTDILKMGRTQLQDAVPMTLGEEFQAFAHNLAEEQSVLRMASDRLKEVNLGATAIGTGLNTPAGYRYQVVAALSECTGLEIKSARDLIEATSDTGAYVLAHAAVKRTAMKLSKICNDLRLLSSGPRAGLNEINLPARAAGSSIMPAKVNPVIPEVVNQVCFKVFGNDLTVTMAAEAGQLQLNVMEPVIGQALFESIRILGNAAVTLQHKCVEGITANADVCRAYVDNSIGIVTYLNPFIGHHMGDVIGKEAAETGKSVRELVLEKGLMDEETLNQILSKENLMHPSFRGTLYLDN

SEQ ID NO: 45114 - DNA, 1392 bp, Geobacter sulfurreducens PCA
  CDS (1)..(1392): transl_table=11
gtgacgttccgggtcgagaaggataccctcggtgaggtgcgggttccggcggacgcctactacggcgcccagacggtccgggccgtggagaatttccccatctccgggctgcggccccatccggccctcgtccgggcgacggtgctcgtcaaaatgtgtgcggcccgggccaacatggccacgggcaggctcgattcccggcttggagacgctatcgtccgggcggccgacgagtgcctggccggtgcctttgatgcccacttcgtggtggacccgtttcaagccggcgccggcacctcccacaacatgaacgtgaacgaggtcctcgccaaccgggccaatgaactgctgggagaggagcggggcaggtatgctcccgtccatcccaacgaccacgtgaacatggcccagtccaccaacgacgtcttccccacggccatgcgtctggcggcccttcgggtggcgggggatctccggccggccctagagggactcgttgccgcgcttcggaaaaagtccgctgaattcgacggcattctcaagagcggccggactcacctgcaggatgcggtgccgatccgtctcggccaggagttcgaggcgtgggccgtggcgctggagaagaacctggccgccatcgagggggcggtgccgggccttgcggaactgggtatcggcggcaccgcggcaggtaccggcatgaacgccgagccggcctacatcgatcttgtggtggcagagctcgcccgggaaaccggctttcccctcgtacggggtgcgaacctggttgagcggatgcagaacatggaccccttcgtggccctctcctccgctctcaagggacttgccgtaaacctcgcccgtatcgccaacgacctgcggctcctttcctctggcccccggaccgggctggccgagatcgcgctgccggcgctgcagcccggctcctctatcatgccggggaaggtcaacccggtcatggccgaggtgaccgacatggtcgcctttcaagtgatgggtgcggacacgacaatcatgctcgccgcccaggcagggcagctggagcttaacgtcatgatgccggtcatcgcgttcaaccttctgttcagccttgaaatcctgaagaacacggtgcccaagctggctgatgcctgcatcgccggcatcactgcggaccgggagcgctgcctccggtacctggagcagtcggtaggactggccacggtgctcgcgccctacatcggctatgccgcggccgcggaggtggccaaggaatcgactgccacgggccggagtatccggcagatcgtggaagaccggcagctcctgtcggccgggcgtctggcggagatcctcgaccccttccctctcaccagccctggcgttccgtga

SEQ ID NO: 45115 - protein, 463 aa, Geobacter sulfurreducens PCA
MTFRVEKDTLGEVRVPADAYYGAQTVRAVENFPISGLRPHPALVRATVLVKMCAARANMATGRLDSRLGDAIVRAADECLAGAFDAHFVVDPFQAGAGTSHNMNVNEVLANRANELLGEERGRYAPVHPNDHVNMAQSTNDVFPTAMRLAALRVAGDLRPALEGLVAALRKKSAEFDGILKSGRTHLQDAVPIRLGQEFEAWAVALEKNLAAIEGAVPGLAELGIGGTAAGTGMNAEPAYIDLVVAELARETGFPLVRGANLVERMQNMDPFVALSSALKGLAVNLARIANDLRLLSSGPRTGLAEIALPALQPGSSIMPGKVNPVMAEVTDMVAFQVMGADTTIMLAAQAGQLELNVMMPVIAFNLLFSLEILKNTVPKLADACIAGITADRERCLRYLEQSVGLATVLAPYIGYAAAAEVAKESTATGRSIRQIVEDRQLLSAGRLAEILDPFPLTSPGVP

SEQ ID NO: 45116 - DNA, 1395 bp, Wolbachia endosymbiont of Drosophila melanogaster
  CDS (1)..(1395): transl_table=11
atggatagaaagacgagaatagaatcagacagcttaggggaagtaaaagtaccaagtgaacattactggggagcacagactcagcgttctttagaaaattttaagattggcacagaaaaaatgccagagcctctgattaaagcattagcaatagtaaaacttgcagcagcgcgtgttaatatgaaacatggtgttatagatgatagggtaggggacgcaatttgcacagccgcgagggaagtaatagatggcaaatttaataatgaatttccgcttgttgtttggcaaaccggatccggaacgcagactaatatgaatatgaatgaagtgatcagcaatcgtgcaatagagattttaggtggtaatttgggtagtaaatctccaatacatccaaatgatcatgtgaattatggtcagtcgtcaaatgacacctttccaacagcaatgcatatagcagcagcagagcaaataaactgcttgcttattccaaatcttgaaaaattgcataaggtgctggataataaggttcaggaatttaaagatataataaaagtaggacgtactcatctgcaagatgcaacgcccctaacactaggacaggagttttctggctatgcagcccagattaaaaaggggatagagagagtaaaatcaactttaagtggtatatacgagcttgcacaaggtggcactgcggttggcacgggactcaatactaaaaagggttttgctgaagattttgcaaagcaagttgcaggaattactaaccttccatttacttcagcaggcaataaatttgaagcgctagcagcaaatgatgctttagttgagctcagtggaacactcaatacagtagcagtcagtttaatgaaaattgcaaatgatataaggttgcttggttctggtccaagatgcggaattggggaaataatgttaccggaaaatgagcctggttcttcaattatgccaggtaaagtgaatccaactcagtgtgaagcggtgactatggtatgcactcaagttatgggaaatcatgttgctgtaaccattagtggttcaaacggtcattttgaattgaatgtgtttaagccagtgataatttacaatgttttgcagtctataagacttttagctgacgcaagtttaaattttacagaaaaatgtgtagttggtattaaagcaaatgaagagaggataaaagatttactgaatcagtcgttgatgttggtcactatattaaatacgcatatagggtacgacaatgcagcaaaaatagcgaagcttgcttataaagaaaatatcactctaaaggaagcagcagcaaaacttcaactgctcactgaggaagagtttgaaaggatagtgaaaccagaagaaatggtaaattatttgtaa

SEQ ID NO: 45117 - protein, 464 aa, Wolbachia endosymbiont of Drosophila melanogaster
MDRKTRIESDSLGEVKVPSEHYWGAQTQRSLENFKIGTEKMPEPLIKALAIVKLAAARVNMKHGVIDDRVGDAICTAAREVIDGKFNNEFPLVVWQTGSGTQTNMNMNEVISNRAIEILGGNLGSKSPIHPNDHVNYGQSSNDTFPTAMHIAAAEQINCLLIPNLEKLHKVLDNKVQEFKDIIKVGRTHLQDATPLTLGQEFSGYAAQIKKGIERVKSTLSGIYELAQGGTAVGTGLNTKKGFAEDFAKQVAGITNLPFTSAGNKFEALAANDALVELSGTLNTVAVSLMKIANDIRLLGSGPRCGIGEIMLPENEPGSSIMPGKVNPTQCEAVTMVCTQVMGNHVAVTISGSNGHFELNVFKPVIIYNVLQSIRLLADASLNFTEKCVVGIKANEERIKDLLNQSLMLVTILNTHIGYDNAAKIAKLAYKENITLKEAAAKLQLLTEEEFERIVKPEEMVNYL

SEQ ID NO: 45118 - DNA, 1431 bp, Bdellovibrio bacteriovorus HD100
  CDS (1)..(1431): transl_table=11
ttggagttagtgatggaaaagttccgcgtagaaaaagatttgctgggtgaaaagaaagtccctgcggaagcttattacggcattcataccctgcgggcgatggagaactttcagatctcgggcatccctgtcggagccaatcaaagtttcgtgcgtggtctggcactggtgaaaaaagcctgcgcgttggccaatggtgaactgggcacaatcccggcggatgtttccaagtccttggttgaagcctgtgacatcgttttgcaggacccgaaaaaatggggtcagcagttcccatccgacgtttatcagggcggcgcggggacttcgatcaacatgaatgccaacgaagtgattgccaatatcgcattggaaaaacgcggtctgcaaaaaggcacctacgcggtgatcaaccctaatgatcacgtgaataagtgccagtccacgaatgatgcttatccgaccgctttccgagtggcgctgtatgaacacctgaacggaactttggcggcgctggattctttggctttggccttcgagaaaaaaggcaaagaattccagagcgttttgaaaatgggccgcacgcagttgcaggatgcagttcccatgtctttggggcaggagtttaacgcttttgccactttactaaaagaagacggtcgtctgatccgcactgttcagaaattcatgctggaagtgaacttgggggccaccgcgattgggactggcatcaacacacctccgggttatgcgtctttggcggtgcaaaagctggctgaggtcaccgggcatccgtttgttcagtcggaagattacatcgaagccaccagcgactgtggtgcctacatcattatctctggcgcactgaaacgcacggcagtgaaactttcgaaaatctgcaacgacttgcgcttgcttagttctggtccgcgtgcgggcttgaaagaaatcaacctgcctgaaatgcaggcgggttcttccatcatgccggcaaaagtgaatccggtgattccggaagttgtgaatcaggtcagcttcaaaatcatcggcaatgacctggcgatcaccctggcggccgaagcagggcagctgcagctgaatgtgatggaacctgtgatcgcctccagtctgtttgagtctttggatcttttgaagaatgcctgtgaaaccctggaacataaatgtgtgaagggtattacggccaatgcagaacgctgccgggactacgtcatgaacagcatcggtattgtgacttatctggatccgatcatcggtcacgatgaaggcgaccgtatcggaaaaatctgtgcggagaccggtcgcaacgtggctgaagtggccctggagcgaggcgtggtgactcaggcgcaactggatgaactgttctcaatggaaaatctgctgaacccgaaatacgtcggcaagaagcactag

SEQ ID NO: 45119 - protein, 476 aa, Bdellovibrio bacteriovorus HD100
MELVMEKFRVEKDLLGEKKVPAEAYYGIHTLRAMENFQISGIPVGANQSFVRGLALVKKACALANGELGTIPADVSKSLVEACDIVLQDPKKWGQQFPSDVYQGGAGTSINMNANEVIANIALEKRGLQKGTYAVINPNDHVNKCQSTNDAYPTAFRVALYEHLNGTLAALDSLALAFEKKGKEFQSVLKMGRTQLQDAVPMSLGQEFNAFATLLKEDGRLIRTVQKFMLEVNLGATAIGTGINTPPGYASLAVQKLAEVTGHPFVQSEDYIEATSDCGAYIIISGALKRTAVKLSKICNDLRLLSSGPRAGLKEINLPEMQAGSSIMPAKVNPVIPEVVNQVSFKIIGNDLAITLAAEAGQLQLNVMEPVIASSLFESLDLLKNACETLEHKCVKGITANAERCRDYVMNSIGIVTYLDPIIGHDEGDRIGKICAETGRNVAEVALERGVVTQAQLDELFSMENLLNPKYVGKKH

SEQ ID NO: 45120 - DNA, 1392 bp, Treponema denticola ATCC 35405
  CDS (1)..(1392): transl_table=11
atgcgaagggaacatgacttactcggagaattggatattccggaagatgcttattatggaattcaaacattccgcagtgttgaaaattttcaaattacaggattaaggctctgtgattttcccgattttattaagggtcttgcttatacaaagcaggctgcagccgaagccaaccatgaactcggctatttaagcgatgaagtttacaaggctatgattcaggcttgtaaagaagttgccgaaggcaaattcgataaggaatttgtagtcgatatgattcagggcggagcaggaacttctaccaatatgaatgcaaatgaagttatcgccaaccgcgcaaacgaaatcttaggaaaggccaagggaacttattcgccctgccatcccaataatcacgtaaactttgctcaatctacaaacgacgcttatcctacagctgcaaagctcggcatctcgttaaatacaccggctcttatagatgaactcaaatctcttgttgcttcttttagaaaaaaggcccaagaacttggagaaaatatcaagatgggaagaacccagcttcaagatgccgtacccatgaccctcggccaagagtttgaatcctatgccgcttctttggaaaacgaaattcctcagattcagtttgcaagggaaaatcttcacaccataaacatgggagctaccgctatcggaacaggtatcaactcggatcctaactatacaccgaaagtaacctctcatctggcaaaaatttcgggtcttgatctaaaggctgcaaaaaacatgatagctgccacgaacgatacatccgactttgtaacatattcttcacaattaaagcgcctttctgcaaagctttcaaagatatgcagcgatttacgccttctttcttcgggccccagaacaggactttacgatataagtcttcctccgatgcagcccggttcttctatcatgcccggaaaggtaaacccggttattcctgaggttgtcaatcaggtttgctacagggttatcggaaatgatactgccgttatcttggctgcagaatcaggccagcttgaactcaacgtttttgaacccgttataatttattctatctttgagtcgattaagcttcttataaatgcaatgaagactttgagggaacgatgcgttacgggcattgtaggaaactatgagcattgtaaggaaagcgttcaccgaagtatcggcttggttacggccttaaatcccgtcatcggttatgaggcttcttccgatattgcaaagactgccttgcgcgataaccgcagcgtttatgaccttgttttggaaagagggcttctttcaaaagaaaaattggatgaggttttaaaacccgaaaacatgacaaagcccagaaagctttag

SEQ ID NO: 45121 - protein, 463 aa, Treponema denticola ATCC 35405
MRREHDLLGELDIPEDAYYGIQTFRSVENFQITGLRLCDFPDFIKGLAYTKQAAAEANHELGYLSDEVYKAMIQACKEVAEGKFDKEFVVDMIQGGAGTSTNMNANEVIANRANEILGKAKGTYSPCHPNNHVNFAQSTNDAYPTAAKLGISLNTPALIDELKSLVASFRKKAQELGENIKMGRTQLQDAVPMTLGQEFESYAASLENEIPQIQFARENLHTINMGATAIGTGINSDPNYTPKVTSHLAKISGLDLKAAKNMIAATNDTSDFVTYSSQLKRLSAKLSKICSDLRLLSSGPRTGLYDISLPPMQPGSSIMPGKVNPVIPEVVNQVCYRVIGNDTAVILAAESGQLELNVFEPVIIYSIFESIKLLINAMKTLRERCVTGIVGNYEHCKESVHRSIGLVTALNPVIGYEASSDIAKTALRDNRSVYDLVLERGLLSKEKLDEVLKPENMTKPRKL

SEQ ID NO: 45122 - DNA, 1434 bp, Bacillus cereus ATCC 10987
  CDS (1)..(1434): transl_table=11
atgatagcaacgaaggatatacgtatagaaaaagattttttaggtgaaaaggaagtaccaagtagagcttattatggtgtacaaacattacgtgcggtagaaaatttcccgattacagggtatcgcattcatccatcactcattacggcaatggcaattgtgaaaaaagcggcggcacttgcaaatatggatactggttacttagcgaaagacattggacacgaaattgcagaggcagcacaagaaattgttgatgggaaatttcatgatcaatttattgtagatccaattcagggcggtgctggaacttctattaatatgaatacaaatgaagtaatcgctaatcgagcgttagaacgtatgggatatgaaaaaggcgagtatgcaaaaattagcccaaatacgcatgtaaacatggctcagtcaacgaatgatgcgtttccaacaggaattcatattgcaactcttatgatgttagaagaacttcttattacaatggaagaacttcatgctgctttccttgcaaaagcaaaagagttcgatcacgtcattaaaatgggacgtacgcatttacaagatgctgttccgattcgtcttggacaagaatttgaagcgtatagcagagtgcttgcgcgtgatataaaaagaattaaacaatctcgccaacatttatatgaagtgaatatgggggcgacagctgttggtacgggattaaatgcaaaccctacctacattgaacaagtggttaaacacttacgaacatttagcggattcccacttgttggtgcagagcatttagttgatgcaacacaaaatacagatgcatacacagaagtatctgcagcattaaaagtatgtatgatgaatatgtctaaaattgcgaacgaccttcgtattatggcatctggtccacgtgttggattggcggaaattcaattaccagctcgtcaaccaggttcatctattatgccaggtaaagtaaatcctgttatggcagaagtaattaatcaagtcgctttccaagtaattggtaatgatcacacaatttgcttagcgtcagaagcaggacaactggagctcaacgtaatggagcctgtgcttgtatttaatttaattcaatctatcagtattatgaataacggattccgtgtattccgtgaatattgtattaaaggaattacagcaaatgaagaactgctgaagcaatatgttgagaaaagtgttggaattattacagcagttaaccctcatattggttatgaagtagcatcacgtattgcacgtgaagcaattgaaacaggaaaatctgttcgggagttatgtttagaacatggtgtactgacagaagaagaattagatattattttagatccattcgaaatgacgcatcctgaaattgctggtgcttctttactaaagaataagaagatgtaa

SEQ ID NO: 45123 - protein, 477 aa, Bacillus cereus ATCC 10987
MIATKDIRIEKDFLGEKEVPSRAYYGVQTLRAVENFPITGYRIHPSLITAMAIVKKAAALANMDTGYLAKDIGHEIAEAAQEIVDGKFHDQFIVDPIQGGAGTSINMNTNEVIANRALERMGYEKGEYAKISPNTHVNMAQSTNDAFPTGIHIATLMMLEELLITMEELHAAFLAKAKEFDHVIKMGRTHLQDAVPIRLGQEFEAYSRVLARDIKRIKQSRQHLYEVNMGATAVGTGLNANPTYIEQVVKHLRTFSGFPLVGAEHLVDATQNTDAYTEVSAALKVCMMNMSKIANDLRIMASGPRVGLAEIQLPARQPGSSIMPGKVNPVMAEVINQVAFQVIGNDHTICLASEAGQLELNVMEPVLVFNLIQSISIMNNGFRVFREYCIKGITANEELLKQYVEKSVGIITAVNPHIGYEVASRIAREAIETGKSVRELCLEHGVLTEEELDIILDPFEMTHPEIAGASLLKNKKM

SEQ ID NO: 45124 - DNA, 1422 bp, Nasonia vitripennis
  CDS (1)..(1422)
atggcattcaacgcactgagacagcgggtgacgagcgtcgggcttcgccgtcagccgagggaaatcagcgccttcctcgggccgcggctcgtcatgtgcgagcccaagtgccgagcggcctccaaggccagcggcgagtacaggctcgagagggacaccttcggggagctgaaggtgccggctgataagtattatggagcccagacgatgcgatcggtaatgaacttcccgatcggcgaccaggccgagcgcatgccgaaaggcgtcatcgtggctatgggtatcctgaagaaagccgccgccgaggtgaacaaggaattcggcctcgacgcgaaagtcgcggatgccatcagcaaagtgatctcgaaccgagcgatcgagctgcttggtggtcagctgggctccaagaacccggtccatcccaacgaccacgtgaacaagtcccagagctcgaacgacaccttccctacggcgatgcacatcgccgtagccctggaaatcaacaagatcctcatccccggcctccagcagctgcactcggcacttaaggaaaaatctcaggcatggaaggacatcatcaagatcggcaggacgcacacgcaggacgccgtgccgctgactctcggccaggaattttccgcttacgcgacacaggtggagaacggaatcgcccgagtgaaggacacgctgccgaggctctaccagctggcccttggaggtaccgccgtaggtactggtttgaacacgaggataggcttcgctgagaaagccgctgcgagaatcgcttccctcacaggtctgcccttcgttacggctcccaacaagttcgaagcgctggctgctcacgatgcgctcgttgaggtccacggtgcgctcaacactgtcgctgtctctctgatgaagatcgccaacgacatccgattcctgggcagcggaccccgctgtggtcttggcgagctctccctgcccgaaaacgagcctggtagctccatcatgcctggaaaggtgaacccaactcagtgcgaggccctgacgatggtgtgtgcccaggtgatgggtaaccacgtcgcgacgacgatcggcggcagcaacggccacttcgagctcaacgtcttcaagcccgtcatcgtcgccaacgtcctcaggtcggccagacttcttggtgacgcctctgctacgttcaccaagaactgcgtcgtcggaattcagcccaacatcgacgccatcaacaagatcatgaacgagagtcttatgctagtcacggcccttaatcctcatatcggttacgataaggctgctgcgatagcgaagcaagcacacaaagagaagctgacgctgaaggaatcggcattgaagaacggcctcaccgaggaacaattcaaccagtgggtcaaacccgaggagatgcttggacctaagtaa

SEQ ID NO: 45125 - protein, 473 aa, Nasonia vitripennis
MAFNALRQRVTSVGLRRQPREISAFLGPRLVMCEPKCRAASKASGEYRLERDTFGELKVPADKYYGAQTMRSVMNFPIGDQAERMPKGVIVAMGILKKAAAEVNKEFGLDAKVADAISKVISNRAIELLGGQLGSKNPVHPNDHVNKSQSSNDTFPTAMHIAVALEINKILIPGLQQLHSALKEKSQAWKDIIKIGRTHTQDAVPLTLGQEFSAYATQVENGIARVKDTLPRLYQLALGGTAVGTGLNTRIGFAEKAAARIASLTGLPFVTAPNKFEALAAHDALVEVHGALNTVAVSLMKIANDIRFLGSGPRCGLGELSLPENEPGSSIMPGKVNPTQCEALTMVCAQVMGNHVATTIGGSNGHFELNVFKPVIVANVLRSARLLGDASATFTKNCVVGIQPNIDAINKIMNESLMLVTALNPHIGYDKAAAIAKQAHKEKLTLKESALKNGLTEEQFNQWVKPEEMLGPK

SEQ ID NO: 45126 - DNA, 1638 bp, Magnaporthe grisea 70-15
  CDS (1)..(1638)
atgcgacaggtgcaggcggctgcggccaggtcttttcagacatgtgggccgaggttaggtgcttcaattaacccctccgcagctgtaacgaggagggcattgagcagctccagtagatggactagctcccctcgttgtaccatcatcgcatcttcacctttctccaacactcagacgcatatctcccgcagctccaggctgttccactccacaccagttaccatgtccgcgaacactagggctgagaccgatgcctttggcgaggttcaggtgcctgccgacaagtactggggcgcccagacacagcgctcgctcggcaacttcgacatcaaccagcctcaggatcgcatgcccccgccaattgtcaaggctctgggtatcctcaagggcgccgccgccacggtgaacatgaactatggccttgaccccaccatcggcaaggccattcagcaggcggccaaggaggtcgctgacctgaagctgctcgaccacttccccttggtcgtctggcagaccggctctggcactcagtccaacatgaacgcgaacgaggtcatctccaaccgagccatcgagatcctgggcggcgagaagggcagcaagaaacccgtccaccccaacgaccacgtcaaccgcagcgcctcctctaacgacaccttccccaccgtcatgcacatcgccgccgtcctcgagatcgagggtgagctgattccttccctgcgcagcctgcgagacgccctgcaggccaaggtggacgagttcgaggccaagaagattatcaagattggccgcacacatctccaggacgccacgcctctgactctggctcaggagttctctggctacgtcgcccagcttgactttggcatcaagcgcgtcgaggctaccctgccggacctgaggctgctcgctcagggcggtaccgctgtcggcaccggcattaacacctttgagggctttgctgagggcatcgccgaggaggtcagccgcatgactggcaccgagttcaagacggcccccaacaagttcgaggcccttgctgcgcatgacgcgcttgtgcatgcctcgggcgctctcaacactctcgccacctcgctgaccaaggttgctcaggacatccgctacctgggcagcggcccgcgctgcggcctgggcgagctcgttctgcctgagaacgagccgggcagcagcatcatgcctggaaaggtcaatccgacccagtgcgaggccctgaccatggtttgcgcgcaggtcatgggcaaccatgttgctgctaccattggtggcatgaacggccagtttgagcttaacgtctacaagcccctcatcatccgcaacgtcctgcacagcgtcaggctgctgtcagatggcatgcggtcgtttgagaagcacctcgtcgagggcctcaaggccaacgaggagaagattgccagcattatgaaggagtctctcatgcttgtcacctgccttaaccccaagattggctatgacatggctagcaaggtcgcaaagaacgcccacaagaagggtctgaccctaaaggaaagcgccctcgagctcaatgctctgactgaggaagagtttgacaccttggtcaagcccgagctcatgatcactcccaagccctacaaggcctag

SEQ ID NO: 45127 - protein, 545 aa, Magnaporthe grisea 70-15
MRQVQAAAARSFQTCGPRLGASINPSAAVTRRALSSSSRWTSSPRCTIIASSPFSNTQTHISRSSRLFHSTPVTMSANTRAETDAFGEVQVPADKYWGAQTQRSLGNFDINQPQDRMPPPIVKALGILKGAAATVNMNYGLDPTIGKAIQQAAKEVADLKLLDHFPLVVWQTGSGTQSNMNANEVISNRAIEILGGEKGSKKPVHPNDHVNRSASSNDTFPTVMHIAAVLEIEGELIPSLRSLRDALQAKVDEFEAKKIIKIGRTHLQDATPLTLAQEFSGYVAQLDFGIKRVEATLPDLRLLAQGGTAVGTGINTFEGFAEGIAEEVSRMTGTEFKTAPNKFEALAAHDALVHASGALNTLATSLTKVAQDIRYLGSGPRCGLGELVLPENEPGSSIMPGKVNPTQCEALTMVCAQVMGNHVAATIGGMNGQFELNVYKPLIIRNVLHSVRLLSDGMRSFEKHLVEGLKANEEKIASIMKESLMLVTCLNPKIGYDMASKVAKNAHKKGLTLKESALELNALTEEEFDTLVKPELMITPKPYKA

SEQ ID NO: 45128 - DNA, 1590 bp, Gibberella zeae PH-1
  CDS (1)..(1590)
atgcttcgatctgtcacgggacgcgctgccgcctcgggccttatgaagtcagctctgcctcgggtctcccaagcagcagctcccacatgctcgcttgccccgcagctgcgactccaaagcaagtcttctgttgctggtcttcgactctccagagctattcacagcacctcagtcaggatgtctcaaacacgaacagaaagcgatgcctttggcgagatccaggtccccgccgaccgctactggggagctcagacggagcgatccctcgagaacttccgtatcaaccagccccaggaccgcatgcccccacctattgtcaaggcgtttggtatcctgaagggtgctgccgccactgttaacatgaaatatggacttgaccccaagatcggtgccgctatccagcaggctgccaaggaggtcgctgatggcaagctcatcgaccacttccctctcgtcgtctggcagactggctccggtactcagtccaacatgaacgccaacgaggtcatctccaaccgtgccattgagattcttggcggtaccatgggcagcaagaagcctgtccaccccaatgaccacgtcaaccgcagcgcttcctccaacgacacttttcctaccgtcatgcacattgctgctgtcctcgacattgaaagcgagctcctgcctgctctccgcagcctgcgcgacgctatccagaagaaggtcgacgagttcgaggccaagaagatcatcaagatcggccgtactcaccttcaggacgccactcctctcactctcgcccaggagttctccggttacgttgcccagctcgactttggcatcaagcgtgtcgagagctctctgcccgacctacgactcctcgcccagggtggtaccgctgtcggtactggcatcaacactttccagggatttgccgaggctatcgctgaggaggtcacaaagatgaccggtactgagttcaagactgcccccaacaagttcgaggccctcgccgcccacgacgctattgtccaggcccacggctccctcaacaccctggctgcttctcttaccaaaatcgcacaagacgtccgataccttggtagcggcccccgttgcggtcttggtgagctgaacctgcccgagaacgagcctggcagcagtatcatgcctggcaaggtcaaccctacccagtgtgaggccttgactatggtctgcgcccaggttatgggcaaccacgttgccaccactatcggaggcatgaacggccagtttgaactcaacgtttacaagcctctggtcattcgtaacctgctccacagctcccgtcttctgactgacggcatgcgctctttcgagaagaacctggttgccggcctcaacgctaacgaggagaagattgccagcatcatgaaggagtcgcttatgcttgtcacctgcctgaaccccaagattggatacgacatggctagcaaggttgccaagaacgctcataagaagggccttaccctcaagcagagtgctctcgaactaaacgctctgactgaggaggaatttgacactttggttaagcctgagctgatggtcggtcccagtccttacaagggttag

SEQ ID NO: 45129 - protein, 529 aa, Gibberella zeae PH-1
MLRSVTGRAAASGLMKSALPRVSQAAAPTCSLAPQLRLQSKSSVAGLRLSRAIHSTSVRMSQTRTESDAFGEIQVPADRYWGAQTERSLENFRINQPQDRMPPPIVKAFGILKGAAATVNMKYGLDPKIGAAIQQAAKEVADGKLIDHFPLVVWQTGSGTQSNMNANEVISNRAIEILGGTMGSKKPVHPNDHVNRSASSNDTFPTVMHIAAVLDIESELLPALRSLRDAIQKKVDEFEAKKIIKIGRTHLQDATPLTLAQEFSGYVAQLDFGIKRVESSLPDLRLLAQGGTAVGTGINTFQGFAEAIAEEVTKMTGTEFKTAPNKFEALAAHDAIVQAHGSLNTLAASLTKIAQDVRYLGSGPRCGLGELNLPENEPGSSIMPGKVNPTQCEALTMVCAQVMGNHVATTIGGMNGQFELNVYKPLVIRNLLHSSRLLTDGMRSFEKNLVAGLNANEEKIASIMKESLMLVTCLNPKIGYDMASKVAKNAHKKGLTLKQSALELNALTEEEFDTLVKPELMVGPSPYKG

SEQ ID NO: 45130 - DNA, 1452 bp, Candida glabrata CBS 138
  CDS (1)..(1452)
atgttgagggctagcagtagggcaaagacatcgctcatcgggtacagcgcgcggatgatgcattacagagtagagacggacactttcggcgagatcaaggtacccgcggacaagtactggggcgcgcagacgcagcggtcgttccagaacttcaagatcggcggcgcgcgcgagcgcatgccggagcccatcgtgagggcgttcggtgtgctgaagaagtcagccgccatagtcaacgagaagctcgggacgctagacagcgagatcgcggggcccatccagcaggccgctgacgaggtcgccaagggcaagctcaacgaccacttccccttggtggtgttccagaccgggtcaggcacgcagtctaacatgaacgccaacgaggtcatctccaacagggcgattgagctgatcggcggcgagctcggctccaagaagatccacccaaacaaccactgcaatcaggcgcagtcctccaacgacactttcccctcggtgatgcacatcgccgcggtcacggagatcaccaactccctcttgccggagatcacccagctgaaggacgccctccacaagaaggccgaggagttccaggacatcgtcaagatcggcagaacacacctgcaggacgccacaccgctgaccctcggacaggaattcagcggctacgtccagcagctcgtcaacggcatcgcaagaatcgagaacaccctgccacacctgaagtacctcgcacaaggtggtaccgctgtcggcacagggctgaacacgaaggagggcttcgacaagctgatcgccgagcagatctccaaggaaacgggcatcgacttcaaaaccgcccctaacaagttcgaagctctcgcagctcacgacgcgatcgtcgaggccagcggtgccctgaacaccgtggcttgctctctgttcaagatcgcacaggacatcaggtacctgggctccggccctcgttgcggctacggtgaactgcacttgccagagaacgagccaggttcctccatcatgcctggtaaggtcaacccaacacagaacgaggccatgacccaggtctgtgtccaggtcatgggtaacaacgcagctgtgaccttcgcgggcgccaacggtcagttcgaactgaacgtcttcaagccggtcatgatctcaaacttgttgagctccatcagattgctggcagacgcttgccactccttcagagtccactgtgtcgaaggcatcgaggcaaaccgcgagaagatcaaccacaacttgcacaactcattgatgctggtcaccgctctgaacccaaagatcggctacgacgccgcctccaagatcgcaaagaacgctttcaagaagaacatcaccttgaaagagtccgccttggagttgaaatacttgacctcagaagagttcgacgaatgggtcattcctgaaaacatggttggaccaaccaagtaa

SEQ ID NO: 45131 - protein, 483 aa, Candida glabrata CBS 138
MLRASSRAKTSLIGYSARMMHYRVETDTFGEIKVPADKYWGAQTQRSFQNFKIGGARERMPEPIVRAFGVLKKSAAIVNEKLGTLDSEIAGPIQQAADEVAKGKLNDHFPLVVFQTGSGTQSNMNANEVISNRAIELIGGELGSKKIHPNNHCNQAQSSNDTFPSVMHIAAVTEITNSLLPEITQLKDALHKKAEEFQDIVKIGRTHLQDATPLTLGQEFSGYVQQLVNGIARIENTLPHLKYLAQGGTAVGTGLNTKEGFDKLIAEQISKETGIDFKTAPNKFEALAAHDAIVEASGALNTVACSLFKIAQDIRYLGSGPRCGYGELHLPENEPGSSIMPGKVNPTQNEAMTQVCVQVMGNNAAVTFAGANGQFELNVFKPVMISNLLSSIRLLADACHSFRVHCVEGIEANREKINHNLHNSLMLVTALNPKIGYDAASKIAKNAFKKNITLKESALELKYLTSEEFDEWVIPENMVGPTK

SEQ ID NO: 45132 - DNA, 1479 bp, Kluyveromyces lactis NRRL Y-1140
  CDS (1)..(1479)
atgttgagaaatagcattgtatcacgtggtctagctcaaacccgcgttagtgcaaaggttaacagactagcatcgttaagaatggtttcgtatagagtggagaccgatgcgttcggtgagatccaagttccttctgataagtactggggtgctcaaacccaacgttctttgcaaaatttcaagattggtggtcctcgtgaaagaatgcctgagccaattgtcaaggcttttggtgttttgaagaagtcggctgctgtggtcaatgagcgtctggggacgttggaccctgaaatcgctaagcctatcaagcaagcagccgatgaagttgctcagggtaaactaatggaacattttccattggttgtgttccaaactgggtctggtactcagtccaacatgaacgccaacgaagttatttcaaacagggccatcgaattgattggtggtgaattgggttctaagaagattcacccaaacaaccactgtaaccaagctcaatccagtaacgatactttcccatctgttatgcatattgctgctgtcactgaaattacacaccatttgttgccagaattggaaggtttgaaagttgctttaaagcaaaaatctgatgagttccagcatatcgttaagatcggtagaacccatttgcaagatgctactccattgaccctaggtcaagagttcagcggatacgtgcaacaggtggagaacggtattgctcgtgttaaacaatctctatatcatttgaagttcttggcacaaggtggtactgccgttggtactggtttgaatactaaggtcggttttgctgaagatatcgctgaacaagtttctaaagaaactggtatcgatttcaagaccgctccaaacaagttcgaagcattggctgctcacgatgctgtcgttgaagcctctggtgccctaaacactctggctgtctctttattcaagattgctaacgatatcagatacttgggttctggacctcgttgcggttacggtgaattaagtttgccagaaaacgaaccaggttcttctatcatgcctggtaaagtgaaccctactcagaatgaagccatgactcaagtgtgtgttcaagttatgggtaaccatgccgctatcacttttgcaggtgcttctggtcaatttgaattgaatgtcttcaagccagttatgatctcgaacttgttgagttcaatcagactattgggagatgcttctaactctttcagaattcactgtgttgaaggtattaaggctaacgaggacagaatcgctaaattgttgcatgaatccttaatgttggtaactgcattgaacccaaagatcggttacgatgccgcttctaaggtcgctaagaacgctcacaagaagggaatcactttgaaggaatctgctttggaattgaaggttctatcaagtgaagaattcgaccaatgggtcatccctgaaaagatgattggtccaaaggagtaa

SEQ ID NO: 45133 - protein, 492 aa, Kluyveromyces lactis NRRL Y-1140
MLRNSIVSRGLAQTRVSAKVNRLASLRMVSYRVETDAFGEIQVPSDKYWGAQTQRSLQNFKIGGPRERMPEPIVKAFGVLKKSAAVVNERLGTLDPEIAKPIKQAADEVAQGKLMEHFPLVVFQTGSGTQSNMNANEVISNRAIELIGGELGSKKIHPNNHCNQAQSSNDTFPSVMHIAAVTEITHHLLPELEGLKVALKQKSDEFQHIVKIGRTHLQDATPLTLGQEFSGYVQQVENGIARVKQSLYHLKFLAQGGTAVGTGLNTKVGFAEDIAEQVSKETGIDFKTAPNKFEALAAHDAVVEASGALNTLAVSLFKIANDIRYLGSGPRCGYGELSLPENEPGSSIMPGKVNPTQNEAMTQVCVQVMGNHAAITFAGASGQFELNVFKPVMISNLLSSIRLLGDASNSFRIHCVEGIKANEDRIAKLLHESLMLVTALNPKIGYDAASKVAKNAHKKGITLKESALELKVLSSEEFDQWVIPEKMIGPKE

SEQ ID NO: 45134 - DNA, 1479 bp, Debaryomyces hansenii CBS767
  CDS (1)..(1479)
atgttaagattaaccagtaaatataccccagtggctagatctattcaattaagatcattatcgtcaacttctgcattattaagttcgaccagaaccgaatcagatgctttcggtgaaatcgaagttgattcagctaagtattacggtgcccaaactgccagatccaagcataacttcaagatcggtggtgaagccgcaagaatgccaattccggttgtgagagcatttggtattttaaaaaaatctgctgctattgtgaacgaaggtttaggagctttagatcctaaattatccaaggctatccaacaagctgctactgaagttgcggaaggtaaattggatgaccacttcccattggttgtgttccaaactggttcaggtactcaatctaacatgaatgctaacgaagttatttccaacagagccattgaaatcttaggtggtgaattgggttccaagaagccagttcatccaaacgatcactgtaacatgtctcaatcatctaatgatactttcccaacagtcatgcacattgctgctgctactgaaatttctaactctttgattccggagttaaccaagttacgtgatgcgttacaagctaagtctgatgaattcaaggatatcattaagattggtagaactcatttacaagatgctactcctttgactttaggtcaagaattttctggttacgttcaacaattaaccaacggtattgaaagaattgaaaagactttaccaaacttgcaattcttagctcaaggtggtactgctgttggtactggtttaaacaccgtcaaaggttttgactctaagattgctgaagaagtctctaagttgacttctattcctttcaagactgctcctaacaagttcgaagccttagctgctcatgatgccgttgttgaagcttcaggtgccttaaacaccgttgctgtttctttattcaagattgccaacgatatcagatacttgggttccggtccaagatgtggttacggtgaattatccttgccagaaaacgaaccaggctcgtcaattatgcctggtaaggttaacccaacccaaaatgaagccttaacaatggtcgctacccaagtcttcggtaaccactctgcaatcacttttgctggtgcatctggtcaattcgaattgaatgtcttcaagcctgtcatgatttctaacttgttgtcttcaattagattaattgctgacggttctgcttctttcagagagcattgtgttgtaggtattactgccaatgtagacaaaatcgagaaaactttacacgaatctttaatgttggttactgctttaaacccaaagattggttatgatgctgcttcaaagactgccaagaatgctcacaagaagggtttaactttgaaagaatctgctttggaattgggtgttttaaatgaacaagaattcgacgaatgggtcagaccagaaaagatgattggtccaaaggattag

SEQ ID NO: 45135 - protein, 492 aa, Debaryomyces hansenii CBS767
MLRLTSKYTPVARSIQLRSLSSTSALLSSTRTESDAFGEIEVDSAKYYGAQTARSKHNFKIGGEAARMPIPVVRAFGILKKSAAIVNEGLGALDPKLSKAIQQAATEVAEGKLDDHFPLVVFQTGSGTQSNMNANEVISNRAIEILGGELGSKKPVHPNDHCNMSQSSNDTFPTVMHIAAATEISNSLIPELTKLRDALQAKSDEFKDIIKIGRTHLQDATPLTLGQEFSGYVQQLTNGIERIEKTLPNLQFLAQGGTAVGTGLNTVKGFDSKIAEEVSKLTSIPFKTAPNKFEALAAHDAVVEASGALNTVAVSLFKIANDIRYLGSGPRCGYGELSLPENEPGSSIMPGKVNPTQNEALTMVATQVFGNHSAITFAGASGQFELNVFKPVMISNLLSSIRLIADGSASFREHCVVGITANVDKIEKTLHESLMLVTALNPKIGYDAASKTAKNAHKKGLTLKESALELGVLNEQEFDEWVRPEKMIGPKD

SEQ ID NO: 45136 - DNA, 1404 bp, Debaryomyces hansenii CBS767
  CDS (1)..(1404)
atgtcaggtaacaaagctaacgaaagggtcgaaagcgatgcgttcggagaaatctccgttccaaacgataagtattggggtgcccaaagtcaaagatcgttaggtaattttgatatcggtgatattagaatgccagaatccattgttaaatcatttggtattttaaagaaggctgctgccattgttaatgaggaaatcggtgcgttagaccctctgttagctaaggctatcaaagaagctgcaactgaagttgcggaaggtaaattgacggaacatttcccattagtagtctaccagacaggatccggtactcaatcaaacatgaatgccaacgaggttatttcgaacagagcaatcgagattttaggcggtgaaatgggttcaaagtcccctgttcatccaaatgatcactgtaatatgtcccaatcttcaaatgatactttcccaacagttatgcatattgcagccgttactgagatcagcaacaagttaattccttctttaacacagcttcgtgatgcatttgatgccaaggcaaaagaattcgaaaagatcattaaaatcggtagaactcatttgcaagatgctactccattaactttgggtcaagaattctcaggttacgttcaacaattaagttttggtattgaacgtattcaacaaacccttccaagattatcatacttagctcaaggtggtactgctgttggtactggtttgaacacttcaaagggttttgatgttaagattgcgaaagaggtttctaatattactgggttgaaattccaaactgctccaaataaattcgaagccttagctgcacatgatgcctttgttgaagcttctggtgccttaaatacattagctgtatctcttttcaagattgctaatgatattagatacttaggttctggtccaagatgtggatacggcgaattatcccttccagaaaatgaaccaggttcctccatcatgccaggtaaggttaaccctacccaatgtgaagctatgaccatggtttgtgcgcaagttatgggtaaccatactactatcactttttcaggtgcatctggtcaatttgaattaaatgttttcaagcctgtcatggccagcaacttattgtcttcgattagattaattggtgatgtatgtaagtcattcagaatccactgtgttgaaggtattgttgccaatgaagaaaagatttcaaaagtcttgaatgagtccttaatgttggtcacagccttgaacccaaagattggttacgacaatgcttccaaggtcgccaaaaatgcccacaaaaagggactcaccttaaagcaatcctgtttagatttaaacatgttgtccgaagaagagttcgaccaatgggtcagaccagaaaatatgcttggtccaaaataa

SEQ ID NO: 45137 - protein, 467 aa, Debaryomyces hansenii CBS767
MSGNKANERVESDAFGEISVPNDKYWGAQSQRSLGNFDIGDIRMPESIVKSFGILKKAAAIVNEEIGALDPLLAKAIKEAATEVAEGKLTEHFPLVVYQTGSGTQSNMNANEVISNRAIEILGGEMGSKSPVHPNDHCNMSQSSNDTFPTVMHIAAVTEISNKLIPSLTQLRDAFDAKAKEFEKIIKIGRTHLQDATPLTLGQEFSGYVQQLSFGIERIQQTLPRLSYLAQGGTAVGTGLNTSKGFDVKIAKEVSNITGLKFQTAPNKFEALAAHDAFVEASGALNTLAVSLFKIANDIRYLGSGPRCGYGELSLPENEPGSSIMPGKVNPTQCEAMTMVCAQVMGNHTTITFSGASGQFELNVFKPVMASNLLSSIRLIGDVCKSFRIHCVEGIVANEEKISKVLNESLMLVTALNPKIGYDNASKVAKNAHKKGLTLKQSCLDLNMLSEEEFDQWVRPENMLGPK

SEQ ID NO: 45138 - DNA, 1470 bp, Yarrowia lipolytica CLIB122
  CDS (1)..(1470)
atgctccgaacagtccgactagccaaggtctctcgacctctcacccttcgaaccttctccaccacccccgccttcctcggcaagcgagtcgagaaggacgcctttggagacattgatgtcgacgactcccactactggggcgcccagacccagcgatctctgcagaactttgacattggcggagagaaggccaagatgcccgagcccattgtcaaggcctttggcatcctcaagaaggccgctgccaccgtcaacatgaagtacggtctggaccccaaggttggcgaggccatccagaaggctgcccaggaggtcattgacggcaagcttaccaaggatttccccctggttgtcttccagaccggttccggtacccagtccaacatgaactccaacgaggtcatctccaaccgagccattgagatgctcggcggaaagctcggctccaagtcccccgtgcaccccaacgaccacgtcaacatgtcccagtcttccaacgacaccttccccaccgtcatgcacattgccgccgtcatggagatcaccaagaacctgatcccccagctgcagctgctcgaggagtccctcgccaagaagtctgcagagttcgacaagattatcaagattggccgaacccatctgcaggacgctacccccctgaccctcggccaggagttctccggctacgtgacccaggtcaagtacggcattgagcgagtcaaggacgttcttccccgactccgacaccttgcccagggaggaaccgccgtcggtaccggtcttaacaccaagaagggtttcgacactgccgtcgccgctgaggtctccaagatcaccggcgaggagttctccaccgcccccaacaagtttgaggctcttgccgcccacgacgccattgtcgaggcctccggtgccctcaacaccgttgccgtgtctctgttcaagattgccaacgatatccgatacctcggttccggtccccgatgtggctacggcgagcttgctctccccgagaacgagcccggttcttccatcatgcccggtaaggtcaaccccacccagaacgaggctctgaccatggtctgctgccaggttttcggaaacaactccactatcacctacgccggtgcctccggtcagttcgagctgaacgtcttcaagcccgtcatgatcgccaacctgctcgagtccatccgactcattgctgatggatctcgatctttccgaatccactgtgtcgacggcattgtcgccaacgagaagcgaatctcccagctcatgaacgagtctctcatgctggtcaccgccctcaaccccaagattggctacgacatggcctccaaggtcgccaagaacgcccacaagaagggaatcactcttaaggagtctgccctcgagctcggcgctctcacctctgaggagtttgaccagtgggtccgacccgagaagatgattggcccctctgactaa

SEQ ID NO: 45139 - protein, 489 aa, Yarrowia lipolytica CLIB122
MLRTVRLAKVSRPLTLRTFSTTPAFLGKRVEKDAFGDIDVDDSHYWGAQTQRSLQNFDIGGEKAKMPEPIVKAFGILKKAAATVNMKYGLDPKVGEAIQKAAQEVIDGKLTKDFPLVVFQTGSGTQSNMNSNEVISNRAIEMLGGKLGSKSPVHPNDHVNMSQSSNDTFPTVMHIAAVMEITKNLIPQLQLLEESLAKKSAEFDKIIKIGRTHLQDATPLTLGQEFSGYVTQVKYGIERVKDVLPRLRHLAQGGTAVGTGLNTKKGFDTAVAAEVSKITGEEFSTAPNKFEALAAHDAIVEASGALNTVAVSLFKIANDIRYLGSGPRCGYGELALPENEPGSSIMPGKVNPTQNEALTMVCCQVFGNNSTITYAGASGQFELNVFKPVMIANLLESIRLIADGSRSFRIHCVDGIVANEKRISQLMNESLMLVTALNPKIGYDMASKVAKNAHKKGITLKESALELGALTSEEFDQWVRPEKMIGPSD

SEQ ID NO: 45140 - DNA, 1635 bp, Aspergillus nidulans FGSC A4
  CDS (1)..(1635)
atggcttccagaaccgcggtgcgctcgatgagctctttgacacatgctactgccaaagcctccaacacctccgcattggcccgggccgcgacgttggctgctcgctcccccgcctcgttcactagccgacgcgcgttgagctccaatagccgaccagttacacagttcccccgccttcagtccttccagtctttctccagcaaaagatccttcagctcaaccgtcgcaatggcttccgagactcgcactgaaagtgatgcttttggcgagatccaggtccccgccgacaagtactggggcgcgcagactcagcgttcactgggcaatttcgacatcaaccagccccaggaccgcatgcccgatgctgttgtcaaggcttttggtattctcaagggtgctgctgctaccgtcaacatgaagtttggccttgatcccaagattggtgaggctatcaagcaggctgccgctgaggtcgccgagggcaagctccttgaccacttccctctcgtcgtctggcagaccggttccggcactcagtccaacatgaactccaacgaggttatctccaaccgtgccattgagattctcggaggcaagatgggctccaagaagcccgtccaccccaacgaccacgttaacatgtccgcttcctccaatgactctttcccaaccgccatgcacattgccgccgttctagagctggagaacactctgcttcctgctcttacgagccttcgtaatgcccttcagaagaaggtggacagcttccagaacatcattaagatcggccgtacccatttgcaggatgccactcctcttacccttggccaggagttctccggatacgttgcccagctcgaccgcaacatcgagcgcgtccaagcctctctgccccacctgcgctaccttgctcagggtggtactgccgttggtactggtcttaacaccttcaagggtttcgacgaggcgattgccgctgaggtgtccaagatgactggcaccgagttcaagaccgctcccaacaagttcgaggttcttgctgctcatgatgcaatcgtcgaggcctccggctcgcttaacacccttgccggctccctgtttaagatcgcccaggacatccgttacctcggatccggcccccgctgcggtcttggtgagctcatccttcctgagaacgaacctggttcttccatcatgcctggcaaggtcaaccctacccagtgcgagtccttgaccatggtctgctctcaagtcatgggtaaccacgtcgctgctaccattggtggcatgaacggtcagttcgagctcaatgtattcaagccactcatgatccgcaaccttcttcacagtgtgcgcattctcgccgatggcatgaagagctttgagaagaacctcgttgttggtcttgaggccaacgagtccagaatcagcactctcctccacgagagtctgatgctcgttacctgcctcaaccccgtcatcggttacgacatggcttccaaggtcgccaagaacgcccacaagaagggtatcaccctcaaagagagtgccatggagctcaaggctcttagcgaggaggactttgacaagtatgtccgaccagagctgatgctgagccctaaggagaagaaatag

SEQ ID NO: 45141 - protein, 544 aa, Aspergillus nidulans FGSC A4
MASRTAVRSMSSLTHATAKASNTSALARAATLAARSPASFTSRRALSSNSRPVTQFPRLQSFQSFSSKRSFSSTVAMASETRTESDAFGEIQVPADKYWGAQTQRSLGNFDINQPQDRMPDAVVKAFGILKGAAATVNMKFGLDPKIGEAIKQAAAEVAEGKLLDHFPLVVWQTGSGTQSNMNSNEVISNRAIEILGGKMGSKKPVHPNDHVNMSASSNDSFPTAMHIAAVLELENTLLPALTSLRNALQKKVDSFQNIIKIGRTHLQDATPLTLGQEFSGYVAQLDRNIERVQASLPHLRYLAQGGTAVGTGLNTFKGFDEAIAAEVSKMTGTEFKTAPNKFEVLAAHDAIVEASGSLNTLAGSLFKIAQDIRYLGSGPRCGLGELILPENEPGSSIMPGKVNPTQCESLTMVCSQVMGNHVAATIGGMNGQFELNVFKPLMIRNLLHSVRILADGMKSFEKNLVVGLEANESRISTLLHESLMLVTCLNPVIGYDMASKVAKNAHKKGITLKESAMELKALSEEDFDKYVRPELMLSPKEKK

SEQ ID NO: 45142 - DNA, 1389 bp, Candida albicans SC5314
  CDS (1)..(1389): transl_table=12
atgtcacgtattgaatctgacgcttttggtgaaatctcagtgccggctgataaatattggggtgctcaaacccagagatctttgggtaactttgagatcggcgatattaaaatgccaattccaataattaaagctttcgggactttgaaaaaagccgcagctatcgttaatgaaaaaatgggttccttagaccctaaattatcatctgctattcaagaagctgcttccgaggtaattgagggaaaattcaatgataatttcccattggtggtttatcaaactggttcaggaacccaatcgaacatgaatgccaatgaggtaatctccaaccgtgcaattgaaatattgggtggagaaaaaggttccaaaaaaccagttcacccaaatgaccattgtaatatgtctcaatcttctaatgatactttcccaactgtcatgcacattgctgctgttagtgaagttgaacagcagttattgccaaaattgaccgctttgagagatgcctttgaagctaaatcaaaagaatttagtgacatcattaaaattggtagaactcatttgcaagatgctactccattgacattgggtcaagagttttctggttacgttcaacaattgacttttggaatcgaaagaattaagctgactttgccaagattatcaaatttagcacaaggtggtactgctgtaggaacaggtttaaacaccaaaaaggggtttgatgttaaaattgctgaagaaatatccaatttaaccggtttgcaattccacactgctccaaacaagtttgaagcattggctgcacatgatgccatcgttgaaacatctggtgctttgaatactttggctgtttcattatacaaaattgccaatgatatcagatacttggggtccggtccaagatgtggttacggtgaattatctttacctgaaaatgaaccaggaagtctgatcatgcctggaaaagttaatccaacccaatgtgaagccatgactatggtctgtgcacaagtaatgggtaataatactacaatcaccttttcaggagctctgggtcaatttgaattgaatgtattcaagcctgtgatggcatataacttattaaattctattagattgttaggtgatgcttgtcaatcatttagattgcattgtgttgaaagtattaaagccaacaaggaaaagattgataaggtgttgaatgaatctttgatgttagttactgctttgaacccaaaaattggatatgataacgcttcgaaggctgctaagaatgcccataaaaaaggcattaccttaaaggaatcctgtttggagttggaattattaacttcagaagagtttgacgaatgggtcagaccagaaaaaatgattggtccaaaggattag

SEQ ID NO: 45143 - protein, 462 aa, Candida albicans SC5314
MSRIESDAFGEISVPADKYWGAQTQRSLGNFEIGDIKMPIPIIKAFGTLKKAAAIVNEKMGSLDPKLSSAIQEAASEVIEGKFNDNFPLVVYQTGSGTQSNMNANEVISNRAIEILGGEKGSKKPVHPNDHCNMSQSSNDTFPTVMHIAAVSEVEQQLLPKLTALRDAFEAKSKEFSDIIKIGRTHLQDATPLTLGQEFSGYVQQLTFGIERIKSTLPRLSNLAQGGTAVGTGLNTKKGFDVKIAEEISNLTGLQFHTAPNKFEALAAHDAIVETSGALNTLAVSLYKIANDIRYLGSGPRCGYGELSLPENEPGSSIMPGKVNPTQCEAMTMVCAQVMGNNTTITFSGASGQFELNVFKPVMAYNLLNSIRLLGDACQSFRLHCVESIKANKEKIDKVLNESLMLVTALNPKIGYDNASKAAKNAHKKGITLKESCLELELLTSEEFDEWVRPEKMIGPKD

SEQ ID NO: 45144 - DNA, 1419 bp, Ustilago maydis 521
  CDS (1)..(1419)
atgtcgcagggcaagttccgttctgaaaaggacacgtttggtcccctccaggtgcccgccgaccgctactggggcgctcagacccagcgatcgctccaaaactttgacattggtggacctcaagagcgcatgcccgagccgctgatcgaggcctttggtgtcctcaagaaggcggctgccaccgtcaacaagtcattcggtcttgaccccaaggtcgccgatgcgatttgccaggctgccgacgaggtgattgccggtaagctccacagccacttcccccttgttgtcttccagaccggttcaggtacccagaccaacatgaacgtcaacgaggtcatcagcaaccgtgccatcgagatcctcggcggggagctcggcagcaagaaacccgtccaccctaacgaccacgtcaacatgagccagtcgtccaacgacaccttccccaccgccatgcacgtcgcctcggtcacccagatcaccaagtcgctcctccccgctcttgaggagcttcgcgccgcgctcgacgccaagcgcgccgaatttgacgatatcatcaagatcggacgtacgcacttgcaggacgcgacgcccttgacgctcggccaggagttctctggctacgtaaagcaggtcgagaacggtatcgagcgcgtcaaggcggttattcctcgtctttcgcagctcgcccagggtggtactgctgtcggaactggtctcaacacctacatcggtttcgacaagaaagtcgctgccgagatctccaacatcaccggcttgcactttgagaccgcagagaacaagttcgaagcgcttgcagctcacgatgcgatcgtggaagccagcggtgctctcaacacagtggctgtgtcgttgatgaaaatcgctaacgacatccgatacctcggctcgggacctcgttgtggtctgggagagctgagcttgcccgagaacgaaccgggttcgtcgatcatgccaggcaaggtcaaccccacgcagtgcgaggcgctcaccatggtcgctgctcaggtcatgggtaacaacaccaccatctcggtcgccggctcgtacggtcagtttgagctcaacgtcttcaagccggtcttggtcaagaacctgctccagtccatccgtctgctcgctgatggcgctcgcagcttcaccaagaactgcgtcgtcggtatcgaggctaacagggacacgatcaacaagattctcaacgaaagtctcatgcttgctaccatcttgaactcgcatctcggctacgacaatgtcgccgcggccgctaagaaggctcataaggagggcacaaagttggtcgacgctaccgtcgcgttgggtttcatgaccgaggaggagttcaaaaagatcgtcaggcccgagttcatgcttggtcccaccgagtacaaggccaagaactaa

SEQ ID NO: 45145 - protein, 472 aa, Ustilago maydis 521
MSQGKFRSEKDTFGPLQVPADRYWGAQTQRSLQNFDIGGPQERMPEPLIEAFGVLKKAAATVNKSFGLDPKVADAICQAADEVIAGKLHSHFPLVVFQTGSGTQTNMNVNEVISNRAIEILGGELGSKKPVHPNDHVNMSQSSNDTFPTAMHVASVTQITKSLLPALEELRAALDAKRAEFDDIIKIGRTHLQDATPLTLGQEFSGYVKQVENGIERVKAVIPRLSQLAQGGTAVGTGLNTYIGFDKKVAAEISNITGLHFETAENKFEALAAHDAIVEASGALNTVAVSLMKIANDIRYLGSGPRCGLGELSLPENEPGSSIMPGKVNPTQCEALTMVAAQVMGNNTTISVAGSYGQFELNVFKPVLVKNLLQSIRLLADGARSFTKNCVVGIEANRDTINKILNESLMLATILNSHLGYDNVAAAAKKAHKEGTKLVDATVALGFMTEEEFKKIVRPEFMLGPTEYKAKN

SEQ ID NO: 45146 - DNA, 1533 bp, Cryptococcus neoformans var. neoformans B-3501A
  CDS (1)..(1533)
atgacgactcccacaaagacatccagtctcaaaaccacccagatgctcgcccgatcactcagactcacccgtactcttccccgtgtctctcttgcttctcgcggattctcctccacttcatacatcatggcagagcaaaagttcaggaaggagaaggacacttttggtgacctccaggtccccgctgacaggtactggggtgcccagacgcagcgaagtttgatgaactttgacatcggcggtccgactgagcgaatgcctcctcccctcatcaaggcctttggcgtcctcaagaaggccgccgctgctgttaaccagacttatggcctccctgccgaggttgccgagcacatccaaaaggctgctgacgaagtcatttctggcaagctcattgacgaattccccctcgtcgtcttccaaactggttccggcacccagaccaacatgaatgtgaacgaggtcatttccaacagggccattgaaatgatgggtggtgagcttggcagcaagaagcccgttcaccccaacgaccacgtcaacatgagccagtcttccaacgacactttccccaccgctatgcacattgctgccgttgttgagatcaacgagcagctccttcccgccatgaaggagctccacgctgccctcaaggccaagcaggacgctttcgagaacatcatcaagatcggtcgaactcacttgcaggatgctacccctttgactctcggtcaggagttctctggttacgtcacccaggttgagaggggtatcggccgtgtcgaggccaccttgaagaatttgagcatgttggctcaaggtggtaccgccgttggtactggtttgaacaccaggaagggctttgacgagaaggttgctgccgagatctcaaagatcaccggctacgactttgtcactgctcccaacaagtttgaggcccttgccgctcatgacgctatcgtcgaggcctctggtgccctcaacgtcgtcgctgtcagcttcatgaagatcgccaacgacatcaggtacctcggatctggtcctcgatgcggtctcggtgaactcgagttgcccgagaacgagcctggatcttccatcatgcccggcaaggtcaaccccacccagtgcgaggccctcaccatggttgctgcccaagtcatgggtaacaacaccaccatctctgtcgccggatcatacggccagttcgagctcaacgtcttcaaacccgttctcatcaagaacctcttgcagtctatccgactcttgtctgatggtgccaggagcttcaccaagaactgtgtcgtcggtatcaaggcgaacgaggacaggatcaagaagattatgaacgagagtttgatgttggctacctgcttgaacagcactttgggttacgatgacgtcgccgccatcgccaaaaaggctcacaaggagggtctcaccctcaaggagtctacccttgctctcggcaagctcacttctgaacaattcgacgagaaggtcaggcctgagctcatgttggctcccactgacgcttaa

SEQ ID NO: 45147 - protein, 510 aa, Cryptococcus neoformans var. neoformans B-3501A
MTTPTKTSSLKTTQMLARSLRLTRTLPRVSLASRGFSSTSYIMAEQKFRKEKDTFGDLQVPADRYWGAQTQRSLMNFDIGGPTERMPPPLIKAFGVLKKAAAAVNQTYGLPAEVAEHIQKAADEVISGKLIDEFPLVVFQTGSGTQTNMNVNEVISNRAIEMMGGELGSKKPVHPNDHVNMSQSSNDTFPTAMHIAAVVEINEQLLPAMKELHAALKAKQDAFENIIKIGRTHLQDATPLTLGQEFSGYVTQVERGIGRVEATLKNLSMLAQGGTAVGTGLNTRKGFDEKVAAEISKITGYDFVTAPNKFEALAAHDAIVEASGALNVVAVSFMKIANDIRYLGSGPRCGLGELELPENEPGSSIMPGKVNPTQCEALTMVAAQVMGNNTTISVAGSYGQFELNVFKPVLIKNLLQSIRLLSDGARSFTKNCVVGIKANEDRIKKIMNESLMLATCLNSTLGYDDVAAIAKKAHKEGLTLKESTLALGKLTSEQFDEKVRPELMLAPTDA

SEQ ID NO: 45148 - DNA, 1494 bp, Tribolium castaneum
  CDS (1)..(1494)
atggcgttatcaaggctctacagcagtcgcgtgactgggagcgcaaaagccgcgttgaatctctaccggaaatctctccattctcaaatagccctaatgtcggacttccgcatcgaaaaggacactttcggcgagctcaaagtgccctctgacaagtactatggggcccaaaccctgcgatccgtcatgaacttccccatcgggggcgaattcgagcgcatgccgtaccccgttataacggccatgggggtcttgaaaaaagccgccgccaccgtcaacaaagactacggtctcgaccccaaaatctccgacgcgatttgcaaagccgctgacgaagtcatctccggcaagctctactgcgaccatttccccctcgtcatttggcaaacgggctccggcacccaaaccaacatgaacacgaacgaagtgatcagtaatcgagctattgaaataatgggcggaaaactcggctccaaggacccggtgcaccccaacgaccacgtcaacaagagccagagcagcaacgacaccttccccacagccatgcacattgccgtggcggtggaaatccaaaacacgctcctgcctggcctcaaaatgctaacaaatagtctcgataagaaagcgcaggagtttaaggatatcatcaaaatcgggcgcacgcacacccaggacgccgtccccctgactctggggcaggaattcagcggctatgtccagcagatgaagttcgggattgatcgaattaacgatactttgcccaggctgtacatgctggctttggggggcacagctgtggggacggggctcaatacccggaaagggttcgccgagaaatgtgccgccgaaatttcaaaactgacaggattgcccttcacttcagcaccgaataagtttgaggctttggccgctcatgacgccctggttgaggtctcgggggcgctcaatgtggtcgcttgctcgattatgaaaattgcaaacgatattaggtttttggcgtctggccctcgctgcggcttgggcgagctgtcgctgcctgagaacgaacccggcagctccatcatgccgggcaaagtgaacccaacccagtgcgaagccatcaccatggtggccgcccaggtgatgggtaaccacgtggctgtgaccattggtggttcgaacggtcatttcgaattgaacgtttttaagcccatgatggtagccaatgttttacgatcaatccgtttgttgggagattccagcaaagctttcacaaccaattgtgtagatggcattgtagccaacaaagaccgaatcgataagcttttgcacgagagtttgatgttggtcacggctcttaacccacacattggctacgacaaggcggcccaaattgccaaaacggcgcacaaggagaacagcactttgaaggaaacggcgatcaagttggggattttgaccgaggaacagttcaaagaatgggtcaaacctgaggagatgttgggccctaaataa

SEQ ID NO: 45149 - protein, 497 aa, Tribolium castaneum
MALSRLYSSRVTGSAKAALNLYRKSLHSQIALMSDFRIEKDTFGELKVPSDKYYGAQTLRSVMNFPIGGEFERMPYPVITAMGVLKKAAATVNKDYGLDPKISDAICKAADEVISGKLYCDHFPLVIWQTGSGTQTNMNTNEVISNRAIEIMGGKLGSKDPVHPNDHVNKSQSSNDTFPTAMHIAVAVEIQNTLLPGLKMLTNSLDKKAQEFKDIIKIGRTHTQDAVPLTLGQEFSGYVQQMKFGIDRINDTLPRLYMLALGGTAVGTGLNTRKGFAEKCAAEISKLTGLPFTSAPNKFEALAAHDALVEVSGALNVVACSIMKIANDIRFLASGPRCGLGELSLPENEPGSSIMPGKVNPTQCEAITMVAAQVMGNHVAVTIGGSNGHFELNVFKPMMVANVLRSIRLLGDSSKAFTTNCVDGIVANKDRIDKLLHESLMLVTALNPHIGYDKAAQIAKTAHKENSTLKETAIKLGILTEEQFKEWVKPEEMLGPK

SEQ ID NO: 45150 - DNA, 1401 bp, Herminiimonas arsenicoxydans
  CDS (1)..(1401): transl_table=11
atgcgtcaagaacgcgacttcctcggcatcaaagccatccctccaccagcctattggggtgtacacacggcccgcgcagtggagaattttcccatcaccggacaaaccgttgcgcaaatgccggagctcattcgtgcttttgcattcgtaaagaaagctgccgctcatgccaacctgcaaatgggcgtactcaacaccagccaggccgacgcgatctcaaaagcatgtgacgatctgatcgccggacaactgcacgaccaattcgtcgtcgatgtcatacaaggtggcgcaggcacatcaaccaatatgaatgccaacgaggtaatcgccaatcgtgcgcttgagcacctcggtttggacaagggtcgctacgacgtcattcacccgaatgatcacgtcaatgcatcccagagtaccaacgacgcctatccaacagcactgaaaattgcgatctggttcgaccttcatcagctgctgcaggccctcgctaatctgcgcggcgcctttgaagccaaggccaccgaattcgtttccattctgaagataggacgtacccagttacaagacgccgtgccgatgacgctggggcaggaatttgcagcatttgccagcatgattgccgacgacgagaagcgcctgcgggaaaccgccatcctgatgaccgaagtgaacctgggcggcaccgccatcggtaccggcatcaacgcgccggtgggttatgtcgatgtcgtcattcccaaactcgccgaactgtcgggcgtccctgtaaccaaggcacgcgacatgattgccgcgacctcggataccagcggcttcgtcgatgtctcgggcatactcaagcgcatcgccaccaagctttccaagatcagcaacgatctgcgtctgctctcctccggcccccaggccggtatcggcgacatccagttgccggcgcggcaggcagggtcgtcgatcatgccgggcaaggtcaatcccgtgatccccgaggtgatgaaccaggtggcctttgaagtcatcggtaacgacgttgccatcaccatggcatcggaaggcgggcaactgcaactcaacgcctttgaacccttgatcggctgggcactgcacaagagtgtgatacaccttgccaaggcttgccacacgcttcaggtgaactgcgtagaaggcatcaagagcaatcaggatttactggcgcagcgtatcgcagagtccgtcaccttggtcacggcactgaatccgctgatcggttatgaaaaggcggcggcgattgcaaaagccgccatcgcaagcggcaagccgattgccgtggtggcagaagagctgggcatcatgagtcaggctgacatgcagaaattcttgcgacctgaaaacctgactcaggcaggcgccttgatttcaggctaa

SEQ ID NO: 45151 - protein, 466 aa, Herminiimonas arsenicoxydans
MRQERDFLGIKAIPPPAYWGVHTARAVENFPITGQTVAQMPELIRAFAFVKKAAAHANLQMGVLNTSQADAISKACDDLIAGQLHDQFVVDVIQGGAGTSTNMNANEVIANRALEHLGLDKGRYDVIHPNDHVNASQSTNDAYPTALKIAIWFDLHQLLQALANLRGAFEAKATEFVSILKIGRTQLQDAVPMTLGQEFAAFASMIADDEKRLRETAILMTEVNLGGTAIGTGINAPVGYVDVVIPKLAELSGVPVTKARDMIAATSDTSGFVDVSGILKRIATKLSKISNDLRLLSSGPQAGIGDIQLPARQAGSSIMPGKVNPVIPEVMNQVAFEVIGNDVAITMASEGGQLQLNAFEPLIGWALHKSVIHLAKACHTLQVNCVEGIKSNQDLLAQRIAESVTLVTALNPLIGYEKAAAIAKAAIASGKPIAVVAEELGIMSQADMQKFLRPENLTQAGALISG

SEQ ID NO: 45152 - DNA, 1407 bp, Burkholderia vietnamiensis G4
  CDS (1)..(1407): transl_table=11
atgacggaacgcggctttcgcgtcgaagcggatctattagggcagcgaaacgtgcccgactcggcgtactacggcgtccatacgctgcgcgcgcaggagaacttcgacatctccgggcgcacgatcgcgtcgctgccgtacctcgtcgtcgcgctggcggcggtcaaggaagcggccgccgacgcgaactgcgagctcgggctgctgccgcgtgcgtatcgcgacgcgatcgccgccgcctgcgccgaaatccgcgacggccgcctgcacgaccagttcgtggtcgacgtcatccagggcggggcgggcacgtcgaccaacatgaacgcgaacgaggtgatctgcaaccgcgcgctcgaaatcatggggcatgcacgcggccagtacgaacatctgcatccgaacgagcacgtcaacctcgcacagagcaccaacgacgtctacccgaccgcgatccgcatcgcgacctgcttcgcggtcgagcaactgctcgaggcgatggcgcacctgcgcgacgcgttcgcgcagaaggccgacgcattcgccgatctgctcaagctcggccgcacgcagttgcaggacgcggtgccgatgacgctcggccaggagttctcgacctatgcggtgatggtgagcgaagacatcgcgcgcctgcaggaggccggctggctgatgcgcgagatcaacctcggcgcgaccgcgatcggcaccggcatcaccgcgcatcccgactatgcggcgaaggcgctggccgcgctgcggcgcatcaccggcctcgacctgagcaccgcgccgaacctgatcgaggcgacgcaggattgcggcgcgttcgtgcagatgtcgggcgtgctgaagcggatcgccgtcaagctgtcgaagatctgcaacgacctgcggctgctgtcgagcggcccgcgcgccggcttcggcgagatcaatctgccgccggtgcaggccggttcgtcgatcatgccgggcaaggtgaacccggtgattccggaagtcgtgaaccaggtcgcgttcgaggtgttcggcaacgacctgaccgtgacgttcgccgccgaggccggccagctgcagctcaacgcgttcgagccggtgatcgccagcgcgctgttccgcagcttcggccatctgagcgcggcctgcacgacgctcgccgatcgctgcgtgagcggcatcaccgcgaaccccgagcggctgcgcgacacgatggagcgctcggtcgcgctcgccaccgcgctgaacccgtacatcggctacaagcgcgccaccgccgtcgccaaggaggcgcacgagagcggcaagtcgattcgcgaggtcgtgctggaacaccggctgatgaccgatgcgcaactcgacgacgcgctgcaacccgaagcgctgatccgcccgcgcgcttactga

SEQ ID NO: 45153 - protein, 468 aa, Burkholderia vietnamiensis G4
MTERGFRVEADLLGQRNVPDSAYYGVHTLRAQENFDISGRTIASLPYLVVALAAVKEAAADANCELGLLPRAYRDAIAAACAEIRDGRLHDQFVVDVIQGGAGTSTNMNANEVICNRALEIMGHARGQYEHLHPNEHVNLAQSTNDVYPTAIRIATCFAVEQLLEAMAHLRDAFAQKADAFADLLKLGRTQLQDAVPMTLGQEFSTYAVMVSEDIARLQEAGWLMREINLGATAIGTGITAHPDYAAKALAALRRITGLDLSTAPNLIEATQDCGAFVQMSGVLKRIAVKLSKICNDLRLLSSGPRAGFGEINLPPVQAGSSIMPGKVNPVIPEVVNQVAFEVFGNDLTVTFAAEAGQLQLNAFEPVIASALFRSFGHLSAACTTLADRCVSGITANPERLRDTMERSVALATALNPYIGYKRATAVAKEAHESGKSIREVVLEHRLMTDAQLDDALQPEALIRPRAY

SEQ ID NO: 45154 - DNA, 1392 bp, Candidatus Protochlamydia amoebophila UWE25
  CDS (1)..(1392): transl_table=11
atggactatcgaacagaaaaagacaccttaggagaagttagagtttctgcagactgttattatggagctcaaacgaagcgttcctacgataatttttcgattggaatagaaaaaatgcctaaggaagtaattcatgcgcttgctctaatcaagaaagcggccgccttaactaacgaacagcttggtttattaccaaaaaataaacaactcgtgatttgtgaagtttgcgacgaaattttatctggctgcttagatgatcaatttccgttatctgtttggcagacagggtctggaacgcaaacaaacatgaacctcaatgaagtgattagtaatagggccattgaaaagctgggtggggtgcttggttctaaatatccgatccatcccaatgatgatgtcaacttatctcaatcgtctaatgatgtgtttccttcagccatgcatattgcggtgatgtttgatatatctaagaagttgttaccaagtttaagagaactaaaagaaactttagaagcgaaagttgaagcttttaaagatattgtaaaaattgggcgtacgcatttaatggatgcgacccctttaacacttggacaagaattttcggggtatgtcagccaaatagagcatggaatacaagctctaaaaaatacgtttgcgcatctttctgaattggccttgggagcaactgctgtgggaacgggaatgaatacgcatcccaactacgcaaaattagtggctgaaaaaattagtgagttgtccggatttaattttgtttctgccaggaataaatttgagtcgctcgcgactaatgacgctcttgtagaagttagcggggctttaaaaagggtggccgtttcagtgtttaaaattgccaatgatattcggtggctttcttcaggccctagatgtgccataggagaaatcgttattcctgctaatgaaccaggctcatcgattatgccaggaaaagttaatcctacacaaagtgaagccttaatgatgattgccattcaagtaatggggaatgatgggatcattggttttgcaggttcgcaaggcaatctagaattgaatgtttttcgccctcttattatttataacttaattcaatctattcgattattgagcgatgctatttctaattttaaccaaaaatgtgttgtcggaatagaggctaaccaaacaagaattgcagaacatctgaatcgttccttaatgttagcaactgctcttaatcatgcaattggttatgatcgtgcaagtcaaattgtaaaaaaagcatacttagaaaatataacattaaaagaagctgcactagctttagcctttttaaccgaagatgaatttgatcagattatggatcctaaaaaaatgattgggccaatgacttaa

SEQ ID NO: 45155 - protein, 463 aa, Candidatus Protochlamydia amoebophila UWE25
MDYRTEKDTLGEVRVSADCYYGAQTKRSYDNFSIGIEKMPKEVIHALALIKKAAALTNEQLGLLPKNKQLVICEVCDEILSGCLDDQFPLSVWQTGSGTQTNMNLNEVISNRAIEKLGGVLGSKYPIHPNDDVNLSQSSNDVFPSAMHIAVMFDISKKLLPSLRELKETLEAKVEAFKDIVKIGRTHLMDATPLTLGQEFSGYVSQIEHGIQALKNTFAHLSELALGATAVGTGMNTHPNYAKLVAEKISELSGFNFVSARNKFESLATNDALVEVSGALKRVAVSVFKIANDIRWLSSGPRCAIGEIVIPANEPGSSIMPGKVNPTQSEALMMIAIQVMGNDGIIGFAGSQGNLELNVFRPLIIYNLIQSIRLLSDAISNFNQKCVVGIEANQTRIAEHLNRSLMLATALNHAIGYDRASQIVKKAYLENITLKEAALALAFLTEDEFDQIMDPKKMIGPMT

SEQ ID NO: 45156 - DNA, 1434 bp, Bacillus thuringiensis serovar konkukian str. 97-27
  CDS (1)..(1434): transl_table=11
atgatagcaacgaaggatatacgtatagaaaaagactttttaggtgaaaaggaagtaccaagtatagcttattacggtgtacaaacattacgcgctgtagaaaacttcccgattacaggatatcgcattcatccgtcactcattacggcaatggcaattgtgaaaaaagcggcggcacttgcaaatatggatactggatacttagcgaaagatattggacatgaaattgcggaggcagcgcaagagattgttgatggaaagttccatgatcaatttattgtggatccaatccaaggcggtgctggaacttctattaatatgaatacaaacgaagtaatcgctaatcgagcgttagaacgtatgggatatgaaaaaggcgagtatgcaaaaattagcccaaatacgcatgtaaacatggctcaatcaacgaatgatgcgtttccaacggggattcatattgcaactcttatgatgttagaagaacttcttattacaatggaagaacttcatgctgcttttcgtgcaaaagcaaaagagttcgatcacgtcattaaaatgggacgtacacatttacaagatgctgtgccgattcgtcttggtcaagaatttgaagcgtatagccgagtgcttgcgcgtgatataaaaagaattaaacagtctcgccaacatttatatgaagtgaatatgggggcgacagctgttggtacgggattaaatgcaaaccctacgtacattgaacaagtggttaaacacttgcgaacatttagcggattcccacttgttggtgcagagcatttggttgatgcaacgcaaaatacagatgcatacacagaagtatctgcagcattaaaagtatgtatgatgaatatgtctaaaattgcgaatgaccttcgtattatggcatctggtccacgtgttggattggcggaaattcaattaccagctcgccaaccaggttcatctattatgccgggtaaagtaaatcctgttatggcagaagtaattaatcaagtggctttccaagtaattggtaatgatcatacaatttgcttagcgtcagaagccggacaattggagctcaacgtaatggagccggtgcttgtatttaatttaattcaatctattagtattatgaataacggattccgtgtattccgtgaatattgtattaaaggaattacagcaaatgaagaattgctgaagcaatatgttgagaaaagtgttggaattattacagcagttaaccctcatattggttatgaagcagcatctcgcattgcacgtgaagcgattgaaacaggaaaatctgttagggagttatgtttagaacatggtgtactgacagaagaagaattggatattattttagatccattcgaaatgacgcatcctgaaattgctggggcttctttattaaaggataagaagatgtaa

SEQ ID NO: 45157 - protein, 477 aa, Bacillus thuringiensis serovar konkukian str. 97-27
MIATKDIRIEKDFLGEKEVPSIAYYGVQTLRAVENFPITGYRIHPSLITAMAIVKKAAALANMDTGYLAKDIGHEIAEAAQEIVDGKFHDQFIVDPIQGGAGTSINMNTNEVIANRALERMGYEKGEYAKISPNTHVNMAQSTNDAFPTGIHIATLMMLEELLITMEELHAAFRAKAKEFDHVIKMGRTHLQDAVPIRLGQEFEAYSRVLARDIKRIKQSRQHLYEVNMGATAVGTGLNANPTYIEQVVKHLRTFSGFPLVGAEHLVDATQNTDAYTEVSAALKVCMMNMSKIANDLRIMASGPRVGLAEIQLPARQPGSSIMPGKVNPVMAEVINQVAFQVIGNDHTICLASEAGQLELNVMEPVLVFNLIQSISIMNNGFRVFREYCIKGITANEELLKQYVEKSVGIITAVNPHIGYEAASRIAREAIETGKSVRELCLEHGVLTEEELDIILDPFEMTHPEIAGASLLKDKKM

SEQ ID NO: 45158 - DNA, 1419 bp, Acinetobacter sp. ADP1
  CDS (1)..(1419): transl_table=11
atgaacgctgaaattcaaactcgtacagaaaaggatttactgggtctacgtgaagtaccaaatcaattttacttcggtatccaaactttacgagcaattgaaaacttcaatctaagctctaataaaatcaatcaatatccaaatttgatcaaatcattagcgatggtgaagcatgcatgtgcagaagcaaaccatactttgggtaaattaagtgatttaaaatttaatgcaatcaaatatagctgtgatcagttaattcaaggtttttaccacgaacagttccccattgacctcattcagggtggtgcgggtacctctaccaacatgaatgccaatgaagtaattgcaaatattgcattagagcatttgggtcataaaaaaggtgaatacaactttttacatccaaacaatgatgtgaatatgtctcaatcgaccaatgacgtttatccaactgcaattcgcttaggtttattattcagcttagatgatttaaatacgccttttgaaaatttgattgctagcctacgccgtaagggtgatgaatttgcacatattttgaaaatgggccgtactcagcttcaagacgccgttccaatgactttgggtcaagaatttaatgcttttgcttctacacttgaaaaagatttgatcaagattagagaaatcgcgcctcaaactctaaattatatgaatcttggcggtactgcgattggtacaggaatcaatacagaacaaaaatatacccaacttgccattgatgcacttgcgacaattagccagaaagatatcaagtctgctcccgatttaatcgaagcgacttcagatatgggtgattttgtattgttgtcaggattacttaaacgtacagcaactaaactctcaaaaatcgccaatgatctacgtttactttcaagtggtccacgtactgggatcaatgaaattaatctagagccgcgccaacctggcagctcaatcatgccaggtaaagtaaacccagttattccagaggcaatgaatcttgtatgtttccagattattgcgaatgatttggctgtaactttatctgctgaagcgggtcaattacaattaaatgcaatggaacccctgattgcattcaaactgtttgaatcaattgagttacttggtaatgcgctcgtcatgttccaaaccaagtgtatcgataccgtgactgcaaacgaacaacattgtaaagcacttgtcgataattccattggaattgtgactgctctgaatccttatcttggatatgaaaccacaacacgtattgctaaaactgcaaatgaaagtggtttaagcgtattgagtctgatcaaatctgaaaacctgttgtctgatgatcaactttcagaaattttagcggttgacaatatggtgcaaccgaaagctgaaatggtttaa

SEQ ID NO: 45159 - protein, 472 aa, Acinetobacter sp. ADP1
MNAEIQTRTEKDLLGLREVPNQFYFGIQTLRAIENFNLSSNKINQYPNLIKSLAMVKHACAEANHTLGKLSDLKFNAIKYSCDQLIQGFYHEQFPIDLIQGGAGTSTNMNANEVIANIALEHLGHKKGEYNFLHPNNDVNMSQSTNDVYPTAIRLGLLFSLDDLNTPFENLIASLRRKGDEFAHILKMGRTQLQDAVPMTLGQEFNAFASTLEKDLIKIREIAPQTLNYMNLGGTAIGTGINTEQKYTQLAIDALATISQKDIKSAPDLIEATSDMGDFVLLSGLLKRTATKLSKIANDLRLLSSGPRTGINEINLEPRQPGSSIMPGKVNPVIPEAMNLVCFQIIANDLAVTLSAEAGQLQLNAMEPLIAFKLFESIELLGNALVMFQTKCIDTVTANEQHCKALVDNSIGIVTALNPYLGYETTTRIAKTANESGLSVLSLIKSENLLSDDQLSEILAVDNMVQPKAEMV

SEQ ID NO: 45160 - DNA, 1440 bp, Erwinia carotovora subsp. atroseptica SCRI1043
  CDS (1)..(1440): transl_table=11
atgtcaacgaatatccgtattgaagaagacctgttaggcactcgtgaagtccccgctgacgcgtattatggtatccatacgctgcgtgcgattgagaacttttatatcagcaatagcactattagcgatattccagaatttgttcgtgccatggtgatggtaaaaaaagcagccgcactggcgaataaagaactgcaaaccatcccgcgtaaaattgccgacactattctgcaagcctgtgatgaagtgctgaataacggtaaatgtctggatcagttccctgtcgatgtgtatcagggtggtgcgggtacgtcagtcaacatgaacaccaacgaagtgctggcgaatatcggtctggaactgatgggtcatcagaaaggtgaataccagtacctgaacccgaacgaccacctgaacaaatgccagtccaccaacgatgcttacccgacggggttccgtattgcggtatacacctcaatcctgaagctggtagaagccattactcagttgagcgatggctttgagcgtaaagcaaaagagttcgaaaacatcctgaaaatgggtcgtacccagttgcaggacgccgtgccgatgaccctcggccaagaattccacgcgttcaacgtactgctgaaagaagaaaaccgtaacctgctgcgtaccgcagagctgctgctggaagtaaaccttggcgcaaccgccatcggtacccgtctgaacacgccggatgagtaccagaagcttgctgttcagcacttggcaaaaatcagcggcctgccttgcgtaccggctgaagacctgatcgaggcgacctccgactgcggtgcttacgtgatgatgcacagcgccctgaaacgcgtagcggttaaaatgtcgaagatctgtaacgacttgcgcctgctgtcttccggcccacgtactggtctgaacgaaatcaacctgccagaattgcaggcgggatcatccatcatgccagccaaagttaaccctgtagtaccggaagtggtgaatcaggtgtgcttcaaggtcatcggcaacgatacctgcgtgaccatggcggcagaagcaggccagttgcagttgaacgtgatggaaccggttatcggacaagccatgttcgaatctatccagattctgtctaacgcctgctacaacctgctggaaaaatgtgtcaacggcatcaccgccaacaaagaagtgtgtgaagcttatgtcttcaactctatcggtatcgtgacctacctgaacccgttcatcggtcaccacaacggcgatatcgttgggaaaatctgtgccgaaaccggcaaaagcgtgcgtgaagtcgtgctggagcgcggcctgctgaccgaagaacagctggacgacattttctccatccagaacctgatgcacccagcctacaaagccaaacgctacaccgacgaaaacgaagccgtttaa

SEQ ID NO: 45161 - protein, 479 aa, Erwinia carotovora subsp. atroseptica SCRI1043
MSTNIRIEEDLLGTREVPADAYYGIHTLRAIENFYISNSTISDIPEFVRAMVMVKKAAALANKELQTIPRKIADTILQACDEVLNNGKCLDQFPVDVYQGGAGTSVNMNTNEVLANIGLELMGHQKGEYQYLNPNDHLNKCQSTNDAYPTGFRIAVYTSILKLVEAITQLSDGFERKAKEFENILKMGRTQLQDAVPMTLGQEFHAFNVLLKEENRNLLRTAELLLEVNLGATAIGTRLNTPDEYQKLAVQHLAKISGLPCVPAEDLIEATSDCGAYVMMHSALKRVAVKMSKICNDLRLLSSGPRTGLNEINLPELQAGSSIMPAKVNPVVPEVVNQVCFKVIGNDTCVTMAAEAGQLQLNVMEPVIGQAMFESIQILSNACYNLLEKCVNGITANKEVCEAYVFNSIGIVTYLNPFIGHHNGDIVGKICAETGKSVREVVLERGLLTEEQLDDIFSIQNLMHPAYKAKRYTDENEAV

SEQ ID NO: 45162 - DNA, 1440 bp, Erwinia carotovora subsp. atroseptica SCRI1043
  CDS (1)..(1440): transl_table=11
atgtcagaaaacatccgtattgaagaagacctgttaggcacccgagaagttcccgcagacgcgtattatggcgttcatacgctgcgcgccgtcgaaaacttctatatcagtaacaataaaatcagtgacattcccgagttcgtacgcggcatggtcatggtgaagaaagccgccgcgctggcgaacaaagagctacaaactatcccgaaaaaaatcgccgacgtcatcatccgcgcctgtgatgaagttctgaataacggcaaatgcatggaccagttcccagtagatgtgtatcaggggggagcaggtacgtcggtcaacatgaataccaacgaagtattagccaatattggtctggagctgatgggccaccagaaaggcgaataccagtatctgaaccccaacgatcatctgaataaatgccaatccaccaatgatgcctaccccaccggatttcgtatcgcggtctacgcggccatactgaaattgacggatgcgatagcgaagttgagcgatggcttcgagcacaaagccaaagaatttgaagacgttctgaagatggggcggacccagttgcaggacgccgtgccaatgacgctcggtcaggaatttcatgcgtttaacgtgctgttgcaagaggaaatcaaaaacctgctgcgcacggcggaactgctacttgaagtcaatctgggggccaccgcgatcggtacacgcctgaacacaccagacggctaccagcaactggcggtacagcgtttggcggaagtcagcggcctgccgtgtgtgccagcagaagacttgatcgaagccacgtcagactgtggtgcctatgtaatggtacacagttcgctgaagcgtctggctgtgaagctgtcgaagatttgtaatgacctgcgtttgctctcttccggccctcgcgctggcctgaatgaaatcaacctgccagagttgcaggcgggttcctccatcatgcctgccaaagttaaccccgtggtgccggaagtcgtcaatcaagtgtgcttcaaggtcatcggtaacgacacctgcgtcactatggcgtcggaggccgggcaattacagttaaacgtgatggagccggttatcggtcaggcaatgtttgaatcaacccacattctgactaacgcctgctacaacctgctggagaaatgcgtcagcggtatcaccgctaataagggcgtctgcgaagcctatgttttcaactccatcggaattgtgacgtacctgaacccgttcatcggccaccacaatggcgacattgtcggcagaatctgtgcggaaacaggaaagagcgtgcgtgaagtcgtactggagcgcggtctgctgacagaagctgagctggatgacattttctccatccagaacctgatgcacccagcgtacaaagccaaacgctacactgatgaaaacgagcttccttaa

SEQ ID NO: 45163 - protein, 479 aa, Erwinia carotovora subsp. atroseptica SCRI1043
MSENIRIEEDLLGTREVPADAYYGVHTLRAVENFYISNNKISDIPEFVRGMVMVKKAAALANKELQTIPKKIADVIIRACDEVLNNGKCMDQFPVDVYQGGAGTSVNMNTNEVLANIGLELMGHQKGEYQYLNPNDHLNKCQSTNDAYPTGFRIAVYAAILKLTDAIAKLSDGFEHKAKEFEDVLKMGRTQLQDAVPMTLGQEFHAFNVLLQEEIKNLLRTAELLLEVNLGATAIGTRLNTPDGYQQLAVQRLAEVSGLPCVPAEDLIEATSDCGAYVMVHSSLKRLAVKLSKICNDLRLLSSGPRAGLNEINLPELQAGSSIMPAKVNPVVPEVVNQVCFKVIGNDTCVTMASEAGQLQLNVMEPVIGQAMFESTHILTNACYNLLEKCVSGITANKGVCEAYVFNSIGIVTYLNPFIGHHNGDIVGRICAETGKSVREVVLERGLLTEAELDDIFSIQNLMHPAYKAKRYTDENELP

SEQ ID NO: 45164 - DNA, 1473 bp, Propionibacterium acnes KPA171202
  CDS (1)..(1473): transl_table=11
ttgactgagatccggatcgaagaagatcttcttgggaaacgggaaatctcgaatgagcactactatggaattcatactttgcgggctttagagaacttccaaatatcacgcggatgtatgaatgacgagcctgacttcattcgtggaatggttcaggtaaagaaggcaacagctctgacgaataagcagttgaaggttctcccgagtgatgtcgctgacgccattgtcgctgcatgcgatgcgatcttggatgatgggcgctgtatggaccaattcccgactgattccttccaaggaggagcgggaacctcgatcaacatgaacaccaatgaggttgtcgccaatttggccctcgaaatgttgggatacccgaaaggcacctatgacgtcatccaccccaacgatgatgtcaataagtcccagtcgactaacgacgcttaccccaccgggttccggctcggggtgtacgctttgctagaggggctgaagcgagccgtcgccgacctcgcagacagtttcgatgccaaggctgaggaatttgccgatgtactgaagatggggcgtacccaattgcaggatgccgtccccatgactttgggtgaggagtttgacgggtacgcacacaacatccgtgctgaactggaccggcttgatattggaagcgatcttctcgtagaggtcaacctgggcggcaccgccatcggaactcggatcaacaccccagacggatatgctgaacttgctgctgagaaactggccgaggtgaccggatacccgattcgtccctccaccaacctcatggaatcgtcttacgacaacggcgcctacattgctgtccattctattatcaaacgcctagcagcgaagatctccaagatctgcaacgatttacgattgctttcatctggaccgagggctgggctcaaggaaatcaaccttccagagatgcaggcgggatcgtccatcatgccggcgaaggtgaatccggtcattcccgaggtcgtcaatcagatctgcttcaaagtatttggaaacgatgtcaccgtctgtttcgctgccgaggccggtcagctagaacttaatgtgatggaaccggcgctgtcgcaagcaatgttcgagtccatccacctgctgaccaatgcctgcgacacgttgcgtagcaagtgcattgacgggatcaccgcaaatgtggagcggtgccgggagtatgtcaccaattccatcggtatcgtgacctacttgaatgatgtgattggacaccatcaaggcgatctcattggcgaggaagctgcccgtaccggaaagtcagttcgtgaggtcgtcctcgaacacgacctcatcccggaggaaaggctggacgagatcatgtcgacccagaacttcctgcacccccggtattccggacgtacctacgagccgagtgaccgcggtctcccggaggatcccaggacattcgtgtccgagcgttgctga

SEQ ID NO: 45165 - protein, 490 aa, Propionibacterium acnes KPA171202
MTEIRIEEDLLGKREISNEHYYGIHTLRALENFQISRGCMNDEPDFIRGMVQVKKATALTNKQLKVLPSDVADAIVAACDAILDDGRCMDQFPTDSFQGGAGTSINMNTNEVVANLALEMLGYPKGTYDVIHPNDDVNKSQSTNDAYPTGFRLGVYALLEGLKRAVADLADSFDAKAEEFADVLKMGRTQLQDAVPMTLGEEFDGYAHNIRAELDRLDIGSDLLVEVNLGGTAIGTRINTPDGYAELAAEKLAEVTGYPIRPSTNLMESSYDNGAYIAVHSIIKRLAAKISKICNDLRLLSSGPRAGLKEINLPEMQAGSSIMPAKVNPVIPEVVNQICFKVFGNDVTVCFAAEAGQLELNVMEPALSQAMFESIHLLTNACDTLRSKCIDGITANVERCREYVTNSIGIVTYLNDVIGHHQGDLIGEEAARTGKSVREVVLEHDLIPEERLDEIMSTQNFLHPRYSGRTYEPSDRGLPEDPRTFVSERC

SEQ ID NO: 45166 - DNA, 1425 bp, Leifsonia xyli subsp. xyli str. CTCB07
  CDS (1)..(1425): transl_table=11
gtgcgggtcgagaccgattcgctgggcgcccgcgacatccccgccgacgcctattggggtgttcacacctcccgggcgctcgagaatttcccgatcgccaagcgcccgatctccgtgtaccccgacctcatcgtggccctcgcgagcgtcaagcaggccgccgcgcgcgccaacctcgagatcggtgtgctggacgcgcacaaggccggcctcatcgaccgcgcctgccagctgatcatcgacggccggttccacgatcagttcgtggtgggcgtcatgcaaggcggggcgggcacctcgacgaacatgaacgccaatgaggtcatcgccaacatcgccctggaactcgacggccacgccaaggccgagtaccagcgtctcagcccgatcgacgatgtcaaccgcagccagagcaccaatgacacctacccgacggcgatcaagatcggactgaccttcgcgctcggccatctcctggacgagctggcgctgctccgcgactcattcgcgagcaaaggtgcggagttccggcacattctcaaggtcggccggacgcagctccaggatgccgtgccgatggcgctcggccaggagttcagcggtttcgccaccacgctcaccgaggaccacgcccgcctcacagagacgaagtccctcctcgccgagatcaaccttggcgccacagcgatcggcaccgggatcaccgcggacgccggctatgccgctgcggcggtcaaacacctcaacctcatcaccggcctcagcctcgagaccgcccccgacctcatcgaatcgaccagcgacgcgggcgctttcatgtcgttctccggatcgctgaagcgcagcgcgatcaaactctcgaagatctgcaacgacctgcgcctgctctcctccggaccgcaggccggactcggcgagatcaacctcccgccgcgtcaggccggttcgagcatcatgccgggcaaagtcaaccccgtcatccccgaggtcgtcaaccaggtcgccttctcggtggccggggctgacgtcaccgtcacgatggcggcggagggcggccagctccagctgaacgccttcgagccggtgatcgcccattcgctgctccagagcatcacctggatggctcaggcgttccacactctccgcgtcaactgcgtggacggcatcactgccaatgaggagcgactcggcgggatggtcggttcctcggtcggcgtcatcaccgcgctcactccgcacatcggctacgcggccgcggccgcgctcgcgaaatcggcgctgctgaccggccggaacgtggccgacctcgtggtcgaggcgaacctcatgagccgtgtggaggtcatgcgcctgctgtccccggcgcgcctgtcggggctggaagcgatcacgacagccatcccggtgatcgaccagcaggcgtga

SEQ ID NO: 45167 - protein, 474 aa, Leifsonia xyli subsp. xyli str. CTCB07
MRVETDSLGARDIPADAYWGVHTSRALENFPIAKRPISVYPDLIVALASVKQAAARANLEIGVLDAHKAGLIDRACQLIIDGRFHDQFVVGVMQGGAGTSTNMNANEVIANIALELDGHAKAEYQRLSPIDDVNRSQSTNDTYPTAIKIGLTFALGHLLDELALLRDSFASKGAEFRHILKVGRTQLQDAVPMALGQEFSGFATTLTEDHARLTETKSLLAEINLGATAIGTGITADAGYAAAAVKHLNLITGLSLETAPDLIESTSDAGAFMSFSGSLKRSAIKLSKICNDLRLLSSGPQAGLGEINLPPRQAGSSIMPGKVNPVIPEVVNQVAFSVAGADVTVTMAAEGGQLQLNAFEPVIAHSLLQSITWMAQAFHTLRVNCVDGITANEERLGGMVGSSVGVITALTPHIGYAAAAALAKSALLTGRNVADLVVEANLMSRVEVMRLLSPARLSGLEAITTAIPVIDQQA

SEQ ID NO: 45168 - DNA, 1884 bp, Desulfotalea psychrophila LSv54
  CDS (1)..(1884): transl_table=11
ttggaggatattatgaagttagatgaaaatactcttaagcaggcagcgctgacggcgggaattgaagaggtagatttacagacattttttgctcagggtgagcgtatagagtatgcagccggtgattggctctttcaggaatcaactcctagaaactgggcaggaattattcttgccggagagattcagcttgttcgtggcctgcatggtagctctcaccgtgttggtaccgtttctgcgggaggattgatatccgagggtgtctttattgatcaggattcccatgccaatggaggttatacccgtttaggggcggtggtctggcaggtttcccgggaaaagattgatgttttcagaaaggagcaaccggagatattttatcgattggtttcccgggtcgcggtggccatcaataggcgtatgcgcacactttccgagcagctttatggtgaaacctgtaaaagacggacgatgagcggttttcgcctggaacatgattccctgggacatagggagattcccggtgatgcctattatggggtgcaaactcagagagctatagagaattttccgatctccggggtgccggtaagtaattttagtcatctcatcgaaggatttgcctttattaagattgctgctgctcgcgctaactttgagcttggggtgatggatggggagaagatggaggctctctgtggagcttgtgttgagctcttagagggtaaattgcatgagcattttgcagtggatatgttccagggcggggcgggcacctccaccaatatgaatgccaacgaggtcataaccaaccgtggtctggagcttatggggcatgagaagggagagtatcagtacctgcatcccaacgatcatgccaactgttctcagtcgaccaacgatacctatcccacggcggtcaaacttgccgtactgctctcgcatcgtaacctggcccgagggatggaggatctgaaaaatgcccttctgcaaaaatccgttgagtttaaggatgttttgaagatgggacgaacggaaaatcaggatgcggtgcccatgactcttggccaggaatttagtgcctatgctgtaatggtgggaagtgccatgcgtgccatagagggtgcatccgaagagtttatgcatattaatatgggggctactgccattggcaccggcattaactgtcctctaggctatgccgatctggtaactgaaaagcttgttgaggtgagtggctttcccctgaaaagagcaggaaatcttgttgaggccacccaaaatgcgggtacctttgtccagatgtctgcgaccatgaaacgggctgcggtgcaaatttcaaagatatgtaatgatctgcgctggctctcctccgggccccgttgtggtctcaatgagataaacctgccacccatgcagccaggctcttccatcatgccgggcaaggttaatcctgttattcctgaggtggtcaatcagatctgctatcaggttattggctacgatactgtggtttccatggccgccgagtccagtgagttggagctctgtatggcggagccaattattgcctacgacctgctccacggtatgatgattcttaaaaatgcctgcgtcaccttggcctctcgttgcatcgtcggtattgaggcgaatcgtgacgtctgtcgttcctatgtggaaaatagcattggtcttgttaccgctttggtcccggttatcggttatgagccgtctgctgccattgccaaggaggccctgaagacaggtggcagcgtttataatcttgtcctggagaagggtctgcttaccaagaaggagctggatgatatgctctcgcctgaaaagatgaccgatccacgggatattcctcagcacctctag

SEQ ID NO: 45169 - protein, 627 aa, Desulfotalea psychrophila LSv54
MEDIMKLDENTLKQAALTAGIEEVDLQTFFAQGERIEYAAGDWLFQESTPRNWAGIILAGEIQLVRGLHGSSHRVGTVSAGGLISEGVFIDQDSHANGGYTRLGAVVWQVSREKIDVFRKEQPEIFYRLVSRVAVAINRRMRTLSEQLYGETCKRRTMSGFRLEHDSLGHREIPGDAYYGVQTQRAIENFPISGVPVSNFSHLIEGFAFIKIAAARANFELGVMDGEKMEALCGACVELLEGKLHEHFAVDMFQGGAGTSTNMNANEVITNRGLELMGHEKGEYQYLHPNDHANCSQSTNDTYPTAVKLAVLLSHRNLARGMEDLKNALLQKSVEFKDVLKMGRTENQDAVPMTLGQEFSAYAVMVGSAMRAIEGASEEFMHINMGATAIGTGINCPLGYADLVTEKLVEVSGFPLKRAGNLVEATQNAGTFVQMSATMKRAAVQISKICNDLRWLSSGPRCGLNEINLPPMQPGSSIMPGKVNPVIPEVVNQICYQVIGYDTVVSMAAESSELELCMAEPIIAYDLLHGMMILKNACVTLASRCIVGIEANRDVCRSYVENSIGLVTALVPVIGYEPSAAIAKEALKTGGSVYNLVLEKGLLTKKELDDMLSPEKMTDPRDIPQHL

SEQ ID NO: 45170 - DNA, 1437 bp, Yersinia pseudotuberculosis IP 32953
  CDS (1)..(1437): transl_table=11
atgtcaaataacattcgtattgaagaagacctgttaggtacacgagaagtccccgcagaggcttactacggtgttcataccctgcgtgcgattgaaaacttctatatcagtaacagtaaaatcagtgacgtgccggaatttgtacgtggcatggtcatggtaaaaaaagcggcggcaatggctaacaaagagttgcataccatcccgcgtaaaattgcagacatcattattcaggcatgtgatgaagttctggataaagggaaatgtatggatcagttccccgttgatgtgttccagggcggcgcaggtacctctctcaatatgaacaccaacgaggtcttggccaatattggcctggagctgatgggccaccaaaaaggggaatatcagtaccttaaccctaacgaccatctgaacaaatgccagtccaccaacgatgcctacccaaccggtttccgcattgcggtctacgcctccatcctcaagttgatcgatgctatcaaccaattaggcgaaggtttcggtagaaaatctaaagaattcgagaaaattctgaaaatgggccgtacccaattacaggatgccgtacccatgactctgggccaggaattccgcgctttccaggtgttattgaatgaagaaaccaagaacctgcaacggaccgccgagttgctattggaagtcaacctgggtgccactgccatcggcactgcgctgaatacaccagaaggttattcacaacttgccgtgcagaaactggcagaaatcagtggattagcctgtgttcctgccgaagatttgatcgaagcgacctctgattgcggcgcttacgtgatggtacacagcgccctaaaacgcctagctgttaagatgtccaaaatctgtaacgacctacgtttgctctcatctggcccacgtactggtttgaatgaaatcaatctgccagaattgcaggcgggctcttctatcatgcctgcaaaagtgaacccggtgatccctgaagttgtaaatcaggtttgttttaaggtgatcggcaacgatacttgcattactatggcggctgaagcgggtcagcttcagttaaacgtgatggagccggtgattggtcaggccatgtttgagtctatccatatcctgactaatgcgtgttacaacctgttagagaagtgcatcaatggcattaccgctaacaaagaggtctgcgagcgctacgtctttaactccataggcatcgtcacttatcttaacccgttcattggccaccataatggtgacattgtgggtaaaatctgtgcggaaaccggtaaaaatgtgcgggaagtggttctggagcgcggtttgttaactgaagccgaactggacgacattttctctgttgaaaacctgatgcacccagcctataaagcgaaacgttataccgatgaaaatgaacaataa

SEQ ID NO: 45171 - protein, 478 aa, Yersinia pseudotuberculosis IP 32953
MSNNIRIEEDLLGTREVPAEAYYGVHTLRAIENFYISNSKISDVPEFVRGMVMVKKAAAMANKELHTIPRKIADIIIQACDEVLDKGKCMDQFPVDVFQGGAGTSLNMNTNEVLANIGLELMGHQKGEYQYLNPNDHLNKCQSTNDAYPTGFRIAVYASILKLIDAINQLGEGFGRKSKEFEKILKMGRTQLQDAVPMTLGQEFRAFQVLLNEETKNLQRTAELLLEVNLGATAIGTALNTPEGYSQLAVQKLAEISGLACVPAEDLIEATSDCGAYVMVHSALKRLAVKMSKICNDLRLLSSGPRTGLNEINLPELQAGSSIMPAKVNPVIPEVVNQVCFKVIGNDTCITMAAEAGQLQLNVMEPVIGQAMFESIHILTNACYNLLEKCINGITANKEVCERYVFNSIGIVTYLNPFIGHHNGDIVGKICAETGKNVREVVLERGLLTEAELDDIFSVENLMHPAYKAKRYTDENEQ

SEQ ID NO: 45172 - DNA, 1410 bp, Symbiobacterium thermophilum IAM 14863
  CDS (1)..(1410): transl_table=11
atgcagcagacgcgcaccgaacgggatctgctgggcgaaaaacaggttcccgcagacgcctactacggcatccagacgacgcgtgcgctggagaacttccgcattaccggccagcggctgcaccctgccctggtgcggggcctcgcccaggtgaagaaggccgcggcccaggcgaatcaccagctgggatacttgccggacgacgtcgcccgtgccatcgtgcaggcgtgcgacgagatcctcgcgggccggctggccgaccagttccccatcgatccggtacagggcggcgccgggacgtccgccaacatgaacgccaacgaggtgatcgccaaccgggccatcgagatcctgggggggcgtaagggcgactacagcctggtctcccccaacgaccacgtgaacttcgcccagtccaccaacgacgccttccccaccgccctgcggctggcgctcatggagcgggcggacgtgctggtggagagcctggtcgggctggaggaggccctgcgcgccaaggccgccgagttcgacgacgtggtgaaggtcggccgcacccacctgcaggacgccgtgccgatccggctggggcaggagttttcggcctggtgcgcggcggtggagcgggggcggcggcgcatccagcaggctgtggaggccctgtgcgaggtcaacatgggcgcgaccgcggtggggacgggcctcaacgccgacccggcgtacccgccgctggtcatcgagttgctcagccgcaacaccgggcggagcctccgtccgccggctgacctcgtggacgccacccagaacgtcgacccgctggtggccctcagcggcagcctgaaggcgctggcggtgagcctctccaagatcgccaacgacatccggctgatggcctcggggccgcgctgcgggctctacgagatcaggctgccggagatgcagccgggctcctccatcatgcccggcaaggtgaaccccgtcatggcggaggtgctgaaccagacctgcttcctggtgatcggcctggacctgacggtgaccctcgcgggcgaggccggccagctggagctgaacgtgatggagccggtgatgggccacgccctcttcaccagcatcgacgccctggagagcgtcgtgcggctgttcaccgaccggtgcgtgcggggcatccaggccaaccgggagcgctgcgaggagctggtcaaccggtccatcgggctggtgaccgccatcaaccccatcgtcgggtacaagaacgcctctgaggtggcgcgcgaggccacgctcacgggccgcccggtccgggagatcgtgctggagaagggtctgctcactgccgaggagatcgacgagatcctgtcgcccaagcacctgacgaccatggggatcgcccggcggacccacgactga

SEQ ID NO: 45173 - protein, 469 aa, Symbiobacterium thermophilum IAM 14863
MQQTRTERDLLGEKQVPADAYYGIQTTRALENFRITGQRLHPALVRGLAQVKKAAAQANHQLGYLPDDVARAIVQACDEILAGRLADQFPIDPVQGGAGTSANMNANEVIANRAIEILGGRKGDYSLVSPNDHVNFAQSTNDAFPTALRLALMERADVLVESLVGLEEALRAKAAEFDDVVKVGRTHLQDAVPIRLGQEFSAWCAAVERGRRRIQQAVEALCEVNMGATAVGTGLNADPAYPPLVIELLSRNTGRSLRPPADLVDATQNVDPLVALSGSLKALAVSLSKIANDIRLMASGPRCGLYEIRLPEMQPGSSIMPGKVNPVMAEVLNQTCFLVIGLDLTVTLAGEAGQLELNVMEPVMGHALFTSIDALESVVRLFTDRCVRGIQANRERCEELVNRSIGLVTAINPIVGYKNASEVAREATLTGRPVREIVLEKGLLTAEEIDEILSPKHLTTMGIARRTHD

SEQ ID NO: 45174 - DNA, 1419 bp, Mannheimia succiniciproducens MBEL55E
  CDS (1)..(1419): transl_table=11
atggcagcgacaagaaaagaagtagatttactcggtgaacgtgaagtgcccgccgatgcttattggggaattcatacattaagagcggtagaaaactttaatatttctaaagtaactatttctgatgtgcctgaatttgtaaaaggcatggtaatggttaaaaaagcaactgctcttgccaacggcgaactaggcgctattcctgcggatattgccaaagcaatcgtagcggcttgcgacgaaattttaactaccgggaaatgcttggatcaattcccttcagacgtatatcaaggcggtgcaggtacttccgtaaacatgaataccaatgaagtggtggcgaatctggcattagaaaaaatcggtcatcaaaaaggcgaatacaatgtgattaacccgatggatcacgttaatgccagccaatcaactaatgatgcttatccgacagggttccgcattgccgtttataacagcattttaaaattaatggataagatccaatatttacacgacggctttgataacaaagcgaaagaatttgccaatattctgaaaatgggtcgtactcaattacaggatgcggtgccaatgacagtggggcaagaatttaaagcatttgccgtactattggaagaagaagtacgtaacttaaaacatgcggcggatttacttttagaagtgaatctaggtgcgacggctatcggtaccggcttgaatacgcctgcgggatattccgaattagcggtgaaacgccttgccgaagtgacaggtttaccttgcgttaaagcgtcaaacttaatcgaagcgacatcagactgcggttcttatgttatggttcacggcgcattaaaacgtactgcggtaaaactttcaaaaatttgtaatgacctgcgtttactttcatcaggtccgcgcgccggtttaaatgaaattaacttacctgaattacaagccggttcttcaatcatgccggcaaaagttaaccctgttgtgccggaggtagtgaatcaggtttgctttaaagtaatgggtaacgacacaaccgttactttcgctgcggaagccggtcaattgcaattgaacgtaatggaaccggtaattggtcaggctatgttcgaatctatcgacattttagctaatgcctgtgtgaatttacgtgataaatgtatcgacggaattaccgtaaacaaagaaatttgtgaaaactacgtgttgaattcaatcggtatcgtaacttatctgaacccgttcatcggtcaccataatggcgacatcgtcggtaaaatctgcgcgcaaaccggccgtagcgtacgcgatgtagtattggaaaaagggttactcacagaagcggaattagacgatattctttctgttgaaaacttaatgaatccgacttacaaagcgaagttaagtaaatag

SEQ ID NO: 45175 - protein, 472 aa, Mannheimia succiniciproducens MBEL55E
MAATRKEVDLLGEREVPADAYWGIHTLRAVENFNISKVTISDVPEFVKGMVMVKKATALANGELGAIPADIAKAIVAACDEILTTGKCLDQFPSDVYQGGAGTSVNMNTNEVVANLALEKIGHQKGEYNVINPMDHVNASQSTNDAYPTGFRIAVYNSILKLMDKIQYLHDGFDNKAKEFANILKMGRTQLQDAVPMTVGQEFKAFAVLLEEEVRNLKHAADLLLEVNLGATAIGTGLNTPAGYSELAVKRLAEVTGLPCVKASNLIEATSDCGSYVMVHGALKRTAVKLSKICNDLRLLSSGPRAGLNEINLPELQAGSSIMPAKVNPVVPEVVNQVCFKVMGNDTTVTFAAEAGQLQLNVMEPVIGQAMFESIDILANACVNLRDKCIDGITVNKEICENYVLNSIGIVTYLNPFIGHHNGDIVGKICAQTGRSVRDVVLEKGLLTEAELDDILSVENLMNPTYKAKLSK

SEQ ID NO: 45176 - DNA, 1389 bp, Anaplasma marginale str. St. Maries
  CDS (1)..(1389): transl_table=11
atgggggtgaggattgagtctgacagcatgggtaacattgaggtgccggctgaacgctattggggtgcacaaacacagcgctccatgatgaactttgcaattggagaggaaaaaatgccccggcccttgatatgggcgctgggtgtggtgaagctggcggctgcccgggtaaacgctagaaaaggaagcatagaaaagtctgtgggagaggcaatttgtgctgctgcgcaggaagttatagatggcaagatggatggggaatttcccctggtggtgtggcagactggttctggcacccaaaccaacatgaacgccaacgaagtaatagcaaaccgggccatagagatgcttggggggaaagttggtagcaagtctcccgtacacccgaatgaccatgtcaaccactctcaatcttcaaatgatgtatttcccactgccatgcacattgccgccgtggccgaggtggaacggcgcttactgcccgcgctggagacacttcgcagcgcgttggaggcgaaagttgtggcattttcggacatagtaaaaacgggtcgcacccacctccaggatgcagtacctctcacgcttggtcaggagttttcggggtacgaatgccaagtgagaaagggaatagaaagagtcaagtcctcaatggtggatgtttatcagcttgcacaggggggtacaggtgttggcacgggtttgaacaccaagaaaggctttgctgaagagtttgcaaaagaggttgcgggcatcaccggtatgaagtttataaccgcggagaacaaattcgaggcgcttgctacgcatgatgccatggtacaactaagcggcgcgctcaatacgcttgccgtcagttgcatgaaaatagcgaatgacatccggctgcttgcatctgggcccaggtgcggaataggggagatcatccttcccgcgaatgagcctgggtcgtcaatcatgccgggtaaggtgaacccgacgcagtgcgaagcactcaccatggtttgcgcgcaggttatggggaatcacgttgcagtttctgtaggggggtccaacggacaccttgagctgaacgtattcaagcctatgattgcgtataacgttctaaactctgtccgattgttggcagatgcttgtgaaagctttgcgacgaaatgcgtaagcggcatagaggccgataaagaacgtatagccgtcatgctggggcagtctctcatgctggttactgcgctaaacaggcatataggttatgacaacgccgcaaagatctccaagtttgcgtttgagaatcgtgtgacgcttaaggatgcggctgcaaaattgggtttagtagatggggcggagtttgacgcgatagttgatcccaggaagatggtctctcctgactga

SEQ ID NO: 45177 - protein, 462 aa, Anaplasma marginale str. St. Maries
MGVRIESDSMGNIEVPAERYWGAQTQRSMMNFAIGEEKMPRPLIWALGVVKLAAARVNARKGSIEKSVGEAICAAAQEVIDGKMDGEFPLVVWQTGSGTQTNMNANEVIANRAIEMLGGKVGSKSPVHPNDHVNHSQSSNDVFPTAMHIAAVAEVERRLLPALETLRSALEAKVVAFSDIVKTGRTHLQDAVPLTLGQEFSGYECQVRKGIERVKSSMVDVYQLAQGGTGVGTGLNTKKGFAEEFAKEVAGITGMKFITAENKFEALATHDAMVQLSGALNTLAVSCMKIANDIRLLASGPRCGIGEIILPANEPGSSIMPGKVNPTQCEALTMVCAQVMGNHVAVSVGGSNGHLELNVFKPMIAYNVLNSVRLLADACESFATKCVSGIEADKERIAVMLGQSLMLVTALNRHIGYDNAAKISKFAFENRVTLKDAAAKLGLVDGAEFDAIVDPRKMVSPD

SEQ ID NO: 45178 - DNA, 1371 bp, Silicibacter pomeroyi DSS-3
  CDS (1)..(1371): transl_table=11
atggacaccaccgccagccgcaccgaacatgacagtatcggcgcctgcaccatcccccagggcgcgccctggggctcacaaacccaacgcgcgatcgagaatttcccgatcaccggaataccgatcagccactatcccgaaatcgtggtggcgctggcgcaggtcaaaaaggcctgcgccctgaccaacgccgaactgggcgcgctgaccccggacaaggcggcggtgatcgcatcggtctgcgaccggatcatcgccggtcagcatcacgaggcgttttgcgtcgacgtgatgcagggtggggccgggacctcgaccaacatgaatgccaacgaggtgatcgccaacctgggtctgatcgttttgggcggcagctacggcgactatggccacctgcatcccaatgacgacgtcaaccgctcgcaatcgaccaacgatgtctatcccacggcgatccgtcttgcgacgctgtccaaggcgcgggtgctgagtgcggcgctgcgcgatctggttcaggcctttcacgacaagggtgatgagtttgcccatatcaacaaggtgggccgtacccagttgcaggacgcggtgccgatgaccttggggcaggaatttcacagctttgccaatactctggccgaagatatcgaccggatcaccgatctgggccgactgctggccgaggtcaatctgggcggcaccgccatcggcacccggatcaacacgcccgagggatatggcccgctcgtggtagagaaactggccgatatcacggggctggcgctgtctccggcccgcgacctgatcgaggcttcttcggatcttggcgccttcgtgatgttttcaggcgcgctcaaacgggtggcgatcaaactttccaagatctgcaacgacctgcgcctgctcagctcgggcccgcgcgccgggctgggggaaatcatcctgccccccgcacaggccgggtcctcgatcatgccgggcaaggtcaatccggtgatccccgaggtggtcaaccagatctgctatcaggccatcggcaacgacctgaccgtgaccatggcggccgaggccgggcaattgcagctgaacgcgatggagccggtgatcttttacaaggtcatggaaaccatgacgacgctgacggggggcatgaacgtgctcaacaatcgctgcgtgcgggggatccgggcggatgagaaacgctgtgccgagctgctgggcggcagtctggtgctggcgacgctgctggcgccggtcatcggctatgatgcggcggccaaagtgtccaaacgcgcccgggccgaagggatcaccctgcgcgaggcttgtctgaaacaggggctggacgcggcgttggtggattctctgctatga

SEQ ID NO: 45179 - protein, 456 aa, Silicibacter pomeroyi DSS-3
MDTTASRTEHDSIGACTIPQGAPWGSQTQRAIENFPITGIPISHYPEIVVALAQVKKACALTNAELGALTPDKAAVIASVCDRIIAGQHHEAFCVDVMQGGAGTSTNMNANEVIANLGLIVLGGSYGDYGHLHPNDDVNRSQSTNDVYPTAIRLATLSKARVLSAALRDLVQAFHDKGDEFAHINKVGRTQLQDAVPMTLGQEFHSFANTLAEDIDRITDLGRLLAEVNLGGTAIGTRINTPEGYGPLVVEKLADITGLALSPARDLIEASSDLGAFVMFSGALKRVAIKLSKICNDLRLLSSGPRAGLGEIILPPAQAGSSIMPGKVNPVIPEVVNQICYQAIGNDLTVTMAAEAGQLQLNAMEPVIFYKVMETMTTLTGGMNVLNNRCVRGIRADEKRCAELLGGSLVLATLLAPVIGYDAAAKVSKRARAEGITLREACLKQGLDAALVDSLL

SEQ ID NO: 45180 - DNA, 1413 bp, Bacillus clausii KSM-K16
  CDS (1)..(1413): transl_table=11
atggagtaccgggttgaacgagacttactaggagaaaaacaagtaccgaaacatgcttattatggcatccaatcgctgcgggcaaaggataattttccgattaccggctatccgccccaccctgaacttattcgcgctttcggctatgtgaaaaaagcggctgcccttgcaaaccgggatgtcggtgtactgcgcccccacattgctgaagcgattattaaggcaagcgatgaagtaattgaagggcgtttgaatgatcattttattgtcgattcgatccaaggaggcgccggcacgtcgtttaatatgaatgccaatgaagtcattgctaaccgggcgattgaaattcttggcggcgaaaaaggcgattatttaaaagtcagtcccaacacacacgtcaacatggcccagtctaccaatgattcatttccgacggcgattcatattgccgctttaaatatgacaaagggcttgacggaagaattgcagaaattgatcaacgaaatggaagcgaaagccgaagaatttgacagcgtcctaaaaatggggcggacccacttgcaagatgcagtccctattcgactagggcaggaatttggctcgtaccgcagagtgctagcccgtgatctaaaacgggtaagccgttcggcagaccacctccacgacatcaatatgggtgcaaccgctgtaggaacgggtttgaacgccaaaccggaatacattgaaaaagttgcaaaacatttggctgacttgactgagctgccgttgaaaacggcggaggatcttgtcgatgccacccaaaatacagatgcctatacagagctttctagttcgttaaaaattttagctattaatttatcgaaaatcgcaaatgacttacgtttaatgagctcgggcccgcggaccggattgaatgaaatcaatttgccgccgcgacagccgggttcatcgatcatgcctggaaaagtaaatccggttatgtgtgaagtcattaaccagctttcttttcaagttatcggcaatgaccatacgatcagccttgcttcagaagcgggccaacttgaactaaacgtgatggaacctgtactcgtttttaatttattgcaatcattaacggtgctacaaaacggtatgcgcgtctttaaagattacgcaattgccggcattaccgctaacgtggagcgatgccgggaacttgtagaacatagcgtcggtattgtaacggcaatcaatccccatgtcggctatgaagtagctactcgtgtagctaaagaagcaattgaaacagggcggccggtccgggaaatttgtcttgaacggggcatcctttcagaggaagaattgaatgaaattcttgatccaaaagaaatgacaaaacccggtatcgcgggctcccgttttttgccgttataa

SEQ ID NO: 45181 - protein, 470 aa, Bacillus clausii KSM-K16
MEYRVERDLLGEKQVPKHAYYGIQSLRAKDNFPITGYPPHPELIRAFGYVKKAAALANRDVGVLRPHIAEAIIKASDEVIEGRLNDHFIVDSIQGGAGTSFNMNANEVIANRAIEILGGEKGDYLKVSPNTHVNMAQSTNDSFPTAIHIAALNMTKGLTEELQKLINEMEAKAEEFDSVLKMGRTHLQDAVPIRLGQEFGSYRRVLARDLKRVSRSADHLHDINMGATAVGTGLNAKPEYIEKVAKHLADLTELPLKTAEDLVDATQNTDAYTELSSSLKILAINLSKIANDLRLMSSGPRTGLNEINLPPRQPGSSIMPGKVNPVMCEVINQLSFQVIGNDHTISLASEAGQLELNVMEPVLVFNLLQSLTVLQNGMRVFKDYAIAGITANVERCRELVEHSVGIVTAINPHVGYEVATRVAKEAIETGRPVREICLERGILSEEELNEILDPKEMTKPGIAGSRFLPL

SEQ ID NO: 45182 - DNA, 1398 bp, Neisseria gonorrhoeae FA 1090
  CDS (1)..(1398): transl_table=11
atgactgtccgtatcgaacacgatttattgggcgaccgcgagattcccgccgaagtgtattggggcatccacaccctgcgcgccattgaaaactttaaaatctccacacaaaaaatttccgacgtgccgcagtttgtccgcagtatagtgatggtgaaaaaagcaaccgcgcaggcaaacggcgaattgggtgcagtaaaacccgaaatcgccgccgccattgaaaaggcttgcgacgaagttctgctgaacaaccgctgcctcgaccaattcccgtccgacgtgtatcagggcggggcgggaacttcggtcaatatgaacaccaacgaagtcatcgccaaccttgcattggaagccttgggctatgagaaaggccgctacgacatcgtcaatccgatggatcacgtcaacgccagccaatccaccaacgatgcctatcccacgggcttccgccttgccgtgtattacagcatcggcgaattgctcgacaaactgaccgtattgaaaaacgcctttgccgccaaagccgaagcgtttaaagacgttttgaaaatgggtcgcacccagcttcaagatgccgtaccgatgacggcaggccaggaattccaatctttccaagtattgttggaagaggaaatcctcaaccttgaccgcacccgccaactgctcttggaagtcaatttgggcgcaacggcaatcggcacgggcgtgaacacgcccaaaggctacgccgaactggtggtcaaaaaactctccgaagtcagcggcttgccttgcaaactgactgaaaacctgatcgaagcgacctccgactgcggtgcatatgtgatggtacacggcgcattgaaacgcacggccgtcaaactctctaaaatctgcaacgatttgcgccttctctcttccggtccgcgcgccggtttgaaagaaatcaacctgcccgaattgcaggccggttcttccatcatgcctgccaaagtcaatcccgtgattcccgaagtcgtcaaccaagtctgcttcaaagtcatcggcaacgatacgacgattaccttcgccgccgaatccgggcaactgcaattaaacgttatggagccggtcatcgcccaatgtatgtttgaaaccatttccctcttgggcaatgccgcagtcaacctatccgacaaatgcgtcaaaggcattacggtcaaccgcgaaatctgcgagcggtatgtcttcaactccatcggtttggtcacttatctgaatccgtacatcggccaccgcaacggcgacttggtcggcaaaatctgcgcccaaaccggcaaaggcgtgcgcgaagtcgtactggagcgcggcctgttaagcgaagaagaaatcaaccgcatcctctcccccgagaacctgatgaatcctcatctgtaa

SEQ ID NO: 45183 - protein, 465 aa, Neisseria gonorrhoeae FA 1090
MTVRIEHDLLGDREIPAEVYWGIHTLRAIENFKISTQKISDVPQFVRSIVMVKKATAQANGELGAVKPEIAAAIEKACDEVLLNNRCLDQFPSDVYQGGAGTSVNMNTNEVIANLALEALGYEKGRYDIVNPMDHVNASQSTNDAYPTGFRLAVYYSIGELLDKLTVLKNAFAAKAEAFKDVLKMGRTQLQDAVPMTAGQEFQSFQVLLEEEILNLDRTRQLLLEVNLGATAIGTGVNTPKGYAELVVKKLSEVSGLPCKLTENLIEATSDCGAYVMVHGALKRTAVKLSKICNDLRLLSSGPRAGLKEINLPELQAGSSIMPAKVNPVIPEVVNQVCFKVIGNDTTITFAAESGQLQLNVMEPVIAQCMFETISLLGNAAVNLSDKCVKGITVNREICERYVFNSIGLVTYLNPYIGHRNGDLVGKICAQTGKGVREVVLERGLLSEEEINRILSPENLMNPHL

SEQ ID NO: 45184 - DNA, 1458 bp, Colwellia psychrerythraea 34H
  CDS (1)..(1458): transl_table=11
atgtctaagaaacaggttactaaagctcaaactataactgcgccaaaagaacgaatagaaaaagatttactaggtgaaagaagtttgcctgttgatgtctattatggtgtacaaacattacgggcaacggaaaactttaatattacctctatttgtgtaggtgactttcccgccctagttaaagccttagctatggtaaaaaaggcctgcgctttggctaataaaaaattaaacttacttgaaaataacaaagcagaagctataacacaggcctgtgacgaagttatcagtggtaaatttgataatcaatttgtggtcgatatgatccaaggaggagctggtacttcaaccaacatgaacgccaatgaagttatagcaaatagagcattagaaattcttggccatgaaaagggctgttacgacataattagtccaaataaccatgttaatttgtcacaatctaccaatgatgtttatccaacagccttacgtttggcattaattatgtcgacacctgagctttacgagtctatagctttattgggttatcagtgcaagcaaaaagccgtagaattttccagtgtgattaaaatgggtcgaacgcaattacaagatgccgtacctatgactttgggccaagagtttgaagcatactacgccacactgaaagaagatttggatatgttaaaggcggttactgataactttagagaaatcaatttaggcgctacagcgataggtacaggaattaatactgaccctgaatattcaagcttagttattgaagagttatgctggattgccgacatacatttcattagagcaaccaacttaattgaagccacaagtgatatgggggcatttattaccctatcaagtatgctaaaaagaactgccataaaagtttcaaaaatgtgtaatgatctacgtttaatgagcagcggtcctagagctggcttgaatgagattaacctgccagctatgcaaccaggctcatcaatcatgccaggcaaggtaaaccctgttatccctgaagtagtaaatcaagtcgcttatgaagttataggcaatgacttggctataactatggcagcagaagccggtcaactgcagttaaacgttatggagcctgtaattgcttttaatctattaagatccatcaaattcttaaccaacgcttttaatgctcttgccactcgctgtatttcaggtatcactgctaacgaagagcattgtaaatcaatggtttataacagtattggtattgttaccgctatcaatccttatttgggttatgaagtatcgacccgtattgcaaaagaggcattagcaacaggggagaatattatcaatttgattaaacgagatggtttattaactgagaagcaacttgctgatattcttaaccctgaaaatatgactcagcctagacgacaattttcttccgataaaaaatag

SEQ ID NO: 45185 - protein, 485 aa, Colwellia psychrerythraea 34H
MSKKQVTKAQTITAPKERIEKDLLGERSLPVDVYYGVQTLRATENFNITSICVGDFPALVKALAMVKKACALANKKLNLLENNKAEAITQACDEVISGKFDNQFVVDMIQGGAGTSTNMNANEVIANRALEILGHEKGCYDIISPNNHVNLSQSTNDVYPTALRLALIMSTPELYESIALLGYQCKQKAVEFSSVIKMGRTQLQDAVPMTLGQEFEAYYATLKEDLDMLKAVTDNFREINLGATAIGTGINTDPEYSSLVIEELCWIADIHFIRATNLIEATSDMGAFITLSSMLKRTAIKVSKMCNDLRLMSSGPRAGLNEINLPAMQPGSSIMPGKVNPVIPEVVNQVAYEVIGNDLAITMAAEAGQLQLNVMEPVIAFNLLRSIKFLTNAFNALATRCISGITANEEHCKSMVYNSIGIVTAINPYLGYEVSTRIAKEALATGENIINLIKRDGLLTEKQLADILNPENMTQPRRQFSSDKK

SEQ ID NO: 45186 - DNA, 1425 bp, Dechloromonas aromatica RCB
  CDS (1)..(1425): transl_table=11
atgaccaccactcccttccgcctcgagcatgacctgcttggtgaccgcgaggttccgaccgccgcctactacggggtacacaccctgcgagcccttgagaatttcccgatcaccggcatctcgatcgccgtctatcccgacctgatccgcgccctggcccagatcaagaaggccgccgcccaggccaaccagcaactcggcctgctcgatgcccggcgcgccggcgccatcgccgaagcctgcggcgagatcatcgacggccagtggcacaaccagttcgtcgtcgatgtcattcagggcggcgccggcacctcgaccaacatgaatgccaacgaggtgatcgccaaccgtgcgctggaactgctcggcaagacgcgcggcgactacaagacgctgcacccgaacgaacacgtcaacatgagccagtcgaccaacgacgtctatccgacggcgctgaagctggccacctatgtcggcatcttccgcctggtcgaggccatggcttatctgcgcaaagctttcgagcgcaaggccgacgagttcgccgacgtgctgaagatgggccgtacccagttgcaggacgccgtgccgatgaccctcggccaggagttctcgacctacgccgtgatgttgggcgaggacgaagaacgcctgaaggaagccgcactgctcatccgcgaaatgaatctcggtgccaccgccattggcaccggcatcaacgcccacccggactacgccccgctggtctgccgcaagctggccgaaatcagcggcatcccggtcgtcaccgcgcccaacctgatcgaggcgacgcaggattgcggcagcttcgtgcaactgtccggcgtcctgaagcgcgtcgccgtcaagctatccaaggtctgcaacgacctgcgcctgctctcttccggcccgcgtgccggcttcaacgagatcaatctgccgccgcgccaggccggttcgtcgatcatgccgggcaaggtcaatccggtgatcccggaagtggtcaaccagatcgccttcgaagtgatcggcaacgacaccaccgtcactttcgccgccgaagccggccagctgcagctcaatgccttcgagccgatcatcgcccacagcctgttcaagagcgccctgcacctgaccaacggctgccgcgtgctggccgaccattgcgtcaatggcatcaccgccaaccgcgatcagctgcgcgaatcggtcgagcgctcgatcggcatcgtcaccgccctcaacccgtacattggttacgccaacgccaccgaagtcgctgccgaagccttccgtagcgggcgcggcgtggccgaggtggtcatcgaacgcggtctgatgagcccggaacagctggccgaagtgctgcgtcccgaggtgctgacccgcccacaagtcatccccctgcctgtcgccgcctga

SEQ ID NO: 45187 - protein, 474 aa, Dechloromonas aromatica RCB
MTTTPFRLEHDLLGDREVPTAAYYGVHTLRALENFPITGISIAVYPDLIRALAQIKKAAAQANQQLGLLDARRAGAIAEACGEIIDGQWHNQFVVDVIQGGAGTSTNMNANEVIANRALELLGKTRGDYKTLHPNEHVNMSQSTNDVYPTALKLATYVGIFRLVEAMAYLRKAFERKADEFADVLKMGRTQLQDAVPMTLGQEFSTYAVMLGEDEERLKEAALLIREMNLGATAIGTGINAHPDYAPLVCRKLAEISGIPVVTAPNLIEATQDCGSFVQLSGVLKRVAVKLSKVCNDLRLLSSGPRAGFNEINLPPRQAGSSIMPGKVNPVIPEVVNQIAFEVIGNDTTVTFAAEAGQLQLNAFEPIIAHSLFKSALHLTNGCRVLADHCVNGITANRDQLRESVERSIGIVTALNPYIGYANATEVAAEAFRSGRGVAEVVIERGLMSPEQLAEVLRPEVLTRPQVIPLPVAA

SEQ ID NO: 45188 - DNA, 1428 bp, Ralstonia eutropha JMP134
  CDS (1)..(1428): transl_table=11
atgactgccggacccttcagaaccgaacatgacctgctgggcgaccgggaagtcccggcccaggcttactacggtgtccacaccctgcgcgccgtcgagaacttcccgatcacgggcacgccaatttccatctacccggaactgatcaaggcgctggccgcgatcaagcaagccgcggcgcaagcgaaccatgagcttgagctgctagaccaggcacgctgcgacgcgatcgtcgctgcctgtcaggaactgatggccggaaagctgcacgatcagttcgtggtcgacgtgatccagggcggcgctggcacctcgacaaacatgaacgccaatgaggtcatcgccaatcgcgcgctcgagcttctcgggcatcagaagggcgagtaccagcacctgcatccgaacgaacacgtcaatatcggccagagcaccaacgatgtctatccgaccgcgttgaaggtcgcgacatggttcggcatccgtgggcttgtggaggccatggcggtactgcgccaggcgttcgaggcgaaggccgaggagttcgcccacatcatcaagatgggccgcacgcaattgcaggatgcggtgccgatgacgctcggccaggaattcagcacctatgccgtgatgctcggcgaagacgaggcgcgcttgcgtgaagccgcgatgctgatctgcgagatcaacctcggcgccaccgccattggcaccggcattaccgcgcacccatcctatgcgccggtggtgctgcggcggctgcgcgacatcactggcattccgcttgagacagcgccaaacctgatcgaagctacgcaggattgcggcgccttcgtgcaactgtccggcgtgctaaaacgcgttgcggtgaagctttcaaagacctgcaacgacctgcggctgttgtcgagcggcccgcgtgcggggctgtgcgaaatcaacctgccgccgatgcaggccggctccagcatcatgcccggcaaggtgaatccggtgatccccgaagtcgtgaaccagattgccttcgaggtcatcggcaacgacgtgacggtcagcttcgcagccgaagccggccagctgcagctcaatgcgttcgagccgatcattgcccacagcctgttcaagagcgtcagccatctgcgcaacggttgcctgacgctcgccgagcgttgcgtcaagggcatcacggcaaatgcagatcggctgcgggctaccgtcgagaactcgatcgggatcgtcacggcgctcaacccttacatcggctatgcgaacgcaacagccgtcgcgcaggaagcccacgccaccggcggcagcgtctatgagatcgtgctgcgcaagggcctgttgtcgaaagaggagcttgaccacatcctgcggcccgagacgctgacacagcccgtgccgctcgatctgcatgggaagtcgcactga

SEQ ID NO: 45189 - protein, 475 aa, Ralstonia eutropha JMP134
MTAGPFRTEHDLLGDREVPAQAYYGVHTLRAVENFPITGTPISIYPELIKALAAIKQAAAQANHELELLDQARCDAIVAACQELMAGKLHDQFVVDVIQGGAGTSTNMNANEVIANRALELLGHQKGEYQHLHPNEHVNIGQSTNDVYPTALKVATWFGIRGLVEAMAVLRQAFEAKAEEFAHIIKMGRTQLQDAVPMTLGQEFSTYAVMLGEDEARLREAAMLICEINLGATAIGTGITAHPSYAPVVLRRLRDITGIPLETAPNLIEATQDCGAFVQLSGVLKRVAVKLSKTCNDLRLLSSGPRAGLCEINLPPMQAGSSIMPGKVNPVIPEVVNQIAFEVIGNDVTVSFAAEAGQLQLNAFEPIIAHSLFKSVSHLRNGCLTLAERCVKGITANADRLRATVENSIGIVTALNPYIGYANATAVAQEAHATGGSVYEIVLRKGLLSKEELDHILRPETLTQPVPLDLHGKSH

SEQ ID NO: 45190 - DNA, 1401 bp, Thiobacillus denitrificans ATCC 25259
  CDS (1)..(1401): transl_table=11
atgaatgaattccgcaccgagaaggactcgctcggcgaagtccgggttccccgagacgcgtggtacggcgcccagaccgcacgggccgtgagcaattttcccatttcgggccgcgcgccggataaggatttcgtactagcgcacgtgcgtataaagctcgcagcggcacgcgcgaattgccagccagggtggctgccggaactcaagcgcgacgcaatcgtcgcggcctgcgagcagatcctcgcgggcgcgcacctcgaccagttcgtcgttgaccgcttccaggcgggtgcgggcacgagccacaacatgaacagcaacgaggtcatcgcgaaccttgccaacgtcgcgctcggcggcgaaaagggccgctactcgccggtcaacccgaacgacgacgtcaacatggggcagtcgaccaacgacacgatcccgaccgcgatacgtctcgcagtgttggcgaagctgccccgcctggtcgccgccgtgcgcggcatggccggtgaattttcgcggctggccgagcgcgaaaaggacacggtgaaatcgggccggacgcatttgcaggatgccgtgccgacgacgctcggccaggaattcgacggctacgcgtggacgctggcgcgttgtgcggcggcgctcgaagccgtgcgcccggccctgtgcgaaatcggcctcggcggctcggcggccgggacgggactgaacacctcgcccgattatccggaccgcgtcgcggcggaactcgccgcgctgaccggcgaatcgattcgcgccggccaactcgtcgcgcagatgcagtcgatgaacgaccttgcgcggctgtccggcgaaatccgcaatctcgcgctcgaactcacgcgcatttccaacgacctgcgcctgcttgcctcggggccgcgtaccggcctcggcgaaatccagctgccgccggtgcagcccggctcgtcgatcatgccgggcaaggtcaacccggtcatgttcgaaatgctgaaccaggtctgcttccaggtgctcgggcaggatgcggcggtctcctacatggtgcaggcaggccagctcgagctcaacgtgatgatgccggcgctcggttcggcgcttttcgacgccatggactggctgaccaacgcaatcgacgccgccaccgagaagaacctcaagggcatcgtcgccaaccgggagcgctgtgcgtttttcatccaccagagcgtcgcgctcgccacgctcctgaacacccggatcggctacatggaggccgccgaggtcgccaaggaatccgaaaaaaccggccgcccggtccgcgacatcgtcgcgcagcgcgcgctgatggatgccgccgagttcgacgcgctcgtgctcgccgcggcgcatggcgtgggtagcgggggcgggggcggctga

SEQ ID NO: 45191 - protein, 466 aa, Thiobacillus denitrificans ATCC 25259
MNEFRTEKDSLGEVRVPRDAWYGAQTARAVSNFPISGRAPDKDFVLAHVRIKLAAARANCQPGWLPELKRDAIVAACEQILAGAHLDQFVVDRFQAGAGTSHNMNSNEVIANLANVALGGEKGRYSPVNPNDDVNMGQSTNDTIPTAIRLAVLAKLPRLVAAVRGMAGEFSRLAEREKDTVKSGRTHLQDAVPTTLGQEFDGYAWTLARCAAALEAVRPALCEIGLGGSAAGTGLNTSPDYPDRVAAELAALTGESIRAGQLVAQMQSMNDLARLSGEIRNLALELTRISNDLRLLASGPRTGLGEIQLPPVQPGSSIMPGKVNPVMFEMLNQVCFQVLGQDAAVSYMVQAGQLELNVMMPALGSALFDAMDWLTNAIDAATEKNLKGIVANRERCAFFIHQSVALATLLNTRIGYMEAAEVAKESEKTGRPVRDIVAQRALMDAAEFDALVLAAAHGVGSGGGGG

SEQ ID NO: 45192 - DNA, 1416 bp, Anabaena variabilis ATCC 29413
  CDS (1)..(1416): transl_table=11
atgactacaaatacagattttcgtattgaacgcgattcgatgggcgatcgccaaattgctagtgatgtttattacggtattcaaactctccgagccattgaaaatttccccattagcggtcttaagcccttacctacttacgtagatgctggtcttctaattaaaaaagctacagcaattgtcaatggagaactaggctgtattccccaagatattagccaagcgattgtgcaagcaaccgatgaaattctggcagggaagttaagggatcagtttgtcgtggatgtttatcaagccggtgcagggacatcccaccacatgaatattaacgaagtcttagcaaatcgggctttggaaattctgggtgaagaaaaaggtaattacaaacgagttagccctaatgatcatgtgaactatgggcagtctaccaacgatgttattcctactgcaattcgcatcggcggcttattggcactgaccaaaacattacagccagcattagaaaaagcgatcgctgctttagaacacaaagctgtagaatttcaagatattgtcaaatccggcagaacccatttacaggatgccgttcccgtccgcttgggtgataatttcgccgcttgggcgcatatcctctcagaacatcaaaaccgcatttacaccgcctctggagacttgatggtactcggtttaggtggtagtgcggcgggaacaggcttaaacacccatccccaataccgcgcccgtgtggttgaagtattggcagaactactcaacttaccactccaacccgcaccccatctcatggctgctatgcagagtatgtccccatttgtgaacgtttccggggcaatacgcaacctagcccaggatttagcaaaaatctctcacgatttacggctgatggactccgggccaaaaactggcttgaaagaaattcaattacccccagtacaacccggttcctcaatcatgccaggcaaatataaccccgtcatggcagagatgacatcgatggtgtgtttccaggtgatgggttacgatcaggcgatcgctcttgcagcccaagccggacaattagaattaaacgtgatgatgccgttgattgcctatgatttaattcacagcatcgaaattctggggtcaactatcgccgccctcacagaacgctgtattcaaggaattaccgccaacaaagaacggtgtttagcctacgccgaaggcagtttagctttagttactgccctcaacactcatattggttatttaaatgccgcagatgttgccaaagaatctttaaacacaggaaaatctctacggcagattgtgttagaaaaaggactgatgagcgaagcagagttagccactgtgctaaatctagaagaaatgagtagtatattgccactccaggcagagtaa

SEQ ID NO: 45193 - protein, 471 aa, Anabaena variabilis ATCC 29413
MTTNTDFRIERDSMGDRQIASDVYYGIQTLRAIENFPISGLKPLPTYVDAGLLIKKATAIVNGELGCIPQDISQAIVQATDEILAGKLRDQFVVDVYQAGAGTSHHMNINEVLANRALEILGEEKGNYKRVSPNDHVNYGQSTNDVIPTAIRIGGLLALTKTLQPALEKAIAALEHKAVEFQDIVKSGRTHLQDAVPVRLGDNFAAWAHILSEHQNRIYTASGDLMVLGLGGSAAGTGLNTHPQYRARVVEVLAELLNLPLQPAPHLMAAMQSMSPFVNVSGAIRNLAQDLAKISHDLRLMDSGPKTGLKEIQLPPVQPGSSIMPGKYNPVMAEMTSMVCFQVMGYDQAIALAAQAGQLELNVMMPLIAYDLIHSIEILGSTIAALTERCIQGITANKERCLAYAEGSLALVTALNTHIGYLNAADVAKESLNTGKSLRQIVLEKGLMSEAELATVLNLEEMSSILPLQAE

SEQ ID NO: 45194 - DNA, 1425 bp, Desulfovibrio desulfuricans G20
  CDS (1)..(1425): transl_table=11
atgacctaccgtacggaacatgacagtcttggcgaacgcaaggttcccgcacaggcttactacggcattcagacactgagggctctggagaattttgaaatcacaactattcctgtttcgcattacagcaggttcatacaggcgctggctgtggttaaaaaagctgcggccatggccaatatggagttgggagaactcgattccgccgtcggcgaagctattatccatgcctgcaaagacgtgcggcagggcaagctggatgaccagtttgtagtggatgtcattcagggcggggcgggaacgtcggtaaacatgaacgccaatgaagtgatctgcaacagggctcttgagctgagcgggcatgaaaaagggaggtatgacattatccatccgctcaatcatgtgaatctttcgcagtccaccaatgatgtttaccccacggctttgcgcatagcgcttgtgtggtacagccgcgaactgctgcacgggctgcgcgaactgcgcgacgctttgagccgcaaaggtgcagaattcggcaatgtcattaaaatggcccgcacacagctgcaggatgccgttcccatcacgctcggagccgagtttgcggcatatgctgttaccgtcaatgaagacattgaccgtctggaagaggtgatgcgcctgctttgcgaagtcaatctgggggctacggcagtgggaacaggcatcaattccgttccgggctacggagcccgcgcctgcgccattctggctgatgtgacaggcctgcccatatctcagtcggcgaatctggtagaagcaaccagcgatgccggcgcatatgtgactctttcaggactgctgaaacgcaccagtgtgaaactttcaaagatatgtaatgatctcagattgatgtcttcagggccgtttaccggcctgcacgaaatcaatctgccgccggtgcagcccggatcatccataatgccgggcaaggtcaaccctgtcattcctgaagtggtcacccagatatgctaccagattatcggcaatgacatgacagtgaccatggctgcggaggcagggcagcttgagcttaatgttttcggacccattatcgcatttaatctgtttcagtcactggaaattctgaccagaggtgtgcacaccctgagaaagcggtgcatcgagggcataaccgctaatgatgagcgttgtcttgaattgctcaaaggttctctgggggtggtgacggctttagctcccgccataggatatgaggcggctgcaaaagtggtcaaacaggcacaggaaacgcgcaagcctgtgggacaggtgcttgacgagcaggggcttatgaccgccgaagagtataacgagctgctggatccgagcaagatgcttgctccgagaaagttgccgaaccgtaaagcggcagaggataaatga

SEQ ID NO: 45195 - protein, 474 aa, Desulfovibrio desulfuricans G20
MTYRTEHDSLGERKVPAQAYYGIQTLRALENFEITTIPVSHYSRFIQALAVVKKAAAMANMELGELDSAVGEAIIHACKDVRQGKLDDQFVVDVIQGGAGTSVNMNANEVICNRALELSGHEKGRYDIIHPLNHVNLSQSTNDVYPTALRIALVWYSRELLHGLRELRDALSRKGAEFGNVIKMARTQLQDAVPITLGAEFAAYAVTVNEDIDRLEEVMRLLCEVNLGATAVGTGINSVPGYGARACAILADVTGLPISQSANLVEATSDAGAYVTLSGLLKRTSVKLSKICNDLRLMSSGPFTGLHEINLPPVQPGSSIMPGKVNPVIPEVVTQICYQIIGNDMTVTMAAEAGQLELNVFGPIIAFNLFQSLEILTRGVHTLRKRCIEGITANDERCLELLKGSLGVVTALAPAIGYEAAAKVVKQAQETRKPVGQVLDEQGLMTAEEYNELLDPSKMLAPRKLPNRKAAEDK

SEQ ID NO: 45196 - DNA, 1431 bp, Moorella thermoacetica ATCC 39073
  CDS (1)..(1431): transl_table=11
atgtctacccgccaggaacacgacctgctgggcaccagggaagtaccagctactgcttattatggtatccataccctgcgggccgcagaaaacttcaacgtcagccgggccagggtccatccggaattgattaaagccctggctactgtaaaagaagccgcggccagggctaacctggacctgggttacctgccggccgaaaaaggccgggccatcatcaccgcctgccaggaagtggcccggggtgaactggccgaccagtttttcctcgacgcctaccagggcggcgccggtacctcaaccaatatgaacgtcaacgaggtaatcgccaaccgcgccctggaaattctgggtcgccccaaaggcgattacgctaccatccatcccatcgatcacgttaacctgcatcagtccactaacgatgtctaccccacggccatgcgggtggcggccatccgcctgttgctgcccctggcggatgaactggcgaaactccaggaagccctccaggagaaagaggccgccttcgccggggtggtcaaaatcggtcgtaccgagctccaggacgccgtgccggtaaccctggggcaggaattcggcgcttacgcccaggccatttcccgggaccgctggcgcctctataaagttgaagagcgcctgcgccaggtaaacctgggtggcaccgccaccggcaccggccttaacgcccccctgaagtacatctacctggtcaacgactacctgcgccgccttacaggaataggcctggcccgggcggagaatatgattgacgccacccagaatatggacgtctttgtggaggtctctggtctggtcaaggctgccgccgttaccatgcacaaaatagcctccgacctgcgttttatggccgccggcccccggggcggcccggcggagatcaatttgccggaacgccaggcgggatcctccatcatgcccggcaaagtcaatcccgtcatcccggagatggtcagccaggtagccatgcaggtcatggccaatgattacttgatcgccatggctgccagtcagggccagctggagctcaatccctttgccccccttattgcccataccttgctggaatccctggccatgctggcggcagcggcccggatattccgcaccgagtgtatcacgggtataaccgccaaccccgagcgctgccaggaactcctggccgtgagcccggccctggctacggccctgctgccctatattggctacgagaaggccacggaagtagtgcgggaagccgtggtttccggccgatcaataaaagaaatagttctagaagaagggtatttgacctctgacgaactggaaaacgtcttaaccccggccgccatgaccaaaccgggaaccgtcggagccgtaaagcagggaataaaggagaagggaaaagcgtaa

SEQ ID NO: 45197 - protein, 476 aa, Moorella thermoacetica ATCC 39073
MSTRQEHDLLGTREVPATAYYGIHTLRAAENFNVSRARVHPELIKALATVKEAAARANLDLGYLPAEKGRAIITACQEVARGELADQFFLDAYQGGAGTSTNMNVNEVIANRALEILGRPKGDYATIHPIDHVNLHQSTNDVYPTAMRVAAIRLLLPLADELAKLQEALQEKEAAFAGVVKIGRTELQDAVPVTLGQEFGAYAQAISRDRWRLYKVEERLRQVNLGGTATGTGLNAPLKYIYLVNDYLRRLTGIGLARAENMIDATQNMDVFVEVSGLVKAAAVTMHKIASDLRFMAAGPRGGPAEINLPERQAGSSIMPGKVNPVIPEMVSQVAMQVMANDYLIAMAASQGQLELNPFAPLIAHTLLESLAMLAAAARIFRTECITGITANPERCQELLAVSPALATALLPYIGYEKATEVVREAVVSGRSIKEIVLEEGYLTSDELENVLTPAAMTKPGTVGAVKQGIKEKGKA

SEQ ID NO: 45198 - DNA, 1428 bp, Desulfitobacterium hafniense Y51
  CDS (1)..(1428): transl_table=11
atggtgcgcaaggaaaaggacttgctcggagttatggaagtaccggaagacgtctattatggaatacagaccttaagagctcgtgaaaacttcccgattacgggatatcgcccacaccatgaattaatccggggattgggtttggtgaaggctgctgccgctcaagccaatatggacatcggttccttgaaccacgagatcggcgaggctgtaattaaagcatctctggaagtggccgagggtgcctttaatgaccattttgtggtggatgtcattcaaggaggagcaggaacctcgattaatatgaatgctaatgaagtgattgctaaccgggctattgagattttgggagggcgaaaaggggattactcccgggttcatcccaatgttcatgttaacatggcgcagagcaccaatgatgtatttcccacagccatccgtattgcctgtcttaatgtagcagacgatctccttcatgccttaaatgagttgaagagtgcttttcaagagaaggccagggagtttgacggagtcatcaagatggggagaacccatcttcaggatgcggttcctattcgcttagggcaggaattcgccgcctatggacaaatgctggagagagatctgcgcaggatcactgaagcagcgaagtccttacatagtattaatatgggtgcaacagctgtaggtaccgggctgaatgctgatccgatttatattgaggaagtttctgagaatctgaggaaggttaccgggttgccgttattgcgagcggataatctggtagatgcgacacagaacacggatgcctttttggaggtgtcgggtgctcttaagaccctggccgttaacctctctaagatcgccaatgatctgcggctgatggcctctgggcccagaacgggctttggggaaattaatcttcctgctatgcagccggggtcttctattatgcccgggaaagtcaaccccgtcatggctgaggtggtcaaccaggtatccttccaggtacagggaaatgattttaccatcgccttagcctgtggagcggggcagctggaactcaatgtgatggagcctgtggtagtcttcaatctgctccaatctttggatatcctccgcaatgtgatcaaggtcttcaaagagcgctgtgtcgatgggataaccgctaatgtggaacgctgtcgggatctggttgaaaacagcgtcggtgtcgtcaccgcaatcaacccccatgtaggatacgaagtcgcttcccgaatcgccaaggaagccatagtgaccggacgtcctgtcagagagattgtcctggaaagaggacttttgacctccgaggagctggatcttatattaaatccccacgaaatgaccaatccgggtatcagcggctcggagttgcttaagggagtgcttccccgtggtcattaa

SEQ ID NO: 45199 - protein, 475 aa, Desulfitobacterium hafniense Y51
MVRKEKDLLGVMEVPEDVYYGIQTLRARENFPITGYRPHHELIRGLGLVKAAAAQANMDIGSLNHEIGEAVIKASLEVAEGAFNDHFVVDVIQGGAGTSINMNANEVIANRAIEILGGRKGDYSRVHPNVHVNMAQSTNDVFPTAIRIACLNVADDLLHALNELKSAFQEKAREFDGVIKMGRTHLQDAVPIRLGQEFAAYGQMLERDLRRITEAAKSLHSINMGATAVGTGLNADPIYIEEVSENLRKVTGLPLLRADNLVDATQNTDAFLEVSGALKTLAVNLSKIANDLRLMASGPRTGFGEINLPAMQPGSSIMPGKVNPVMAEVVNQVSFQVQGNDFTIALACGAGQLELNVMEPVVVFNLLQSLDILRNVIKVFKERCVDGITANVERCRDLVENSVGVVTAINPHVGYEVASRIAKEAIVTGRPVREIVLERGLLTSEELDLILNPHEMTNPGISGSELLKGVLPRGH

SEQ ID NO: 45200 - DNA, 1431 bp, Acidobacteria bacterium Ellin345
  CDS (1)..(1431): transl_table=11
atggcgactcggcaggagaaggattcgctgggatataaggacgttccggcggacgcgtactacgggatccagacggcgcgggcggtggagaactatcccatcagcgggatgcgggcgcatgcgacgttgatccgcgcgattgccatggtgaagcaggcggcggctgaggcgaacctggaactggatctgattgatgcgcgggtcgccgaggcgctcattctcgcggcgaaggaaatgcaggagggccgctgggacgatcagtttgtcgtggacgtattccaggcgggcgcgggcgtgagcttccacataaatgcgaacgaggtgattgcgaaccgcgctgaggaactcacgggcggaaagctgggcgagtacaagattgtgcatccgaatgatcacgtgaattacgggcagtcaaccaatgacgtcttccctaccgcgatgcgcctcgcgacgctgctggagttggagaaactgtatccggtgctcgatggactggcgtcggcgttcggggcgaagggcaaagagtttcacgacatcctgaagtcgggacgcacgcatatgcaggatgcggtgccgatgcgactggggcaagagtttgcggcgtacgcaggtgcagtgagacgcgccgagaagtcggtgcgtgagcaatcggaacttttgcgtgaattgggactcggtggatcggcagtgggaacggggatcaatacccatcccgagtatcgcgagaaggcgattcgcaatctggcgcggatttcgggacagaaactggtggtggcggatgatatgcgctacgcgatgcagtcgaacctggcgatggcgagtgtgagttcggccctgcgaaatctgtcgctggagatcattcgcatcagtaacgacctgcgattgattgcgtcgggacctaacactggactggccgagatcaatttgccggcgctgcagccgggctcgtcaattatgccgggcaagatcaatccggtgatgccggaattggcggcgatggtgtgcttccaggtgattggcaacgacacggcagtggcgttcgcggtgcaggctggtcaacttgaattgaacgtgatgatgccgaccatggcgtacagcgtgctgcaatcggtcacgatcctgacgaacatggtgcgggtgttcacggagaagtgcgttatcggaatcactgcaaacgctaagcgcaatgagatgtacgcacagagcacggtgtcgctggcgacggcgttgaatccgtatatcggctatgcgaaggcggcggagatcgcgaaagaatcggttgcgaccggcaggacgatcatcgagattgcacgagagaagaagtacctgagcgaagagcagatcaaagagatccttgatccagcgcaaatgacggagccccgtctgccatcggaggcagcgaaggatcgcgacaagatcaagttacgctga

SEQ ID NO: 45201 - protein, 476 aa, Acidobacteria bacterium Ellin345
MATRQEKDSLGYKDVPADAYYGIQTARAVENYPISGMRAHATLIRAIAMVKQAAAEANLELDLIDARVAEALILAAKEMQEGRWDDQFVVDVFQAGAGVSFHINANEVIANRAEELTGGKLGEYKIVHPNDHVNYGQSTNDVFPTAMRLATLLELEKLYPVLDGLASAFGAKGKEFHDILKSGRTHMQDAVPMRLGQEFAAYAGAVRRAEKSVREQSELLRELGLGGSAVGTGINTHPEYREKAIRNLARISGQKLVVADDMRYAMQSNLAMASVSSALRNLSLEIIRISNDLRLIASGPNTGLAEINLPALQPGSSIMPGKINPVMPELAAMVCFQVIGNDTAVAFAVQAGQLELNVMMPTMAYSVLQSVTILTNMVRVFTEKCVIGITANAKRNEMYAQSTVSLATALNPYIGYAKAAEIAKESVATGRTIIEIAREKKYLSEEQIKEILDPAQMTEPRLPSEAAKDRDKIKLR

SEQ ID NO: 45202 - DNA, 1389 bp, Cytophaga hutchinsonii ATCC 33406
  CDS (1)..(1389): transl_table=11
atgtctattcgaattgaaaaagataccatgggtttggtggaagtgccggcagataaatattggggtgcacaaacccaacgttccatagaaaattttaaaatcggtgatgcttcaacgcgcatgccgatcgaaatcatacacgccttcgctatcttaaaaaaggcagctgcacaaacaaatctcgaattagggattttagataaagaaaaagcaggcagtatcgcagaagtctgcgatgaaattctggcaaaaaaactggatgatcaatttccgttggttgtatggcaaacaggttcgggtacacaatcaaatatgaatgtgaatgaagtgattgcaaaccgtgcacatgttttgcttggcggaaatttactggatgaaacaaaaaaaattcatccaaatgatgatgtaaataaatcgcagtcatcaaacgacacgtttcccacggctatgcacattgccgcttgcctgatgttaaaaaaagtaacgattccaggaatagagcaattgcagcatacgttacggacaaaaacagaacagtttaaagatgttgttaaaataggccgtacgcatttcatggatgcaacgcctttgacattgggccaggagttttccggatatgctgcgcaattaagctatgcattaaaagcaattcacaatgcctcggcacatctttcagaactagcgctgggtggaacagctgttggtacgggaattaatgcacccaaaggatatgcggaacgggttgccgggcacattgctgcgctcacaggttttccgtttacatcagcacccaataaatttgaagcacttgctacacacgacgcattggtagaaatgcacggcgcgttaaaaacgtctgcagtgagtctgatgaaaattgcaaatgacattcgcatgcttgcatccggtcccagaagcgggattggagaaatccacattccggataatgaacccggatcttcaatcatgccgggcaaggtgaatcctacacaggtagaagccttgacgatggtttgcgcgcaggtaatgggaaatgatgtaacattgtccgttgcaggttctatgggacagtttgaattgaatgtgttcaaaccggtgattatttataattttctgcaatctgcacggctgatcggtgatgcatgtgtttcatttaatgaaaaatgtgcaaaaggaatagagcctaatacagccaccattgaacgcaatgtagaaaactcgttgatgctggttacagccttaaatccgcatattggttatgataagtctgcagaaattgcaaaacatgcgcataaagaaaacacaagtctccggcaggctgcattagcattaggctatgttaccaacgaacagtttgatgcctgggtaaatcctaaaaatatgatctag

SEQ ID NO: 45203 - protein, 462 aa, Cytophaga hutchinsonii ATCC 33406
MSIRIEKDTMGLVEVPADKYWGAQTQRSIENFKIGDASTRMPIEIIHAFAILKKAAAQTNLELGILDKEKAGSIAEVCDEILAKKLDDQFPLVVWQTGSGTQSNMNVNEVIANRAHVLLGGNLLDETKKIHPNDDVNKSQSSNDTFPTAMHIAACLMLKKVTIPGIEQLQHTLRTKTEQFKDVVKIGRTHFMDATPLTLGQEFSGYAAQLSYALKAIHNASAHLSELALGGTAVGTGINAPKGYAERVAGHIAALTGFPFTSAPNKFEALATHDALVEMHGALKTSAVSLMKIANDIRMLASGPRSGIGEIHIPDNEPGSSIMPGKVNPTQVEALTMVCAQVMGNDVTLSVAGSMGQFELNVFKPVIIYNFLQSARLIGDACVSFNEKCAKGIEPNTATIERNVENSLMLVTALNPHIGYDKSAEIAKHAHKENTSLRQAALALGYVTNEQFDAWVNPKNMI

SEQ ID NO: 45204 - DNA, 1464 bp, Rhodococcus sp. RHA1
  CDS (1)..(1464): transl_table=11
ttgagcgacagcgatgtgcggatcgagcacgattcgatcggagatctggcggtaccggcgggggcgtactacggcgtccacaccgccagggcgatggacaatttcgcgatcaccgggtctgccatcggtcagtacccggcactggtcgcggcgttggcgaccgtgaaacaggctgcctgcctggcgaaccgggacctgggtctcctcgacgaccggcgggccgtagcgatcgtggccgcgtgcacggaaattcgcgccggggcactgctcgaccagtttccgatcgatccgatccagggcggagcgggcacttcgtcgaacatgaacgtcaacgaggtcatcgcgaaccgcgcactcgagatcctcgggttcgggcgcggcgcctacaccgaactcgaccctctcgctcacgtgaacctggggcagtccaccaacgatgtgtacccgaccgcgatcaagctcgcgctggtcgagcacctccgaatgttgatcgcgtcgctcggtcggctcgcggagtcgttcgagcgcaagtcgatcgaattcgacgacatcgtcaagatgggtcgcacccagctgcaggacgcggtaccgatgaccctcgggcaggagttcgccgcctactcgatcatgctgaacgaggactgcgcccggctctccgagggagcgcttctgctgctggaatcgaacctcggcggcaccgccatcggcacggggatcaacggacatcccgagtactccgcgctcgcctgcgactacttgcgcgagctgaccggtgaaccggtcgtcccggccggcaatctgatcgaggcaacccaggactgcggagcattcgtgcaggtctccggaatcctcaaacgtgtcgccgtgaaactgtccaagacgtgcaacgatctgcggctcacctcctccgggccgaccgccgggctcggtgagatcaatctgcctccggcccaagccggttcgtcgatcatgcccggcaaggtcaacccggtcatccccgaaatggtgaaccaggtcgcgttcgaggtgatcggcaacgatctgacggtcacgatggccgccgagggtgggcaactccagctcaacgcgttcgaacccgtgatcgtctacagcctgctgcgctcgacgacgcacctggccgcggcatcggacaccctggcggtgaagtgcgtcgacgggatcaccgccaaccgcgaccatctcgagcggggtgttcggcgctcgatcggcatcgtcaccgcgctctcgccgttcatcggctatgcggccagcgcggatatcgccaagagggccctggcgaccggcgcttacgtcggcgacctcgccgtcgacgacggtctgctcactcgcgcgcaggtcgatgacatcctgtccccccggcgactcgccggtctgctcaccgcgcccaccgtggacagcgaattctccgcactcgaccatctcaccggtgtcgccgcgcactga

SEQ ID NO: 45205 - protein, 487 aa, Rhodococcus sp. RHA1
MSDSDVRIEHDSIGDLAVPAGAYYGVHTARAMDNFAITGSAIGQYPALVAALATVKQAACLANRDLGLLDDRRAVAIVAACTEIRAGALLDQFPIDPIQGGAGTSSNMNVNEVIANRALEILGFGRGAYTELDPLAHVNLGQSTNDVYPTAIKLALVEHLRMLIASLGRLAESFERKSIEFDDIVKMGRTQLQDAVPMTLGQEFAAYSIMLNEDCARLSEGALLLLESNLGGTAIGTGINGHPEYSALACDYLRELTGEPVVPAGNLIEATQDCGAFVQVSGILKRVAVKLSKTCNDLRLTSSGPTAGLGEINLPPAQAGSSIMPGKVNPVIPEMVNQVAFEVIGNDLTVTMAAEGGQLQLNAFEPVIVYSLLRSTTHLAAASDTLAVKCVDGITANRDHLERGVRRSIGIVTALSPFIGYAASADIAKRALATGAYVGDLAVDDGLLTRAQVDDILSPRRLAGLLTAPTVDSEFSALDHLTGVAAH

SEQ ID NO: 45206 - DNA, 1401 bp, Hyphomonas neptunium ATCC 15444
  CDS (1)..(1401): transl_table=11
atggccaagacccccacacgcacagaatcggacactttcggccctatcgaggttgaggcggacaagtattggggcgcgcaggcgcagcgctcgctgggcaacttcaagataggctgggagaaacagccccagcccatcgtgcgcgcgctcggcatcgtcaagaaagccgccgccgaagtgaacatggcgatggagaaaatggaccgtctggtcggccgcgccatcgttcaggccgccgatgaagtcatcgagggcaagctcgacgcgcatttcccgctggtcgtctggcagaccggctcgggcacccagtcgaacatgaacgccaatgaggtgatctccaaccgcgccatcgagatcctgaacggcaaggtcggctccaaggcgccggttcacccgaacgatcatgtgaacatgtcccagtcgtccaacgacaccttcccgaccgccatgcacatcgcctgcgccgagcaggtcgtgcacaagctggtccccgccctgcaacagctccagaacgctctgaacgacaaggcacaggcctggaaggacatcatcaagatcgggcgcacgcatacgcaggatgccaccccggtcaccctcggacaggaattctccggctacgccaaacagctcgaaaacggcatcaagcggatcgagatgaccctgccgatgctgatggaactcgcccagggcggcacggcggtgggcaccggccttgcctcgccggagggctttgccgagctggtggccgacaagatcgcccagatcaccggcctgaacttcacctccgcgcccaacaagttcgaggcgcttgccgcccatgacgcgatggtgatgacccacggcgccatcacgaccgtggcgatgagctgcttcaagatcgccaacgacatccgtttcctcggctctggcccgcgctcgggccttggcgagctggccctgccggagaacgagccgggctcctcgatcatgccgggtaaggtgaacccgacccagtgcgaagccctcacccaggtctgcgcgcatattcacggcaacaacgccgccatcggctttgccggcagccagggtcatttcgagctgaacgtgttcaacccgatgatggcctacaacttcctgcaatctgtccagctgctggcagatgcggccgtgtccttcaccgagaactgcgttgtcggcatcgagccgcgcctcgacaatatccagcgcggccttgaaaattcgctgatgctggtgacgccgctgaaggaaaagtatggctacgatctggccgcaaaagtagccaagaccgcgcacaagaatggcaccacactgaaggtcgaagccctggcgctcggcatttcggaggaagatttcgacgccatcgtgcggcctgagaaaatgatcggaccggacccggcataa

SEQ ID NO: 45207 - protein, 466 aa, Hyphomonas neptunium ATCC 15444
MAKTPTRTESDTFGPIEVEADKYWGAQAQRSLGNFKIGWEKQPQPIVRALGIVKKAAAEVNMAMEKMDRLVGRAIVQAADEVIEGKLDAHFPLVVWQTGSGTQSNMNANEVISNRAIEILNGKVGSKAPVHPNDHVNMSQSSNDTFPTAMHIACAEQVVHKLVPALQQLQNALNDKAQAWKDIIKIGRTHTQDATPVTLGQEFSGYAKQLENGIKRIEMTLPMLMELAQGGTAVGTGLASPEGFAELVADKIAQITGLNFTSAPNKFEALAAHDAMVMTHGAITTVAMSCFKIANDIRFLGSGPRSGLGELALPENEPGSSIMPGKVNPTQCEALTQVCAHIHGNNAAIGFAGSQGHFELNVFNPMMAYNFLQSVQLLADAAVSFTENCVVGIEPRLDNIQRGLENSLMLVTPLKEKYGYDLAAKVAKTAHKNGTTLKVEALALGISEEDFDAIVRPEKMIGPDPA

SEQ ID NO: 45208 - DNA, 1431 bp, Leuconostoc mesenteroides subsp. mesenteroides ATCC 8293
  CDS (1)..(1431): transl_table=11
atgcgcacagaatcagattcactcggccaaatcaacgtacccaaagatgtctactacggggcacacactcaacgtgcgctaaataattttccaatttcaaaagaaacaacccatccagaaatcattcgagcctttttagaaattaaacaggctgcggcacaaacaaatgctacatctggtaatctagatcgagctgttgctaaacatattgttgatgcaacaaaaattttgttaagtcagccaatcgatcttacaatgtttccaattagtgacgttcaaggtggtgctggtacaagtaccaatatgaacgtcaatgaagttgttgctaatacagctcttgagcaggtaggccgtgcacgtggtgaatatggctacgttaacccaaatgaccacgttaatatgggtcagagtaccaatgatacttatcctagcgcaggaaaaattgctcttatccgactactcgaaccacttttttcagaattaacattattggtagacgctcttggtaacaaagccgacgaattttcaacaacttacaaaatgggtcgtacacagctacaagatgctgtgcccatgaccttaggaaatacctttcatgcttggttaaaaccacttcgtcgagactttaaacgtatcgaagccgcacgcaatgagctatatacattaaatctgggcggatcagctattggttccggtattaacgtaagttatcattaccaagtgcacatcgttcctaacctagctagcataactgggcttccacttgagcaagcccatgatttatttgatgcaacttcaaacttagactcctatgttgccctgtctggttcattaaaaaatttagcagttaatctatctaaaatgtctaatgatctacgcttactcagttctggcccacgttcgggattacatgaaattaacttaccttcaaaacaagcaggttcatcaatcatgcctggtaaagttaatccagttattccagaagttgtcaatcaagtcgcctttgaaatgattggttttgataccaccgttacggcagcaagcgaagctggtcaattagaattgaatgcatttgaacccattatcttcaaaagcttaatcactggcattgaacatctccaacaagctatgaatactctacgcatcaatgccattgacggcattacagtaaacaaacatcgcttgtcacaagacattgatttgtcggtgagctttgcaaccgcgatggcgccaataattggctacaaagaagccgctaaaattgctaaagaatctctgcgcactggaaaatctttgcgtgaaatcgctgaaaagaaaaatagatttactgaaagtgaattggcacatattttcaaggttgaagatatcgttattaatgctcgaacaccagagcatggtctagtactgcacgcgccaaaaacaacagtataa

SEQ ID NO: 45209 - protein, 476 aa, Leuconostoc mesenteroides subsp. mesenteroides ATCC 8293
MRTESDSLGQINVPKDVYYGAHTQRALNNFPISKETTHPEIIRAFLEIKQAAAQTNATSGNLDRAVAKHIVDATKILLSQPIDLTMFPISDVQGGAGTSTNMNVNEVVANTALEQVGRARGEYGYVNPNDHVNMGQSTNDTYPSAGKIALIRLLEPLFSELTLLVDALGNKADEFSTTYKMGRTQLQDAVPMTLGNTFHAWLKPLRRDFKRIEAARNELYTLNLGGSAIGSGINVSYHYQVHIVPNLASITGLPLEQAHDLFDATSNLDSYVALSGSLKNLAVNLSKMSNDLRLLSSGPRSGLHEINLPSKQAGSSIMPGKVNPVIPEVVNQVAFEMIGFDTTVTAASEAGQLELNAFEPIIFKSLITGIEHLQQAMNTLRINAIDGITVNKHRLSQDIDLSVSFATAMAPIIGYKEAAKIAKESLRTGKSLREIAEKKNRFTESELAHIFKVEDIVINARTPEHGLVLHAPKTTV

SEQ ID NO: 45210 - DNA, 1422 bp, Mycobacterium smegmatis str. MC2 155
  CDS (1)..(1422): transl_table=11
gtgacgccggtgcagtcattccgtaccgaacacgatctgctcggtgacctcgaggtaccggccgatgtctactacggcgtgcacaccgcgcgcgcactgctgaactttccgatcagcggaatgcccatatcgcgccatcctgacctggtggtcgcgctcgcctcggtgaaacaggcggcagccgaagcgaatcgtcaactcggccagctcgactccactatcgccggcgcgatcatcaccgcctgcaccgagattcgcgacggggccctgcgcgagcagttcgtcgtcgaccagattcagggcggggcaggcacgtcgaccaacatgaacgccaacgaggtgatcgccaaccgtgcctgcgagctcctcggacatcagcgcggctcctacgacgtcgtacatccccttgagcacgtcaacctcggacagagcaccaacgacgtctacccgacggcgctcaagatcgcactcggaactgcgacccgcacgctcgaacaggccttgcggcgcctcgccgatcactgcagcaccaagtcgctcgaattcgccgacatgctcaaactcggccgtacgcagttgcaggacgcggttccgatgacactcggtcaggaattcggggccttcgcggtgaccattctcgaagacgccgaccggctcggtgaagtgtcagcgctcatcgccgagatcaacctcggcgggaccgccatcggcacgggactcaacacccatccggaatatgcggcactggtgtgcgatcacctgcgcgccgtcaccggcctgccgctcaccaccgcgggcaacctcgtggaggcgacctccgacgtcggcgcgttcgtccaactgtccggtgtcgcgaaacgcagcgcggtgaaactgtcgaagatctgcaatgacctacggctgctctcgtcgggcccacgggccggtttcggcgagatcaaccttccgcctgtgcaggccgggtcgagcatcatgcccggcaaggtgaatcccgtcatccctgaagtcgtcaaccaggtcgccttcgaggtgatcggcaacgatctcaccgtcaccatggccgccgaggccggacagttgcagctcaacgcgttcgagccgatcatcgcccgcgctctgttgtcatcgatcaaccacctggccgcggcggtcaatgtcctaggtgaacgctgtatcgagggcatcacggccaacaccgatcacatgcgtgacgcggttctgagatcggcgagtctggccaccgcgctcaaccccgtgctcggttacgaggcggcgaccgcattggtcgccgaagccatcgcgaccggcgaatcgatccccgagatggtgctgcggtgcgcactggtggacgaggcggtgctcgcccgggtgctgagcccggagaacctgtgcggactcagcgggtccgagagggctaggtag

SEQ ID NO: 45211 - protein, 473 aa, Mycobacterium smegmatis str. MC2 155
MTPVQSFRTEHDLLGDLEVPADVYYGVHTARALLNFPISGMPISRHPDLVVALASVKQAAAEANRQLGQLDSTIAGAIITACTEIRDGALREQFVVDQIQGGAGTSTNMNANEVIANRACELLGHQRGSYDVVHPLEHVNLGQSTNDVYPTALKIALGTATRTLEQALRRLADHCSTKSLEFADMLKLGRTQLQDAVPMTLGQEFGAFAVTILEDADRLGEVSALIAEINLGGTAIGTGLNTHPEYAALVCDHLRAVTGLPLTTAGNLVEATSDVGAFVQLSGVAKRSAVKLSKICNDLRLLSSGPRAGFGEINLPPVQAGSSIMPGKVNPVIPEVVNQVAFEVIGNDLTVTMAAEAGQLQLNAFEPIIARALLSSINHLAAAVNVLGERCIEGITANTDHMRDAVLRSASLATALNPVLGYEAATALVAEAIATGESIPEMVLRCALVDEAVLARVLSPENLCGLSGSERAR

SEQ ID NO: 45212 - DNA, 1422 bp, Nostoc punctiforme PCC 73102
  CDS (1)..(1422): transl_table=11
atgactgaacacacagactctcaattccgcatcgaacgcgattcgatgggcgatcgccaaattgctagtagcttttattacggcattcaaacgctacgggcgatcgaaaactttcctattagtggcattaagcctttagctacttacgtagatgctggattaatcattaaaaaagctacagcaattgtcaatggagaactgaattgtattcccgaagatattagtcaggcgattgtccaagcaactgatgaaatcctggctgggaagttccgggatcagtttgtcgtggatgtttatcaggcaggtgctggaacatcccaccacatgaatgtcaacgaagttctggcaaatcgcgccttagaaattctgggtgaagaaaagggcaattacaaacgtgttagtcctaacgatcacgttaactatgggcagtctaccaatgatgtgattcctactgccattcggattggtggtttattggcattatccaagacattacacccagcaatagaaggtgcgatcgcatccttagaaaacaaagctgtagaatttcaagatattgtcaaatctggcagaacccacttacaagacgctgtacccgtgcgtttgggtgaaaattttcgcgcttgggcgcacattcttacagaacaccaaaaccggatttacaccgcctctggagatttgatggtgctgggtttgggaggtagtgcagcaggaaccggtttaaatactcatcctctatatcgcgcccgtgtagtagaagttctttcagaattgattgatacacctttagaacctgcgccccatctcatggcagctatgcagagtatggctccatttgtaaatgtttccggtgctttacgcaatttagcgcaggatttagtcaaaatatctcatgacttgcggctgatggattcgggaccaaaaactggtttgaaagaaatccaacttcccccagtgcaacccggttcctcgattatgccagggaaatataacccagtcatggcagagatgacatcaatggtgtgttttcaggtgatgggttatgacagtgcgatcacattagccgcacaagccggacaattagaattaaatgtgatgatgccgctaattgcctataacttgattcacagtatcgaaattctcggcaataccatcgctgcactcaccgaacgctgcatcgagggaattactgcaaatcaagaacgttgtttagcttatgccgaaggcagtttagctttagtaaccgcactaaacacccacattggttatttaaacgctgctgctgtcgccaaagaatctttagaaactggtaaatccctgcggcaaattgttctagaacggggattaatgagtgaaacagacttagccacagtgttaaatctagaacacatgagtggtatcttaccgctcaaaacagaataa

SEQ ID NO: 45213 - protein, 473 aa, Nostoc punctiforme PCC 73102
MTEHTDSQFRIERDSMGDRQIASSFYYGIQTLRAIENFPISGIKPLATYVDAGLIIKKATAIVNGELNCIPEDISQAIVQATDEILAGKFRDQFVVDVYQAGAGTSHHMNVNEVLANRALEILGEEKGNYKRVSPNDHVNYGQSTNDVIPTAIRIGGLLALSKTLHPAIEGAIASLENKAVEFQDIVKSGRTHLQDAVPVRLGENFRAWAHILTEHQNRIYTASGDLMVLGLGGSAAGTGLNTHPLYRARVVEVLSELIDTPLEPAPHLMAAMQSMAPFVNVSGALRNLAQDLVKISHDLRLMDSGPKTGLKEIQLPPVQPGSSIMPGKYNPVMAEMTSMVCFQVMGYDSAITLAAQAGQLELNVMMPLIAYNLIHSIEILGNTIAALTERCIEGITANQERCLAYAEGSLALVTALNTHIGYLNAAAVAKESLETGKSLRQIVLERGLMSETDLATVLNLEHMSGILPLKTE

SEQ ID NO: 45214 - DNA, 1434 bp, Bifidobacterium longum DJO10A
  CDS (1)..(1434): transl_table=11
atgagcgaaacatcgaacaagacccgtctggaacatgactgcatcggccagatggaggtgccggcgaacgtctactggggtattcacacccagcgcgctatcggcaacttcccggtctccggcatcaccgatagccaacatcccgagctgattcgcgcctatgccacggtcaagcgcgcctgcgccatcgccaatgaggaattaggcctgatcgacccagccaaggccgaggccattcgcgccgcctgcctagaaattgaggccggcaaactggccgatcagttcccggtcgatgtgatgcagggcggtgccggcacctcgtcgaacatgaacatgaacgaggtgatcgccaaccgtgcgttggaaatcgccggccgccagcgcggcgattacacatacatccatccgaacgacgacgtcaacaagtcgcagtccacgaacgacacctacccggccgcctgcaaactcgcgcttatcgacgcgatcgggccgctcgccgagtccaccaagaaactcgccaaggccttccacgatctggccgacaaacatatcaatgacgtgacgattggccgcacgcagctgcaggacgccgtaccaatgacctatggtcaggaatttcatgcgtttgccacgctgttgaagtctgatttggctgcattcgatcgcgtggtgccgctgctggcccagctcaacctcggtgccaccgccatcggtaccggcatttgcgcggatctgcgattccgcaagtccgctatcaagcatctggcgcagatcaccggcttgccggtcaccgccgcgcccgatccggtggccgccatgacggatatgggcgcgtacgtggccacgtcggccgccatcaagagcctcgccgtgcacctgaagaaggccgccgacgatttgcgactgctcaattccgggccgcgctgcggtttcaacgatctcaacgtgccggctcgccaggccggatcgtcgatcatgccggccaaagtgaaccctgtgatccccgaatgcgtcaaccagtgctgcttcacgattttcggcatggacgtgactgtgaactgggctgtggccgagggacagttgcagctgaacgccttcgacccggtgatggtgcatgagctgctgaccggcatggcgttgctgacgcacgccatggagacgttccgcgtcaactgcgtggaaggcatcgaaatcaatgctgacctggggcgttcatacgcccagtcctcaccgtcgatttccgccgcgctcaaccactacatcggctacgagcacgcggccgacatcgccgccgaagccgtgcacaccggccgtaccgtgcgcgaggtggccggcgaacgcaccgacctgcccgccgagcagttggacgagattctcgatccgattcgactggcccgcggcctcggccagacctgccgcgagcaccaggagtag

SEQ ID NO: 45215 - protein, 477 aa, Bifidobacterium longum DJO10A
MSETSNKTRLEHDCIGQMEVPANVYWGIHTQRAIGNFPVSGITDSQHPELIRAYATVKRACAIANEELGLIDPAKAEAIRAACLEIEAGKLADQFPVDVMQGGAGTSSNMNMNEVIANRALEIAGRQRGDYTYIHPNDDVNKSQSTNDTYPAACKLALIDAIGPLAESTKKLAKAFHDLADKHINDVTIGRTQLQDAVPMTYGQEFHAFATLLKSDLAAFDRVVPLLAQLNLGATAIGTGICADLRFRKSAIKHLAQITGLPVTAAPDPVAAMTDMGAYVATSAAIKSLAVHLKKAADDLRLLNSGPRCGFNDLNVPARQAGSSIMPAKVNPVIPECVNQCCFTIFGMDVTVNWAVAEGQLQLNAFDPVMVHELLTGMALLTHAMETFRVNCVEGIEINADLGRSYAQSSPSISAALNHYIGYEHAADIAAEAVHTGRTVREVAGERTDLPAEQLDEILDPIRLARGLGQTCREHQE

SEQ ID NO: 45216 - DNA, 1416 bp, Haemophilus somnus 2336
  CDS (1)..(1416): transl_table=11
atgataacgagaaaagaaattgatttgcttggtgaacgtgacgttccagctgatgcgtattggggcattcatacattaagagcggtagaaaattttaacatttctaatgtaacgatttctgatgtacctgaatttgtacgtggtatggtcatggtaaaaaaagcaaccgcacttgcaaatggagaattgggtgcaattccggataaaattgctcaggcgattgtgaaagcttgtgatgcgattttaattgatggtaaatgtatggatcaatttccttcagatgtatatcaaggtggtgctggtacttccgtaaatatgaataccaacgaagtggtcgctaatttagcattagaaattttaggtcataagaaaggggaatatgatattttagatccgatggatcatgttaatgccagccaatctacaaatgatgcttatccgacaggtttccgcattgctgtttataacagtattatgaaactggtaactaaagtactttatttacaacaaggttttgaaaataaagcaaaagagttttcgaatatcttaaaaatgggacgtactcaattacaagatgcagttcctatgactgtggggcaagaatttaaagcattttctgtattattagatgaagaagtgcgtaatttaacccgcacggctgaattactgttagaagtaaatttgggtgcaacagctatcggtaccggcttaaatactcctcaaggttattcagaattagttgttaagcgtttatctgaggtttcaggtttaccttgtacagttgcaccaaacttaattgaagccacttcagactgtggtgcttatgttatggtacacggtgcgttaaaacgtactgcggtaaaattatctaaagtatgcaatgatttacgtttactttcatcaggtccacgtgcaggtttaaatgaaattaatttacctgagttacaggctggatcttcaattatgccggcaaaagtcaacccggttgtacctgaggtagtcaaccaagtttgtttcaaagtgattggtaatgatactaccgtaacttttgcagctgaagcggggcaattgcagttaaatgtgatggaaccggtaattggtcaagccatgtttgaaagtattgaaattttaacgaatgcttgcgtgaatttacgtgataaatgtattgatggaattactgcaaataaagaaatttgtgaaaattatgtctttaattccatcggaatcgtaacttatttgaatccgtttattggtcatcataatggcgatatagtaggtaaaacatgtgctaaaacaggacgtggagtgcgtgaagttgtactggaaatgggcttattaacagaagagcagttagataatattctttctgtggagaatttaatgaacccaacctacaaagctacattacataagtaa

SEQ ID NO: 45217 - protein, 471 aa, Haemophilus somnus 2336
MITRKEIDLLGERDVPADAYWGIHTLRAVENFNISNVTISDVPEFVRGMVMVKKATALANGELGAIPDKIAQAIVKACDAILIDGKCMDQFPSDVYQGGAGTSVNMNTNEVVANLALEILGHKKGEYDILDPMDHVNASQSTNDAYPTGFRIAVYNSIMKLVTKVLYLQQGFENKAKEFSNILKMGRTQLQDAVPMTVGQEFKAFSVLLDEEVRNLTRTAELLLEVNLGATAIGTGLNTPQGYSELVVKRLSEVSGLPCTVAPNLIEATSDCGAYVMVHGALKRTAVKLSKVCNDLRLLSSGPRAGLNEINLPELQAGSSIMPAKVNPVVPEVVNQVCFKVIGNDTTVTFAAEAGQLQLNVMEPVIGQAMFESIEILTNACVNLRDKCIDGITANKEICENYVFNSIGIVTYLNPFIGHHNGDIVGKTCAKTGRGVREVVLEMGLLTEEQLDNILSVENLMNPTYKATLHK

SEQ ID NO: 45218 - DNA, 1419 bp, Haemophilus influenzae R2846
  CDS (1)..(1419): transl_table=11
atgactcaatttagaaaagaagtagatttactcggcgaacgtgatgtgcctgcagaagcatattgggggattcatacattaagagcggtagaaaattttaatatttctaacgtaaccatttctgacgtaccagagtttgtacgtggtatggtaatggtaaaaaaagcaacggctttagccaatggcgaattaggtgcaattccaagtgatattgcaaaagcgattgtagcagcttgtgatgaaatccttaccactggaaaatgcttagatcaattcccatcagatgtatatcaaggtggtgcaggtacctcagtgaatatgaataccaatgaagttgtggcgaatttggcgttagagttattaggacataagaaaggggaataccaatatttagatccaatggatcatgttaacgctagccaatcaaccaacgatgcgtatcctaccggtttccgtattgcagtgtataacagcatcttaaaattgatcgataaaattcaatatttacacgacggttttgacaataaagcgaaagaatttacgaatatcttaaaaatgggacgtacccaattgcaagatgcggtgccaatgactgttggtcaagaattcaaagctttcgccgtattacttgaagaagaagtgcgtaacttaaaacgtacagcaggtttattacttgaagtaaaccttggtgcgactgcaatcggtactggtttaaatacgccacaaggctatacagaattagttgtaaaacatcttgctgacgtgactggattagcttgtgtaccagcagaaaacttaattgaagcaacatctgactgtggtgcttatgtcatggttcacggtgcattaaaacgtactgcagtgaaactttctaaagtatgtaatgacttacgtttactttcttctggccctcgtgcaggtttaaaagaaattaatcttcctgaattacaagcaggttcttctattatgccagcaaaagtaaacccagttgttcctgaagtggtgaaccaagtatgctttaaagtaattggtaacgataccactgtgactttcgcatctgaagcaggtcaattacaattaaacgtaatggaacccgtgattggtcaagcaatgtttgaatctatcgacatcttaaccaatgcttgtgtgaacttacgcgataaatgcgtggatggcatcactgtaaacaaagaaatttgtgaaaactacgtgtttaattcaattggtattgtgacttacttgaatccatttatcggtcaccacaacggcgacttagtgggtaaaatctgtgcacaaacaggcaaaggcgtacgtgaagttgtgttagaaaaaggtttattaacagaagaacaattggatgacattctttctgtagaaaacttaatgaatccaacttacaaagcgaaattaaataaataa

SEQ ID NO: 45219 - protein, 472 aa, Haemophilus influenzae R2846
MTQFRKEVDLLGERDVPAEAYWGIHTLRAVENFNISNVTISDVPEFVRGMVMVKKATALANGELGAIPSDIAKAIVAACDEILTTGKCLDQFPSDVYQGGAGTSVNMNTNEVVANLALELLGHKKGEYQYLDPMDHVNASQSTNDAYPTGFRIAVYNSILKLIDKIQYLHDGFDNKAKEFTNILKMGRTQLQDAVPMTVGQEFKAFAVLLEEEVRNLKRTAGLLLEVNLGATAIGTGLNTPQGYTELVVKHLADVTGLACVPAENLIEATSDCGAYVMVHGALKRTAVKLSKVCNDLRLLSSGPRAGLKEINLPELQAGSSIMPAKVNPVVPEVVNQVCFKVIGNDTTVTFASEAGQLQLNVMEPVIGQAMFESIDILTNACVNLRDKCVDGITVNKEICENYVFNSIGIVTYLNPFIGHHNGDLVGKICAQTGKGVREVVLEKGLLTEEQLDDILSVENLMNPTYKAKLNK

SEQ ID NO: 45220 - DNA, 1464 bp, Photobacterium sp. SKA34
  CDS (1)..(1464): transl_table=11
atgtctcagatgattgatcttgaaaaaaataacgaagcagcactgaatgttgcaactagaatcgaagaagatcttcttggtaagcgtcacgttccaacagacgcgtattggggtattcacactctacgtgcaatcgaaaactttaatatctctaataccactatctcagacgtacctgagtttgttcgcggcatggttttcaccaaaaaagcagcggcaatggcgaacaaagaactcggtgcgatcccttcagatgtcggtaactacatcgagcaagcgtgtgatcttattttagaaacaggccgttgtatggatcaattcccttctgatgtataccaaggtggcgctggcacatctgtaaatatgaacaccaatgaagtgattgcaaaccttgctcttgagcttatgggcaaagagaaaggcgaatatgacatcattaacccgaacgatcacgtaaacaagtcccaatcaactaactgtgcttaccctactggtttccgcgttgcggtatataacagcatcattaacatgctagaagcattagagtacctaaagacagccttcgatgtgaaagcaacggaatttgctagcatcttaaaaatgggccgtactcagctacaagacgcagtacctatgactgtaggccaagaattccatgcttatagtgtattgctaaaagaagaaatcaaaaacctgcattacaccgcgcaattactgcttgaggtcaacctaggtgcaactgctatcggtactggtttgaatgcagctacgggttaccaacacctagcggttcaacgcctagctgaaattacaggcctacctgttacaccagcagaagacttgattgaagcaacatccgactgtggtgcttacgttatggttcacggcgcgctaaaacgtactgcagtgaaactatctaaaatctgtaacgatctacgtctactctcttctggtcctcgtgccggtattaacgaaattaaccttcctgaaatgcaggcaggctcttctatcatgccagcaaaagtaaatcctgttatcccagaagtggttaaccaaatttgctttaaagtgatcggtaacgatacaaccattacttttgctgcagaagcaggtcagcttcaacttaacgtaatggagcctgtgattggtcaagcgttgtttgagtcaatcagcttactgaaaaatgcgtgtgttaatttacgtgagaaatgtatcgaaggcatcacagtgaataaagatgtatgtgagagccacgtatttaactctatcggtatcgtgacttatttaaacccattcattggtcaccatgaaggcgatatcgtaggtaaaatctgtgcagaaacaggaaagagcgtacgtgaagttgttctagaacgcggtcttcttactgaagatcaattaaatgatatcttctctattgaaaacttgatgcaccctcaatacaaggcacaacgatacagctaa

SEQ ID NO: 45221 - protein, 487 aa, Photobacterium sp. SKA34
MSQMIDLEKNNEAALNVATRIEEDLLGKRHVPTDAYWGIHTLRAIENFNISNTTISDVPEFVRGMVFTKKAAAMANKELGAIPSDVGNYIEQACDLILETGRCMDQFPSDVYQGGAGTSVNMNTNEVIANLALELMGKEKGEYDIINPNDHVNKSQSTNCAYPTGFRVAVYNSIINMLEALEYLKTAFDVKATEFASILKMGRTQLQDAVPMTVGQEFHAYSVLLKEEIKNLHYTAQLLLEVNLGATAIGTGLNAATGYQHLAVQRLAEITGLPVTPAEDLIEATSDCGAYVMVHGALKRTAVKLSKICNDLRLLSSGPRAGINEINLPEMQAGSSIMPAKVNPVIPEVVNQICFKVIGNDTTITFAAEAGQLQLNVMEPVIGQALFESISLLKNACVNLREKCIEGITVNKDVCESHVFNSIGIVTYLNPFIGHHEGDIVGKICAETGKSVREVVLERGLLTEDQLNDIFSIENLMHPQYKAQRYS

SEQ ID NO: 45222 - DNA, 1404 bp, Oceanospirillum sp. MED92
  CDS (1)..(1404): transl_table=11
atggtcactcgtatcgaacacgacatgctaggtgagatgcaaattcctagcgacgtctggtacggagtacaaacccttcgagcaaaggaaaacttctccattacaggcgtgccgatcagtcactttcctcacttaatcaaagcactggcaatggtgaagtggtccgcggcacaaaccaataaagaattgaagctgcttgaagaacataaagctgacgccattatggccgcctgtcgtgacattatcgacggagcactgcatcagcaatttgtcgtcgatctcattcagggcggcgcaggcacttcaaccaatatgaatgccaatgaggtgattgctaacctggcactgagcaagttgggcaaagagaaaggtgactaccaacacctgcatccaaacgatgacgtaaactgctctcaatccactaacgacgcttatccaaccgcagtatgtttgggcattcaattcgcggctgaacctctgaccgagcacctggaaagcttgatccaagcctttaacaacaaaggccaagaatttaacgatgtggtcaaaatgggtcgtacccaactacaagatgccgtacccatgacgctggggcaggagttcgaagcctttgcagtcaccctaagtgaagatatcgaccgtataaaggaagcctgcaagctgttgtgtgaggttaacctcggtggcaccgctattggtaccgggatcaacacgcacccggagtatgcaagccgtgtcgttaagaggttagcagaaatctctggcaaacctatgattcctgccagccacttggtagaagccacctcagacctgggcgcatttgttctgttctctggcattcttaaacgtatggcagtcaagctcggtaagatatgtaatgaccttcgattactttcaagcggcccgcgcactggctttgctgagatccatcttccaccgatgcaacccggatcatctatcatgcctggcaaggtgaacccggtgatacctgaagcggtcaatcaaactgcctaccaggtgatcgctaacgacctggccgtcacacttgccgctgaatcaggtcagctgcagctgaatgcgatggaaccgctgatcgtttataacctgcttagctcgatgaagatgctgtgtaacgcctgtgaaatgctggaggaacgctgtgtcagtggtattaaagcgaatcgggaacaatgctcgcgacatctggataacagcatcggtgtaatcactgctctggtaccacacatcggttatgccaatgcctctcgtatcgccaaaaccgcgttaaatacgggctcgacggtacgcgaactggtgattggtgaaggtctgctggacagtatccagcttgatcgcctacttagccctgaatcgatgctagcccctggagagcgagtttcatga

SEQ ID NO: 45223 - protein, 467 aa, Oceanospirillum sp. MED92
MVTRIEHDMLGEMQIPSDVWYGVQTLRAKENFSITGVPISHFPHLIKALAMVKWSAAQTNKELKLLEEHKADAIMAACRDIIDGALHQQFVVDLIQGGAGTSTNMNANEVIANLALSKLGKEKGDYQHLHPNDDVNCSQSTNDAYPTAVCLGIQFAAEPLTEHLESLIQAFNNKGQEFNDVVKMGRTQLQDAVPMTLGQEFEAFAVTLSEDIDRIKEACKLLCEVNLGGTAIGTGINTHPEYASRVVKRLAEISGKPMIPASHLVEATSDLGAFVLFSGILKRMAVKLGKICNDLRLLSSGPRTGFAEIHLPPMQPGSSIMPGKVNPVIPEAVNQTAYQVIANDLAVTLAAESGQLQLNAMEPLIVYNLLSSMKMLCNACEMLEERCVSGIKANREQCSRHLDNSIGVITALVPHIGYANASRIAKTALNTGSTVRELVIGEGLLDSIQLDRLLSPESMLAPGERVS

SEQ ID NO: 45224 - DNA, 1383 bp, Oceanobacter sp. RED65
  CDS (1)..(1383): transl_table=11
atggacgtacgcactgaaagcgattcattaggtacaaaacagattggcagtcatcattattacggtattcaaactcaaagagccgtagaaaatttttcgatcacagatattccactcagtattgatccggaaatggtgattgctttggccatggtgaaaaaagcttgcgccttaaccaactgcgatcttggggtgcttcctaaagaaaaaaccgatgccatcgtcgctgcatgcgatgaaattattgcgggtaagcaccatcaagagttcgttgttgatgtcattcaaggtggtgcaggtacttctgccaatatgaacgccaatgaagtcatcgccaaccgtgcgcttgaaatcatgggttatagcaagggtcactatcagcatctacacccaaacaatgatgttaatgcctctcaatcgactaatgacgtttatccatctgcacttcgcttggctctttataataagtcccaagatttaatctcagcactagaagaattagttgatgcatttggtgtaaaagcagaagcgtttaaagacgtttataaaatcggtcgcacccagttgcaagatgcggtgcctatgacgttgggcatggaatttggtgcttttgctacggctattgcagaagacattgttcaaataaaacatacagcgcatcttttactcgacaccaacttaggcgccacggctatcggtactggcatcaatacgcctaaaggttatagcacaaaagtgatagagcatttacgtgaagtaagtggtgtacaagtgcgatcagcggaaaacctaattgaagccacctgggatactggcgactttgttcaattaagcggtaccttaaaacgctatgccaccaagatcagtaaaatttgcaatgatttgcgtttgttaagttcaggaccattatgcggcttaggtgaaatcaacttacctaaaatgcagccaggttcatccatcatgcctggcaaagtgaatcccgttattcctgaagtcatgaatcaaattgcttatgacgttatcggtaaagacgttactgtttccatggcatctgaaggcggacaaatgcagctaaacgcatttgaaccagttattgccaactgcctctttttatctttaggcatgcttacccgtggttctcgcattttacgtgaaaagtgcattcaaggtatcacggctaaccgtgagaaatgcgaagaatatttggataaatcagtaggtatcgtaaccgcattaaacccgattctaggttatgaagtcacatcggcacttgctcaagaagccgtcgcagaaggtaagtccattaaaaaattagtgattgagaaacagcttttgccagcagagcaggttgatgctttgctgcaaagcgcgatgggtcaataa

SEQ ID NO: 45225 - protein, 460 aa, Oceanobacter sp. RED65
MDVRTESDSLGTKQIGSHHYYGIQTQRAVENFSITDIPLSIDPEMVIALAMVKKACALTNCDLGVLPKEKTDAIVAACDEIIAGKHHQEFVVDVIQGGAGTSANMNANEVIANRALEIMGYSKGHYQHLHPNNDVNASQSTNDVYPSALRLALYNKSQDLISALEELVDAFGVKAEAFKDVYKIGRTQLQDAVPMTLGMEFGAFATAIAEDIVQIKHTAHLLLDTNLGATAIGTGINTPKGYSTKVIEHLREVSGVQVRSAENLIEATWDTGDFVQLSGTLKRYATKISKICNDLRLLSSGPLCGLGEINLPKMQPGSSIMPGKVNPVIPEVMNQIAYDVIGKDVTVSMASEGGQMQLNAFEPVIANCLFLSLGMLTRGSRILREKCIQGITANREKCEEYLDKSVGIVTALNPILGYEVTSALAQEAVAEGKSIKKLVIEKQLLPAEQVDALLQSAMGQ

SEQ ID NO: 45226 - DNA, 1452 bp, Vibrio sp. Ex25
  CDS (1)..(1452): transl_table=11
atggctaccctatctgatgctccaaaaacagcaaacccagccactcgtattgaagaagatctattaggtcaacgtcatgtccctgcagatgcgtactacggtattcatacgctacgtgcgatcgagaacttcaacatctctaatatgaccatctctgacgtaccagaatttgtacgcggtatggtaatgaccaaaaaagcagcggcgttggcaaacaaagaacttggtgcgattccaaaagacgttgcaaactacatcatcgaagcgtgtgatttgatcctagaaactggcaagtgcatggatcagttcccatcagacgtattccaaggtggtgcgggcacttccgtgaacatgaacacaaacgaagtgatcgcaaacgttgcgcttgagctaatgggtaaagagaaaggtcaatacgaatttgtcaacccaaatgaccacgtaaacaagagccaatcaaccaactgtgcgtatccaacgggtttccgtatcgcggtttacaacagcgtacacaaactaatggaagcaattgagtacctaaaaggcgcattcgaacttaaagcaattgagtttaaagatgtactgaaaatgggtcgtactcagctacaagacgcggtaccgatgactgtaggtcaagagttccacgcttgggcagtaacactaaacgaagagattcgtgctctagattacacctctaaactactcctagaaatcaacctaggcgcaaccgcaatcggtacaggtctaaatacaccgactggctaccaagcgcttgcagtaaaacacctagcggaagtaacaggtcttgacgttgttgcggcagaagaccttatcgaagcgacttctgactgtggcgcatacgtaatgacgcacagtgcactaaaacgtctagcggtaaaactatcgaagatctgcaacgaccttcgtctactttcttctggccctcgcgcaggtctaaatgaattgaacctacctgaaatgcaagcaggttcttcaatcatgccagcaaaagtaaacccagttatcccagaagtagtaaaccaagtttgctttaaagttctaggtaacgacaacacggtttctttcgcagcagaaggcggtcagctacagctaaacgtaatggaaccagttatcgcacaaagcatgtttgagtctatctctctactacacaatgcgtgtgtgaacctacgtgataaatgtatcgacggcatcacagtcaataaagagacttgtgaaaactacgtttacaactcaatcggtatcgtcacttacctaaacccatacatcggccaccacgaaggtgacatcgtaggtaagatttgtgcggaaaccggtaagagtgttcgcgaagttgtgctagagcgcggtctgctaaccgcagaagagcttgatgaaatcttgtcagtagaaaacttcatgcatccaacttacaaagcgaaacgctacgagtaa

SEQ ID NO: 45227 - protein, 483 aa, Vibrio sp. Ex25
MATLSDAPKTANPATRIEEDLLGQRHVPADAYYGIHTLRAIENFNISNMTISDVPEFVRGMVMTKKAAALANKELGAIPKDVANYIIEACDLILETGKCMDQFPSDVFQGGAGTSVNMNTNEVIANVALELMGKEKGQYEFVNPNDHVNKSQSTNCAYPTGFRIAVYNSVHKLMEAIEYLKGAFELKAIEFKDVLKMGRTQLQDAVPMTVGQEFHAWAVTLNEEIRALDYTSKLLLEINLGATAIGTGLNTPTGYQALAVKHLAEVTGLDVVAAEDLIEATSDCGAYVMTHSALKRLAVKLSKICNDLRLLSSGPRAGLNELNLPEMQAGSSIMPAKVNPVIPEVVNQVCFKVLGNDNTVSFAAEGGQLQLNVMEPVIAQSMFESISLLHNACVNLRDKCIDGITVNKETCENYVYNSIGIVTYLNPYIGHHEGDIVGKICAETGKSVREVVLERGLLTAEELDEILSVENFMHPTYKAKRYE

SEQ ID NO: 45228 - DNA, 1437 bp, Pseudomonas putida GB-1
  CDS (1)..(1437): transl_table=11
atgatatacatcatgtcctccgctgcatcgttccgcgtcgaaaaagacttgttgggtacccttgaagttcctgcagatgcctactacggcatccagaccctgcgcgctgccaacaacttccacctctccggtgttccactgtcgcactacccgaagctggtcgtggccctggccatggtcaagcaggccgctgccgacgccaaccgtgagctgggtcacctgagcgatgccaagcacgctgccatcaccgcagcctgcgcccgcctgatcaaaggcgattaccacgaccagttcgtggtggacatgatccaaggcggtgctggtacttctaccaacatgaacgccaacgaagtcattgccaacgttgcactggaggccatgggccaccagaagggtgagtaccagtacctgcacccgaacaacgacgtgaacatggcgcagtcgaccaacgacgcctacccgaccgctatccgtctgggcctgctgctgggtcacgacgcactgctggccagcctcgacagcctgattcaggccttcgctgccaagggtaaagaattcgaccacgtactgaagatgggccgtacccagctgcaggacgccgtaccgatgaccctgggccaggaattccgcgccttcgccaccaccatgaccgaagacctgcagcgcctgcgctcgctggccccggaactgctgaccgaaatcaacctgggcggtaccgccatcggcaccggcatcaacgccgaccctggctaccaggctctggccgtacagcgcctggccgccatcagtggccagccgctggtaccggctgccgacctgatcgaagccacttccgacatgggcgccttcgtgctgttctccggcatgctcaagcgtaccgcggtcaagctctcgaaaatctgtaacgacttgcgtctgctgtccagcggcccgcgcaccggcatcaacgagatcaacctgccagcgcgtcagccaggcagctcgatcatgccaggcaaggtcaacccggttatcccggaagccgtcaaccaggtggccttcgccatcatgggcaacgacctggccctgaccgtcgccgccgaaggtggccagctgcagctgaacgtgatggagccgctgatcgcctacaagatcttcgactcgatccgcctgctgcaacgcgccatggacatgctgcgcgagcactgcatcgtcggcatcaccgccaacgaacagcgctgccgtgaactggtcgagcactcgatcggcctggtcactgcactgaacccgtacatcggctacgaaaacgccacccgtatcgcccgcgttgccctggaaagcggccgcggcgtgctggaactggtgcgtgaagagaagctgctggacgacgcgatgctcgacgacatcctgcgtccagaaaacatgatcgccccgcgcctggttccgctgaagtcgtaa

SEQ ID NO: 45229 - protein, 478 aa, Pseudomonas putida GB-1
MIYIMSSAASFRVEKDLLGTLEVPADAYYGIQTLRAANNFHLSGVPLSHYPKLVVALAMVKQAAADANRELGHLSDAKHAAITAACARLIKGDYHDQFVVDMIQGGAGTSTNMNANEVIANVALEAMGHQKGEYQYLHPNNDVNMAQSTNDAYPTAIRLGLLLGHDALLASLDSLIQAFAAKGKEFDHVLKMGRTQLQDAVPMTLGQEFRAFATTMTEDLQRLRSLAPELLTEINLGGTAIGTGINADPGYQALAVQRLAAISGQPLVPAADLIEATSDMGAFVLFSGMLKRTAVKLSKICNDLRLLSSGPRTGINEINLPARQPGSSIMPGKVNPVIPEAVNQVAFAIMGNDLALTVAAEGGQLQLNVMEPLIAYKIFDSIRLLQRAMDMLREHCIVGITANEQRCRELVEHSIGLVTALNPYIGYENATRIARVALESGRGVLELVREEKLLDDAMLDDILRPENMIAPRLVPLKS

SEQ ID NO: 45230 - DNA, 1395 bp, Pseudomonas putida GB-1
  CDS (1)..(1395): transl_table=11
atgagccgtatcgagacagacagcctgggcccggtcgaagttccggaggacgcctactggggtgcgcagacccagcgttcgctgatcaacttcgccattggcaaggaacgcatgcccctcgcggtgctgcacgccctggcactgatcaagaaggccgcggcgcgcgtcaacgaccgcaatggcgacttgccggccgacatcgcccggttgatcgaacaggccgccgatgaagtgctggatggcaagcacgatgaccagttcccgctcgtcgtctggcaaacgggcagcggcacccagagcaacatgaacgtcaacgaggttattgccgggcgcgccaacgagctggccggcaaaggccgtggcggcaaggcgccagtacaccccaacgaccacgtcaaccgctcgcaaagctccaacgactgcttccccacggccatgcacattgctgctgcgcaggcagtgcatgaacagctgctgccagcgatcgccgagctgtcgtcagggctggccgagttgtcggcgcgccacaacaagctggtgaaaaccggccgcacgcacatgatggacgccacaccgatcaccttcggccaggaggtttcggccttcgtcgcgcaactcgactacgcccagcgcgccatccgcgccaccctgccggcggtgtgtgaactggcccagggcggtaccgccgtgggtaccgggctcaacgccccgcatggttttgccgaagccatcgctgccgagttggcggcggagtccgggctgccattcgtcaccgcgcccaacaagtttgccgccctcgctggccacgaaccgctgaccagcctggccggggccctgaagaccctggctgtagccctgatgaaaatcgccaacgacctgcgcctgctgggctctggcccgcgcgcgggactggccgaggtgcgcctgccggccaacgagccgggcagttcgatcatgccgggcaaggtcaacccgacccagtgcgaggcactgtcgatgctggcctgccaggtgctgggcaatgacgcggcgattggttttgccgccagccaggggcatttgcagttgaacgtattcaagccggtaatcattcataacctgctgcaatcggtcgaattgctggccgatggttgccgcaatttccagctgcattgcgtggcgggtatcgaaccggatgcccagcagatggctgcgcacctggaacgcgggttgatgctggtgaccgcgctcaacccgcacattggctatgacaaggcagcggaaattgccaagaaggcttacagcgaaggcaagaccttgagggaggcggcattggagttgaagtatctgaccaatgagcagttcgaccagtgggtgcggccagagaacatgctggccccaggggggcatggctaa

SEQ ID NO: 45231 - protein, 464 aa, Pseudomonas putida GB-1
MSRIETDSLGPVEVPEDAYWGAQTQRSLINFAIGKERMPLAVLHALALIKKAAARVNDRNGDLPADIARLIEQAADEVLDGKHDDQFPLVVWQTGSGTQSNMNVNEVIAGRANELAGKGRGGKAPVHPNDHVNRSQSSNDCFPTAMHIAAAQAVHEQLLPAIAELSSGLAELSARHNKLVKTGRTHMMDATPITFGQEVSAFVAQLDYAQRAIRATLPAVCELAQGGTAVGTGLNAPHGFAEAIAAELAAESGLPFVTAPNKFAALAGHEPLTSLAGALKTLAVALMKIANDLRLLGSGPRAGLAEVRLPANEPGSSIMPGKVNPTQCEALSMLACQVLGNDAAIGFAASQGHLQLNVFKPVIIHNLLQSVELLADGCRNFQLHCVAGIEPDAQQMAAHLERGLMLVTALNPHIGYDKAAEIAKKAYSEGKTLREAALELKYLTNEQFDQWVRPENMLAPGGHG

SEQ ID NO: 45232 - DNA, 1380 bp, Pseudomonas putida GB-1
  CDS (1)..(1380): transl_table=11
atgatgagtgatacccgtatcgagcgtgacagcatgggtgaactgcaggtgcctgcccaggccctgtacggcgcccagacccaacgcgcggtcgacaacttcccgatcagcggccagcgcatgccggcccagttcattcgtgctctgctgctggccaaggcagccgcggccaaggccaacatcgagctggaacaactgtccgccgcgcagggccaagccatcgtcaaggctgtcgagcaactgttggccgaagacttcatccagcatttcccggtcgatgtgttccagaccggctccggcaccagctcgaacatgaacgccaacgaagtgatcgcgaccttggccagccgcgtactgggtgaggcagtcaatgccaatgatcacgtcaactgtggccagagcagcaatgacatcatcccgaccactatccacgtcagtgccgcgctggccctgcacgaacagttgctgccagccttggcgcacctggtacaggtgatcgaggccaagtcggcgcaagtgcatcagtatgtgaaaacgggccgcacccacctgatggacgccatgccggtgcgcatgagccaggtgctggatggctgggcggcacagatcaacggcgccaaggcacacctcgaagccaccttgctgagcctgcaggcgctggcccagggcggcaccgccgtgggtaccggcatcaatgcccacccccggttcgctggcgtgtttgcccgccaactcagtggcctgacccaagtcgagttcaccccagggcaaaacctgtttgccctgatcggttcgcaggataccgccgtggccctgtctggccagctcaagactaccgctgtggcactgatgaaaattgccaacgacctgcgctggatgaactccggcccgctggccggcctgggcgaaatcgagctgcaaggcctgcagcctggctcttcgatcatgccgggcaaggtcaacccggtgatcccggaggccactgccatggtcgccgcccaggtgattggcaacgacgccaccatcgccatcgcggggcagtccggtaacttcgagctgaacgtgatgctgccggtgatcgcccgcaacctgctggaaagcatcgagctgatggccaacgtcagccgcttgctggccgacaaggccatcgccaccttcaaggtcaacgagggcaagctcaaggaagccctggcgcgcaacccgatcctggtcactgcgctgaacccgatcatcggctacctcaaggccgccgaaatcgccaagaccgcgtacaagcaaggtcgcccgatcatcgatgtggcgctggagcacaccgatttgtcgcgtgaccagctcgaagcactgctggacccggaaaaactcaccgccggcggaatctga

SEQ ID NO: 45233 - protein, 459 aa, Pseudomonas putida GB-1
MMSDTRIERDSMGELQVPAQALYGAQTQRAVDNFPISGQRMPAQFIRALLLAKAAAAKANIELEQLSAAQGQAIVKAVEQLLAEDFIQHFPVDVFQTGSGTSSNMNANEVIATLASRVLGEAVNANDHVNCGQSSNDIIPTTIHVSAALALHEQLLPALAHLVQVIEAKSAQVHQYVKTGRTHLMDAMPVRMSQVLDGWAAQINGAKAHLEATLLSLQALAQGGTAVGTGINAHPRFAGVFARQLSGLTQVEFTPGQNLFALIGSQDTAVALSGQLKTTAVALMKIANDLRWMNSGPLAGLGEIELQGLQPGSSIMPGKVNPVIPEATAMVAAQVIGNDATIAIAGQSGNFELNVMLPVIARNLLESIELMANVSRLLADKAIATFKVNEGKLKEALARNPILVTALNPIIGYLKAAEIAKTAYKQGRPIIDVALEHTDLSRDQLEALLDPEKLTAGGI

SEQ ID NO: 45234 - DNA, 1380 bp, Marinobacter sp. ELB17
  CDS (1)..(1380): transl_table=11
atgagcaatgaacgggtagaaagcgacagccttggcgacgtcagggtgccggaaaacgcactttggggagcacaaacccaacgcgccatcgagaacttccccgtcagcgggcaacccatgccgccggcgttcatcgccgccgtggtgcagataaaaaaagccgcggcggaagctaatgccagcctggccttgctcaatggcccggttcgcgatgctattgtgctagcctgtgaccagttgctggccggtgattactatgatcagtttccggtagaccgctaccagaccggctctggcaccagcaccaacatgaatgttaacgaggtgatcgcggcactggccgagctcagtggtgtgatggttcatcccaacgaccacgtgaatatgagccagagttctaacgatgtcatcccgtcggctatccatatcagcgcggtgatagcgattcaccagaatctggtgccggcgctgacccatttacaaggcgttctctacgagcgcgaagccatgtatggcgagcaggtaaaaaccggtagaacccacctgatggacgcaatgccggtgaccctgggccaagagcttcgtacttggcgcgagcaattgaaagcgacacaggcgcgcatcgaacgtgcagcagatgagcttctggcgttgccccagggcggcacggctgtaggcaccgggattaatgccgttagcgagtttgcgcctgagtttacccgctgtctgaaagccaataccggttttggcttcaagccactagcccataagtttgtggcacagagcgcagtggatgcgccggtggcgctgtcggcgcagctgcgtgggcttggcatagtgctgacaaaaatcgccaacgatttgcgctggatgaacagcggccccattcacgggctgtcagaaatcagccttccggtacttcagccaggcagcagcattatgccaggcaaagtgaacccggtgatccccgagtctgtggctatggtaggcgcccagattatgggacttgatgcctctatcgcttacgccgggcagtctggtaatttccagctcaacgtgatgttaccgttggtcggtgccaacctgctggagatgattggcctgttaagcaatgccagcagtctgctgagtgacaaagcactaaaaggctttaccgtcaacgcagagcatctaaacgcaggtgttggccgtaatcccgtgctggtgacggcgttaaaccccgaaattggttacagcctggcgtctgaaattgccaaagaagcctacgccagtggccgcccggtaattgatgtggctgaagagcgcagtggtctcagccgcgagcggcttgagcagcttatggacccgttaaaactgacccgcggcgggttggcagggtag

SEQ ID NO: 45235 - protein, 459 aa, Marinobacter sp. ELB17
MSNERVESDSLGDVRVPENALWGAQTQRAIENFPVSGQPMPPAFIAAVVQIKKAAAEANASLALLNGPVRDAIVLACDQLLAGDYYDQFPVDRYQTGSGTSTNMNVNEVIAALAELSGVMVHPNDHVNMSQSSNDVIPSAIHISAVIAIHQNLVPALTHLQGVLYEREAMYGEQVKTGRTHLMDAMPVTLGQELRTWREQLKATQARIERAADELLALPQGGTAVGTGINAVSEFAPEFTRCLKANTGFGFKPLAHKFVAQSAVDAPVALSAQLRGLGIVLTKIANDLRWMNSGPIHGLSEISLPVLQPGSSIMPGKVNPVIPESVAMVGAQIMGLDASIAYAGQSGNFQLNVMLPLVGANLLEMIGLLSNASSLLSDKALKGFTVNAEHLNAGVGRNPVLVTALNPEIGYSLASEIAKEAYASGRPVIDVAEERSGLSRERLEQLMDPLKLTRGGLAG

SEQ ID NO: 45236 - DNA, 1437 bp, Bacillus cereus
  CDS (1)..(1437): transl_table=11
atggcaacattaactgaagttaaaaatggtgttcgaattgaaaaagattttttaggtgaaaaagaagtaccaaactatgcatactacggtgtacaaacaatgcgtgcagttgaaaacttcccaattacaggatacaaaattcatgaaggtttaattagagcgttcgcagttgtaaaaaaagctgcagcgcttgcgaatacagatgtaggaagattggaattgaacaagggcggcgcaatcgcagaagctgctcaagaaattcttgacgggaaatggcatgatcatttcatcgtagacccaatccaaggcggagcaggtacttcaatgaacatgaatgcaaatgaagtcattgccaatcgtctcttgattattaggaatggaaagggagactatcattatattagtccaaatagtcatgtaaacatggcgcaatccacaaacgatgcattcccaacggcgattcatatcgctacattaaacgcattagaaggtttattacaaacgatgggctatatgcacgatgtatttgaattaaaagcagaacagttcgatcatgtgattaaaatgggtcgtacacatttacaagacgctgttccaattcgtcttggacaagaatttaaagcatactctcgcgtacttgaacgtgatatgaaacgaattcagcagtcacgtcaacacttatatgaagtgaacatgggagcaactgcagttggtacaggcttaaatgcagatccagaatatattcaagctgttgtaaaacatttagctgcaattagtgaactaccacttgttggtgcggaagacttagtagatgcaacgcaaaatacggatgcatatacagaagtatcagcagcactgaaagtatgtatgatgaatatgtctaaaattgccaatgaccttcgcttaatggcatcaggtccacgtgttggtttagcagaaattatgttaccggctcgtcaaccaggttcatctattatgccagggaaagtaaaccctgttatgccagaggtaattaatcaaattgcgttccaagtaattggtaatgaccatacaatttgtcttgcttcagaagcaggtcaattagaattgaacgttatggaaccagtactagttttcaacttacttcaatcaattagcattatgaataacggtttccgtgcctttacagataattgcttaaaaggaattgaagcgaatgaagatcgcttaaaagagtatgttgagaagagtgtaggaattattacagccgtgaaccctcatatcggttatgaagcagcagctcgcgttgcgaaagaagcaatcgcgacagggcaatccgttcgagaactttgtgtgaaaaatggtgtactgtcacaagaagacttagaattaattctagatccattcgaaatgacgcacccagggattgcaggagcaactcttttaaagaaaaattaa

SEQ ID NO: 45237 - protein, 478 aa, Bacillus cereus
MATLTEVKNGVRIEKDFLGEKEVPNYAYYGVQTMRAVENFPITGYKIHEGLIRAFAVVKKAAALANTDVGRLELNKGGAIAEAAQEILDGKWHDHFIVDPIQGGAGTSMNMNANEVIANRLLIIRNGKGDYHYISPNSHVNMAQSTNDAFPTAIHIATLNALEGLLQTMGYMHDVFELKAEQFDHVIKMGRTHLQDAVPIRLGQEFKAYSRVLERDMKRIQQSRQHLYEVNMGATAVGTGLNADPEYIQAVVKHLAAISELPLVGAEDLVDATQNTDAYTEVSAALKVCMMNMSKIANDLRLMASGPRVGLAEIMLPARQPGSSIMPGKVNPVMPEVINQIAFQVIGNDHTICLASEAGQLELNVMEPVLVFNLLQSISIMNNGFRAFTDNCLKGIEANEDRLKEYVEKSVGIITAVNPHIGYEAAARVAKEAIATGQSVRELCVKNGVLSQEDLELILDPFEMTHPGIAGATLLKKN

SEQ ID NO: 45238 - DNA, 1416 bp, Wolinella succinogenes
  CDS (1)..(1416): transl_table=11
atggcatctacacgaatagaacacgatcttattggggacttagaggtaagtaacgactgctattatggagttcaaactgctagagcgaaagagaacttccacatctcaggcgtcctactctcaagcatgcccactttcattgcttcactcgctaaagtcaaaaaagccgctgcactcgccaactttgagcttgggctcttggatgagaagatcaaaaacgccatctgcgaagcgtgcgatctcatcatcgctggaaaatatcacgaccaattcgtcgtggatgccatccaaggaggcgctggaacttccaccaacatgaacgccaatgaagtgatcgccaacgtcgcacttgagctcatgggacataaaaagggtgaatataaacattgccaccccaacaaccacgtcaacctctcacaatctactaatgatgcctatcctacggcattccgcgttgccctgtatgaaaaactcatcgagctcaccgtctccatgggaatcctaagagactcttttgccaaaaaggccgaggaattcaaagatatcatcaagatgggtcgaacccagctccaagacgctgtgcccatgaccctaggtcaagagtttaaaacctacgccgtcatgatgaccgaagatatcgatcgcgtgctagaggctagaaaccttgttcgagagatgaaccttggggcaaccgcgattggaacaggaatcaactctcaccctgactacgctacgcttgtagagaaaaaacttcaagaggtcacaggccgaccctttatcaccgccagcgatcttgttgaggcgactcaagacacaggggcttatgtccaaatctctggtgttcttaagcgtgtctccaccaaagtctccaaaatctgcaacgatctaagactccttagctcaggcccaagagcgggacttagcgagatcaatcttccccctatgcagcctggtagctccattatgcctggaaaggttaatcctgtgattcccgaagtggtcaatcaggtctgctaccacgttattggcgccgacatgactgtaactattgcctctgaagggggtcagcttcagctcaacgtttttgagcccgtcatcgcctttagcctctttagctctatcaacatgatgagaagagcttttgaaactttggctgaaaaatgcgtgaatggaatcaccgccaacgctgacaactgccgcgactatgtccttaagagcatcggactcgtcacagcgctcaacccctacatcggatatgagaactccacttcagtggccaaagaggcgctagagtcaggcaagtccgtccacgatatcgtcctagagcgcaaacttcttagcaaagaagagctagaagagattattcgacccgaaaacatgatcaagcccaaagtcgtcactctaacaaaaaaataa

SEQ ID NO: 45239 - protein, 471 aa, Wolinella succinogenes
MASTRIEHDLIGDLEVSNDCYYGVQTARAKENFHISGVLLSSMPTFIASLAKVKKAAALANFELGLLDEKIKNAICEACDLIIAGKYHDQFVVDAIQGGAGTSTNMNANEVIANVALELMGHKKGEYKHCHPNNHVNLSQSTNDAYPTAFRVALYEKLIELTVSMGILRDSFAKKAEEFKDIIKMGRTQLQDAVPMTLGQEFKTYAVMMTEDIDRVLEARNLVREMNLGATAIGTGINSHPDYATLVEKKLQEVTGRPFITASDLVEATQDTGAYVQISGVLKRVSTKVSKICNDLRLLSSGPRAGLSEINLPPMQPGSSIMPGKVNPVIPEVVNQVCYHVIGADMTVTIASEGGQLQLNVFEPVIAFSLFSSINMMRRAFETLAEKCVNGITANADNCRDYVLKSIGLVTALNPYIGYENSTSVAKEALESGKSVHDIVLERKLLSKEELEEIIRPENMIKPKVVTLTKK

SEQ ID NO: 45240 - DNA, 1650 bp, Aspergillus oryzae
  CDS (1)..(1650)
atgttggcaccctcgaactcccgagccgcggtgcggtcgatggcttctttggcgcatgcagcatcgagagcgtctgccagttcccccgcagtcgcacgctctgctttagcttgtgctgcccggtcccccgcttctctcggttgccgtcgcgctctgagcaccaatagccgacaactccagttcccccgccttcagtccttgaacaccatctccagcaagagaacttttggtacaaccgcaagaatggcttcggaaactcgcgttgaaactgacgcctttggcgagattgaggtccctgccgacaagtactggggtgcccagacccagcgttccctgggtaactttgacatcaaccagcctcaggaccgtatgcctgagggtgttgtcaaggctttcggtatcctgaagggtgctgctgctaccgtgaacatgaagtttggccttgaccccaagattggtgaggctattcagaaggctgccgccgaggttgccgagggcaagctcatggaccacttccctcttgtcgtttggcagactggttccggcacccagtccaacatgaactccaacgaggtcatctcgaaccgtgccatcgagatcttgggtggcaagatgggatctaagaagcctgtgcaccccaacgaccacgtcaacatgtctgcttcctccaacgactctttccctactgctatgcacatcgctgctgttttggagctcgagggaactttgctgccttccctcaagagccttcgcgatgctctccaggtgaaggtggagaactttgagaagatcatcaagatcggtcgtacccatctgcaggatgctactcctcttactcttggtcaggagttctccggctacgttgcccagcttgatcgcaacattgagcgcgttcagaactctcttccccacctccgctatcttgctcagggtggaactgctgtcggtactggtctgaacaccttcaagggctttgatgaggccattgccgccgaggtcaccaagatgactggcaccgaattcaagaccgcccccaacaagttcgaggttctcgctgctcacgatgcgatcgtcgaggcctctggttcccttaacacccttgcttgctctctcttcaagatcgcccaggatatccgttacctcggttctggacctcgttgcggtctgggcgagctgatcctccccgagaacgagcccggctcctctatcatgcctggaaaggtcaaccccactcagtgcgagtcccttaccatgatctgctcccaggttatgggtaaccacgtcgctgctaccgttggtggtatgaacggtcagttcgagcttaacgtgttcaagcccgtcatgatccgcaaccttctgcacagctcgcgcattctttcggatggcatgaagagcttcgagaagaacctggtgcacggtctcgaggccaacgagcccagaatcaactccctgctccacgagagtctgatgctcgtcacctgcttgaaccccgttatcggttacgacatggcgtccaaggtcgctaagaacgcccacaagaagggtctcactctgaagcagagtgctatggagctgcaggcccttagcgaggaggacttcgacacccatgtccgccctgagctgatgcttgctcctaaggagaagaaatag

SEQ ID NO: 45241 - protein, 549 aa, Aspergillus oryzae
MLAPSNSRAAVRSMASLAHAASRASASSPAVARSALACAARSPASLGCRRALSTNSRQLQFPRLQSLNTISSKRTFGTTARMASETRVETDAFGEIEVPADKYWGAQTQRSLGNFDINQPQDRMPEGVVKAFGILKGAAATVNMKFGLDPKIGEAIQKAAAEVAEGKLMDHFPLVVWQTGSGTQSNMNSNEVISNRAIEILGGKMGSKKPVHPNDHVNMSASSNDSFPTAMHIAAVLELEGTLLPSLKSLRDALQVKVENFEKIIKIGRTHLQDATPLTLGQEFSGYVAQLDRNIERVQNSLPHLRYLAQGGTAVGTGLNTFKGFDEAIAAEVTKMTGTEFKTAPNKFEVLAAHDAIVEASGSLNTLACSLFKIAQDIRYLGSGPRCGLGELILPENEPGSSIMPGKVNPTQCESLTMICSQVMGNHVAATVGGMNGQFELNVFKPVMIRNLLHSSRILSDGMKSFEKNLVHGLEANEPRINSLLHESLMLVTCLNPVIGYDMASKVAKNAHKKGLTLKQSAMELQALSEEDFDTHVRPELMLAPKEKK

SEQ ID NO: 45242 - DNA, 1865 bp, Solanum tuberosum
  CDS (66)..(1547)
ctcagactcagcatcaacattcccaccaactcgcatacaggcggcggcgcattgactgctgagatatggcgatgttaaatgcggctcgtcgattatcagctggatcagctttatcagattcactgcgttatacttcttcctggaggtttttctctacgtctttcagggaggaaagagatacgtttggtcctattctcgttccatcggacaagttatggggggctcaaactcaaagatcattgcagaattttgaaattgggggtgatcgtgaaagaatgcctgagccaatcatacgtgcattcggtattattaaaaagtgtgcagccaaggtgaacatggactatggccttgaccaatctattggaaaagcaataatgcaagcagctgaagaggttgcagaaggaaaattaaatgaccattttcctttggtggtttggcagactggcagtggcactcaaagtaacatgaatgctaacgaggttattgcaaatcgagcagctgaaatacttggccataaccgcggagacaaacatgtgcatccaaatgaccatgtaaataaatcgcaatcttcaaatgatactttctctacggtgatgcacattgctgcagcaatggagctaaataaaagattagtaccaaaccttgaaacagttgcatactcactaaattcaaagtcagtcgaattcaaggacattatcaagattgggcgaacccacacacaagatgcaacacctttgactcttggacaagagtttagtggctatgcaactcaagtgaaatatggaatcgatagagtcttatgcacgcttcagcgcatgtatcagctcgcacaagggggcacagcagtagggacaggattgaatacaaagaaagggtttgacataaaaattgctgcagcagttgcagaggaaacaaatttcccatttgttacagctgaaaacaagtttgaagcattggctgctcatgatgcatttgctgaaactagtggagccttaaataccctggctgcttcccttatgaagattgggaatgatatacgcttcttgggaagtggtccccgctgtggtcttggcgagctcagtcttcctgaaaatgaacccggaagcagtataatgcctggcaaggtaaatcctactcagtgtgaggctctcaccatggtctgtgctcaggttatggggaatcatgtggctgttactgttggtgcatcaaatggccattttgagctgaatgtcttcaagccgatgattgctaatgctctcctacattcagtaagattgctaggcgatgcatctgcttcctttgaaaagaattgtgtgagggatatccaagctaacagagacagaattgctaaattgttgcacgagtcactcatgctcgttacatgtttgaacccaaaaattggttatgataatgctgctgcagttgccaagaaagcccacaaggagggaaccagtttgaaggaagctgctctcaatctaggagtcctcaccagtgaagagtttgatcaacttgtagtccctgagaaaatgattggtccaactgactgatctgattcattagctcttcgaaatgagaaagaggaccatggctagcttcttctgtccatcagattcgaacgagggaaataaacatttgacacaattcttgaggttttcttattcctggtaatttatcagtgttttttactgtgagaatgcctccatttttttttttgtaatgagtccctggagcgatagccaagtaaataatgaactgaattagtattttttatgaggttgggccatgaataatgagggagaaaatcatcttttatgaaatggagacggggaaatgatcaaaatggtcttatgtatgggttttgattc

SEQ ID NO: 45243 - protein, 493 aa, Solanum tuberosum
MAMLNAARRLSAGSALSDSLRYTSSWRFFSTSFREERDTFGPILVPSDKLWGAQTQRSLQNFEIGGDRERMPEPIIRAFGIIKKCAAKVNMDYGLDQSIGKAIMQAAEEVAEGKLNDHFPLVVWQTGSGTQSNMNANEVIANRAAEILGHNRGDKHVHPNDHVNKSQSSNDTFSTVMHIAAAMELNKRLVPNLETVAYSLNSKSVEFKDIIKIGRTHTQDATPLTLGQEFSGYATQVKYGIDRVLCTLQRMYQLAQGGTAVGTGLNTKKGFDIKIAAAVAEETNFPFVTAENKFEALAAHDAFAETSGALNTLAASLMKIGNDIRFLGSGPRCGLGELSLPENEPGSSIMPGKVNPTQCEALTMVCAQVMGNHVAVTVGASNGHFELNVFKPMIANALLHSVRLLGDASASFEKNCVRDIQANRDRIAKLLHESLMLVTCLNPKIGYDNAAAVAKKAHKEGTSLKEAALNLGVLTSEEFDQLVVPEKMIGPTD

SEQ ID NO: 45244 - DNA, 1434 bp, Escherichia coli
  CDS (1)..(1434): transl_table=11
atgtcaaacaacattcgtatcgaagaagatcggttgggtaccagggaagttggagctgatgcctactatggtgttcacactctgagagcgattgaaaacttctatatcagcaacaacaaaatcagtgatattcctgaatttgttcgcggtatggtaatggttaaaaaagccgcagctatggcaaacaaagagctgcaaaccaatcctaaaagtgtagcgaatgccatcattcccgcatgtgatgaagacctgaacaacggaaaatgcatggatcagttcccggtagacgtctaccagggcggcgcacgtacttccgtaaacatgaacaccaacgaagtgctggccaatatcggtctggaactgatgggacaccagaaagctgaatatcagtacctgaacccgaacgaccatgttaacaaatgtcagtccactaacgacgcccacccgaccggtttccgtatcgcagtttactcttctatgattaagctggtagatgcgattaaccaactgcgtgaaggctttgaacgtaaagctgtcgaattgcaggacatcctgaaaatgggtcgtacccagccgcaggacgcagtaccgatgaccctgggtcaggaattccgcactttcagcatcctgctgaaagaagaagtgaaaaacatccaacgtaccgctgaactgctgctggaagttaaccttggcgcaacagcaatcggtactggtcccaacacgccgaaagagtaccgtccgctggcagtgaaaaaactggctgaagtcactggcttcccatgcgtaccggctgaacacctgatcgaagcgacctctgactgcggcgcttatgttatggttcacggcgcgctgaaacgcctggctgtgaagatgtccaaaatctgtaacgacctgcgcttgctctcttctggcccacgtgccggcctgaacgagatcaacctgccggaactgcaggcgggctcttccatcatgccagctaaagtaaacccggttgttccggaagtggttaaccaggtatgcaacaaagtcatcggtaacgacaccactgttaccatggcagcagaagcaggtcagctgcagttgaacgttatggagccggtcactggccaggctatgttcgaatccgttcacattctgaccaacgcttgctacaacctgctggtaaaatgcattaacggcatcactgctaacaaagaagtgtgcgaaggttacgtttacaacactatcggtatcgttacttacctgaacccgttcatcggtcaccacaacggtgacatcgcgggtaaaatctgtgccgaaaccggtaagagtgtacgtgaagtcctggaacgcggtctgttgtatgaagcggaacttgacgatattttctccgtacagaatctgatgcacccggcttacaaagctaaacgctatactgatgaaagcgaacagtaa

SEQ ID NO: 45245 - protein, 477 aa, Escherichia coli
MSNNIRIEEDRLGTREVGADAYYGVHTLRAIENFYISNNKISDIPEFVRGMVMVKKAAAMANKELQTNPKSVANAIIPACDEDLNNGKCMDQFPVDVYQGGARTSVNMNTNEVLANIGLELMGHQKAEYQYLNPNDHVNKCQSTNDAHPTGFRIAVYSSMIKLVDAINQLREGFERKAVELQDILKMGRTQPQDAVPMTLGQEFRTFSILLKEEVKNIQRTAELLLEVNLGATAIGTGPNTPKEYRPLAVKKLAEVTGFPCVPAEHLIEATSDCGAYVMVHGALKRLAVKMSKICNDLRLLSSGPRAGLNEINLPELQAGSSIMPAKVNPVVPEVVNQVCNKVIGNDTTVTMAAEAGQLQLNVMEPVTGQAMFESVHILTNACYNLLVKCINGITANKEVCEGYVYNTIGIVTYLNPFIGHHNGDIAGKICAETGKSVREVLERGLLYEAELDDIFSVQNLMHPAYKAKRYTDESEQ

SEQ ID NO: 45246 - DNA, 1389 bp, Neisseria meningitidis
  CDS (1)..(1389): transl_table=11
atgagcacccgcaccgaacacgacaccatgggcaatgtcgaagtcccgtccgaagcctattggggcgcgcagacccagcgcagccgcaacaatttcaaaatcggcggcgaaaccctgccgcagccgctgatttatgctttggcgctggtgaaaaaagccgctgccgcgaccaatgtttccctcggcaggattaagccggaacaggcggatttgattacgcaggcggcggatgatgtgttgaacggcaggcttgacggacagtttcctttagtggtttggcagaccggctccggcacgcagtccaatatgaacatgaacgaagtgctggcgaaccgcgccaacgaaatcgccggtacgggtttggcggcgtatcagcccgtccatcccaacgaccatgtgaaccacgcgcaatcgaccaacgacgcattcccgaccgccatccacgttgccgccgcgattgaaatcaaccgccacctcatccccgccgtaaaagccctgcgcgacaccttggacaaaaaagcccaagccttcgcccccatcgtcaaaatcggccgcacccacttgcaggacgcgacgccgctgactttaggccaagaattttccggctacgtttcccagctcgaccacggcttaggccgtctgaatgacgcgcttaaagacttgtatgaacttgctttgggcggtacggcggtcggcacgggtttgaacagccatcccgaatacgccgaaaaagccgccgccaaactcgccgaattgtccggcttgccgtttgtcagcgcgccgaacaaatttgaagccttgggcggacgcgatgccgccgttgccgcttcgggcgcattgaaaacgctggcggcaagcctgaataaaatcgccaacgacatccgctggctggcaagcggcccgcgctgcggtttgggcgaaatcaaaatccccgaaaacgagccgggttcgtccatcatgccgggcaaagtcaacccgacccaatgcgaagcgatgaccatggtgtgctgccaagtgttcggcaacgacgttaccatcggcatggcgggcgcgtcgggcaatttcgagctgaacgtctatatgcccgttatcgcctacaacctcttgcaatccatccgcctgttgggcgacgcgtgcaacagcttcaacgaacactgcgccgtcggcatcgaacccgtaccggaaaaaatcgactatttcctgcaccattccctgatgctggttactgcgttaaaccgtaaaatcggctacgaaaacgccgccaaagtcgccaaaaccgcctacaaaaacaacaaatcgttgcgcgaaaccgccgttgagttgggcttgctgacgggcgaagaatttgacgaactggtcgttcctgccgatatggttcatccgcgctaa

SEQ ID NO: 45247 - protein, 462 aa, Neisseria meningitidis
MSTRTEHDTMGNVEVPSEAYWGAQTQRSRNNFKIGGETLPQPLIYALALVKKAAAATNVSLGRIKPEQADLITQAADDVLNGRLDGQFPLVVWQTGSGTQSNMNMNEVLANRANEIAGTGLAAYQPVHPNDHVNHAQSTNDAFPTAIHVAAAIEINRHLIPAVKALRDTLDKKAQAFAPIVKIGRTHLQDATPLTLGQEFSGYVSQLDHGLGRLNDALKDLYELALGGTAVGTGLNSHPEYAEKAAAKLAELSGLPFVSAPNKFEALGGRDAAVAASGALKTLAASLNKIANDIRWLASGPRCGLGEIKIPENEPGSSIMPGKVNPTQCEAMTMVCCQVFGNDVTIGMAGASGNFELNVYMPVIAYNLLQSIRLLGDACNSFNEHCAVGIEPVPEKIDYFLHHSLMLVTALNRKIGYENAAKVAKTAYKNNKSLRETAVELGLLTGEEFDELVVPADMVHPR

SEQ ID NO: 45248 - DNA, 1395 bp, Eikenella corrodens
  CDS (1)..(1395): transl_table=11
atgacaacccgaaccgaacacgacttcttcggcgaacgcgaaatccccgcaaccgcttattggggtatccacaccctgcgcgcagtggaaaacttccaaatctccgggcagaagatttccgacgtaccccagtttgtgcgcagcatggtgatggtgaaaaaagccgctgcccaggccaacggcgagctgggcgcactcaagcccgaaatcgccgccgccattgcccaagcttgcgacgaggtgctgctcaaaggccgttgcctcgaccagttcccatccgacgtattccaaggcggcgccggcacttcggtgaacatgaacaccaacgaagtgatcgccaacctcgccttggaagccttaggccaagccaaaggccgctacgacatcgtcaatcccatggatcatgtgaacgccagccaatttaccaacgacgcttaccctaccggcttccggctggctgtatacaccagcatcggcgaactgctagacaaactggcatacctgaaaaacacctttgctgccaaagctgatgaattcaaagacatattaaaaatgggccgcacccagctgcaagatgccgtgcccatgactgccggccaagaattccaatccttccaagtgctgctggcagaagaggaaaccaacctcgaacgcacccgccaactgctgctggaagtgaacctcggcgccacagccatcggcacaggcatcaatacgccgcaaggctacgcgccgctggccgtacaaaaactctccgaaatcagcggcctgccctgcaagctcaccgaaaacctgattgaagccacttccgactgcggtgcctatgtgatggtgcacggcgccctcaagcgcaccgccgtgaagctctccaaaatctgcaacgacctgcgcctactctcctccggcccgcgtgccggcctgaaagaaatcaacctgccggaaatgcaggccggctcatcgattatgcccgccaaggtgaatcccgtgattcccgaagtggtgaaccaagtttgtttcaaagtaatcggcaacgacaccaccatcaccttcgccgccgaagccggccagctccatcaacgtgatggagccggttatccgcaatccatgtttgaaagcatctcgcttttaggcaacgccgccattacgttggccgacaaatgcgtgcgcggcatcacggtaaaccgcgaaatctgcgaacgctacgtcttcaactccatcggcctggtaacctatctcaacccctatatcggccacgaaaacggcgacctggtgggcaaaatctgcgctcaaaccggcaaaaccgtgcgcgaagtggtactggagcgccagctcttgagcgaagcggagctcgaccgtatcctgtcgccacaaaacttggccaatccgcatttgtaa

SEQ ID NO: 45249 - protein, 464 aa, Eikenella corrodens
MTTRTEHDFFGEREIPATAYWGIHTLRAVENFQISGQKISDVPQFVRSMVMVKKAAAQANGELGALKPEIAAAIAQACDEVLLKGRCLDQFPSDVFQGGAGTSVNMNTNEVIANLALEALGQAKGRYDIVNPMDHVNASQFTNDAYPTGFRLAVYTSIGELLDKLAYLKNTFAAKADEFKDILKMGRTQLQDAVPMTAGQEFQSFQVLLAEEETNLERTRQLLLEVNLGATAIGTGINTPQGYAPLAVQKLSEISGLPCKLTENLIEATSDCGAYVMVHGALKRTAVKLSKICNDLRLLSSGPRAGLKEINLPEMQAGSSIMPAKVNPVIPEVVNQVCFKVIGNDTTITFAAEAGQLHQRDGAGYPQSMFESISLLGNAAITLADKCVRGITVNREICERYVFNSIGLVTYLNPYIGHENGDLVGKICAQTGKTVREVVLERQLLSEAELDRILSPQNLANPHL

SEQ ID NO: 45250 - DNA, 1380 bp, Pseudomonas putida
  CDS (1)..(1380): transl_table=11
atgatgagtgatacccgtatcgagcgtgacagcatgggcgaactgcaggtgccggcccaggccctgtacggtgcccagactcagcgcgcggtcgacaacttcccggtcagcggccagcgcatgccggcccagttcattcgcgcgctgttgctggccaaggcggctgccgccaaggccaacgtcgagctggagcaattgtctgccgcgcagggcaatgccatcgtcaaggcggtcgagcaactgctggccgaggacttcatccagcacttcccggtggatgtgttccagaccggctccggcaccagctcgaacatgaacgccaacgaggtgatcgccaccctggccagccgtgtactgggtgatgcggtcaacgccaacgaccacgtcaactgtggccagagcagcaacgacatcatcccgaccaccattcacgtcagtgctgcactggccctgcacgaacaactgcttccggccctgagccacctggtgcaggtgatcgagaccaagtcggtgcaggtgcatcagtacgtgaaaaccggccgtacccacttgatggacgccatgccggtgcgcatgagccaggtgctggatggctgggccgcgcagatcaacgctgccaaggcgcacatcgaggcgaccctgccgagcttgcaggcgctggcccagggtggcacggccgtgggtaccggcatcaacgcccacccacagttcgcggccggtttcgcccgccagctcagcggcctgacccaggtcgagttcaccccgggccagaacctgtttgccctgatcggctcgcaagacactgccgtggcgctgtctggccagctcaagaccactgctgtggcgctgatgaagatcgccaacgacctgcgctggatgaactccggcccgctcgccggcctgggcgaaattgagctgcaaggcctgcaaccgggctcttcgatcatgcctggcaaggtcaacccggtgattcctgaggccaccgccatggttgctgcccaggtgatcggcaacgacgccaccatcgctgtcgctggccagtccggcaacttcgagctgaacgtgatgctgccggtgatcgcccgcaacctgctggaaagcatcgagctgatggccaacgtcagccgtctgctggccgacaaggccatcgccacgttcagggtcaacgagggcaagctcaaggaagccctggcgcgcaacccgattctggtcactgcgctgaacccgatcatcggctacctcaaggccgccgaaatcgccaagaccgcctacaagcagggccgcccgatcatcgacgtggcgctggagcacaccgacctgtcgcgggaccagctggaagcactgctggacccggaaaaactcaccgctggcggtatctga

SEQ ID NO: 45251 - protein, 459 aa, Pseudomonas putida
MMSDTRIERDSMGELQVPAQALYGAQTQRAVDNFPVSGQRMPAQFIRALLLAKAAAAKANVELEQLSAAQGNAIVKAVEQLLAEDFIQHFPVDVFQTGSGTSSNMNANEVIATLASRVLGDAVNANDHVNCGQSSNDIIPTTIHVSAALALHEQLLPALSHLVQVIETKSVQVHQYVKTGRTHLMDAMPVRMSQVLDGWAAQINAAKAHIEATLPSLQALAQGGTAVGTGINAHPQFAAGFARQLSGLTQVEFTPGQNLFALIGSQDTAVALSGQLKTTAVALMKIANDLRWMNSGPLAGLGEIELQGLQPGSSIMPGKVNPVIPEATAMVAAQVIGNDATIAVAGQSGNFELNVMLPVIARNLLESIELMANVSRLLADKAIATFRVNEGKLKEALARNPILVTALNPIIGYLKAAEIAKTAYKQGRPIIDVALEHTDLSRDQLEALLDPEKLTAGGI

SEQ ID NO: 45252 - DNA, 1428 bp, Bacillus subtilis
  CDS (1)..(1428): transl_table=11
atgttaaacggccaaaaagaatatcgcgtggaaaaagacttccttggggaaaaacaaattgaagcagatgtttattacggaattcagacgctccgtgcttctgaaaattttccgatcacaggatacaaaatccatgaggaaatgattaacgcactggcgattgtgaaaaaagctgcggctcttgccaacatggacgtgaaacggctgtatgaaggaattggccaagctatcgtacaagccgctgacgagattctggaaggcaagtggcacgatcagtttatcgtcgatccgattcagggcggtgccggaacttctatgaacatgaacgcgaatgaggttatcggaaaccgggcgcttgaaatcatgggacataaaaagggagattatatccatttaagtccaaacacacatgtgaacatgtcacagtctcagaacgatgtgttcccgactgctatccatatttccacattgaagctcttagaaaaactgctgaaaacaatggaagatatgcatagtgtgtttaaacaaaaagcacaggagtttcactctgttattaaaatgggccggacacaccttcaagatgcggttccgatccgtcttggccaggaattcgaagcttacagccgtgttctcgagcgtgatatcaaacgaatcaagcaatcgcgccagcacctgtatgaagtcaacatgggcgcaactgctgttggtacagggctgaacgctgatcctgaatatatcaaacaggtagtaaagcaccttgctgatattagcgggcttcctcttgtcggcgctgatcatcttgttgatgcgacacaaaatacagatgcctatacagaggtatcagcttcattaaaagtctgcatgatgaacatgtcgaagatcgcaaacgacctgcgcttaatggcgtcgggaccgcgcgccggacttgcggaaatttctctgcctgcacgtcagccgggttcatctattatgccggggaaagtcaatccggttatggcggagctgatcaaccaaattgcgttccaggttatcggaaatgacaatacaatctgccttgcttcagaagccggccagcttgagttgaacgtcatggagcccgtgcttgtctttaatttgcttcaatccatcagcatcatgaacaacggcttccgttcgttcactgacaactgcttaaaaggcattgaagccaacgaaaagcgtatgaagcaatacgtagaaaaaagcgcaggcgtgatcacagctgtcaatccgcatcttgggtatgaagcggcagctagaattgccagggaagcaattatgacagggcaatctgtccgggatctttgtctgcagcatgatgtgctgactgaagaagaattggatattattttaaacccatatgagatgaccaaaccaggtatcgcagggaaagaactattagaaaaataa

SEQ ID NO: 45253 - protein, 475 aa, Bacillus subtilis
MLNGQKEYRVEKDFLGEKQIEADVYYGIQTLRASENFPITGYKIHEEMINALAIVKKAAALANMDVKRLYEGIGQAIVQAADEILEGKWHDQFIVDPIQGGAGTSMNMNANEVIGNRALEIMGHKKGDYIHLSPNTHVNMSQSQNDVFPTAIHISTLKLLEKLLKTMEDMHSVFKQKAQEFHSVIKMGRTHLQDAVPIRLGQEFEAYSRVLERDIKRIKQSRQHLYEVNMGATAVGTGLNADPEYIKQVVKHLADISGLPLVGADHLVDATQNTDAYTEVSASLKVCMMNMSKIANDLRLMASGPRAGLAEISLPARQPGSSIMPGKVNPVMAELINQIAFQVIGNDNTICLASEAGQLELNVMEPVLVFNLLQSISIMNNGFRSFTDNCLKGIEANEKRMKQYVEKSAGVITAVNPHLGYEAAARIAREAIMTGQSVRDLCLQHDVLTEEELDIILNPYEMTKPGIAGKELLEK

SEQ ID NO: 45254 - DNA, 1407 bp, Helicobacter pylori
  CDS (1)..(1407): transl_table=11
atgcgtattgagcatgatttcattgggcaaatggaaattagcgacgaggtttattacgggattcaaactttaagagcgagtgaaaattttttcatcaccaacgacaagctttgcagttatcctgtttttatcaaatctttcgctcaagtcaaaaaagcggctactttagcgaacgtgcaattaggcttgattgatgaaaagcttaaaattgcgatttgccatgcgtgcgatttgctcattgatggcaaataccatgatcaattcattgtggatatgattcaagggggggctggcacaagcacgaacatgaacatgaacgaagtgattgctaatttggctttagaatacatggggcatcaaaagggcgagtatcaattttgccacccaaacgaccatgtcaaccgctctcaatccactaatgacgcctatcctagtgcgttaaaaatcgctatttatgagcgcttgagcaatctagtcgcccccatgaaagccttaagggatgctttcgctcaaaaggctaaggaattcgctcatgtgattaaaatggggcgcacccagcttcaagacgctgtgcctatgactttaggccaagagtttgaaacttatgccttgatggttgatagggatattgagcaggttttagacgctaggaattgggtaagagagcttaatttaggcggcacggctattggcacagggatcaattcgcacccggattatcgcagtttgattgaaaagaaaatccaagaagtaacgggccgcccctttgtcatggctaataacttgattgaagccactcaaagcacgggggcgtatgtgcaagtgagcggggtgttaaagcgtattgcggtgaaactttctaaggtttgtaacgatctcaggctactcagttcaggccctagagccgggttgaatgaaatcaatttgcctaaaatgcagccgggtagttctatcatgcccggtaaagtcaatccggtgatccctgaagtggtcaatcaggtgtgctttgcggtgattgggaatgatttgagcgtggcgttagccgcagaaggcgggcagttgcaactcaatgtgtttgagccggtgatcgcttacaagctattccattcctttgtgattttagggcgtgcgattgaaactttaacgactaaatgtgtggaaggcatcacggctaatgaaaagatttgccacgattatgtctttaacagcattggcattgttaccgcgctaaaccctcatatcggctatgaaaaatccgctatgatcgctaaagaagccttaaaaagcgatcgctctatttatgacatcgctttagaaaagaaaatcttaactaaagagcaactggacgatattttcaagccagaaaacatgctaagccctcacgctttcaaaaagcataaagactga

SEQ ID NO: 45255 - protein, 468 aa, Helicobacter pylori
MRIEHDFIGQMEISDEVYYGIQTLRASENFFITNDKLCSYPVFIKSFAQVKKAATLANVQLGLIDEKLKIAICHACDLLIDGKYHDQFIVDMIQGGAGTSTNMNMNEVIANLALEYMGHQKGEYQFCHPNDHVNRSQSTNDAYPSALKIAIYERLSNLVAPMKALRDAFAQKAKEFAHVIKMGRTQLQDAVPMTLGQEFETYALMVDRDIEQVLDARNWVRELNLGGTAIGTGINSHPDYRSLIEKKIQEVTGRPFVMANNLIEATQSTGAYVQVSGVLKRIAVKLSKVCNDLRLLSSGPRAGLNEINLPKMQPGSSIMPGKVNPVIPEVVNQVCFAVIGNDLSVALAAEGGQLQLNVFEPVIAYKLFHSFVILGRAIETLTTKCVEGITANEKICHDYVFNSIGIVTALNPHIGYEKSAMIAKEALKSDRSIYDIALEKKILTKEQLDDIFKPENMLSPHAFKKHKD

SEQ ID NO: 45256 - DNA, 1425 bp, Pseudomonas aeruginosa
  CDS (1)..(1425): transl_table=11
atgtcccccgttgcatcttcccgtatcgagaaagacctgctcggcaccctcgaagtgcccgctgacgcctactacggcatccagaccctgcgcgccgtgaacaacttccgcctctccggggtgccgctgtcgcactacccgaagctggtcgttgccctggccatggtcaagcaggccgccgccgacgccaaccgtcagctcggccatctcccggaagacaagcacgccgccatcagcgaggcctgcgcccgcctgatccgcggcgatttccacgagcagttcgtggtggacatgatccagggcggcgccggcacctccaccaacatgaacgcgaacgaagtgatcgcgaacatcgcgctggaagccatgggccacaccaagggtgagtacaagtacctgcacccgaacaacgatgtgaacatggcgcagtcgaccaacgacgcctacccaaccgccatccgcctgggcctgctgctcggccacgacaccctgctggccagcctcgacagcctgatccaggccttcgccgccaagggcgtcgaattcgccggcgtactgaagatgggccgcacccagttgcaggacgccgtgccgatgaccctcggccaggaattccacgctttcgccaccaccctcggcgaagacctcgaccgcctgcgtcgcctggcgccggagctgctcaccgaagtgaacctcggtggcaccgccatcggcaccggcatcaacgccgaccccggctaccagaagctcgccgtcgagcgcctggccgccatcagcgggcagccgctgaagccggccgccgacctgatcgaagccacctccgacatgggcgccttcgtgctgttctccggcatgctcaagcgcaccgcggtcaagctgtcgaagatctgcaacgacctgcgcctgctctccagcggcccgcgcaccggcatcaacgagatcaacctgccgccgcgccagccgggcagttcgatcatgccgggcaaggtcaacccggtgatcccggaagcggtcaaccaggtcgccttcgaagtgatcggcaacgacctcgccctgaccctggcggccgaaggcggccagttgcaactgaacgtgatggagccgctgatcgcctacaagatcttcgactcgatccgcctgctgcaacgcgccatggacatgctccgcgagcactgcatcaccggcatcaccgccaacgtcgagcgctgccacgaactggtcgagcacagcatcggtctggtcaccgcgctgaacccgtacatcggctacgagaactccacgcggatcgccaagaccgccctggagagcggccgcggcgtcctggaactggtacgcgaggaaaagctgctggacgaagccaccctggccgacatcctgctgccggaaaacatgatcgcgccgcgcctgattccgctgcgcgcctga

SEQ ID NO: 45257 - protein, 474 aa, Pseudomonas aeruginosa
MSPVASSRIEKDLLGTLEVPADAYYGIQTLRAVNNFRLSGVPLSHYPKLVVALAMVKQAAADANRQLGHLPEDKHAAISEACARLIRGDFHEQFVVDMIQGGAGTSTNMNANEVIANIALEAMGHTKGEYKYLHPNNDVNMAQSTNDAYPTAIRLGLLLGHDTLLASLDSLIQAFAAKGVEFAGVLKMGRTQLQDAVPMTLGQEFHAFATTLGEDLDRLRRLAPELLTEVNLGGTAIGTGINADPGYQKLAVERLAAISGQPLKPAADLIEATSDMGAFVLFSGMLKRTAVKLSKICNDLRLLSSGPRTGINEINLPPRQPGSSIMPGKVNPVIPEAVNQVAFEVIGNDLALTLAAEGGQLQLNVMEPLIAYKIFDSIRLLQRAMDMLREHCITGITANVERCHELVEHSIGLVTALNPYIGYENSTRIAKTALESGRGVLELVREEKLLDEATLADILLPENMIAPRLIPLRA

SEQ ID NO: 45258 - DNA, 2066 bp, Pseudomonas fluorescens
  CDS (323)..(1759): transl_table=11
gttgaccagcgtcagccccaacgcggcttccaggctgcggatacgccgactgaacgccggctgggtgacaaagcgccgctcagccgcctgggaaaaactacgcgtcgccgccagggcgctgaagtcttccaaccacttgctctcaaggttcatcactgcctcccacggaatgcaccattttggcacacacgcccgccaagataaccgggtcacatccacattatgccgtttgtgcataggccagtgtttaacagcattggcccaaaaagtcctacaagcctagcattcgcagcgttccggccagtcccgggtccatattgagatgatctccgtcatgtcctctgctgcatctttccgtaccgaaaaagacctgcttggcgtactcgaagtaccggctcaagcgtattacggcatccagaccctgcgagcggtgaataacttccgcctctcgggcgttccgatttcgcattacccgaaattggtggtcggtctggcaatggtcaagcaagcagcggctgacgccaaccgcgagttgggccagctcagcgaacgcaagcacgctgccatcagcgaagcctgcgctcgtctgatccgcggcgatttccacgaagagttcgtggtggacatgattcaaggcggcgctggcacttcaaccaacatgaatgccaacgaagtcatcgccaacatcgcgctggaggccatgggtcaccagaagggcgaataccagtacctgcaccccaacaacgacgtgaacatggcgcagtcgaccaacgacgcctacccgaccgcgatccgcctgggtctgctgctgggccatgacgcgctgctggccagcctcgacagcctgatccaggcgttcgccgccaaaggcgccgagttcagccatgtgctgaaaatgggccgcacacaattgcaagacgccgtgccgatgaccctcggccaggaattccgcgcgttcgccaccaccctgggtgaagacctggcccgcctgaaaaccctggcgccagagctgctgaccgaagtgaacctgggcggaaccgcgatcggtaccggcatcaacgccgacccgcgctaccaggccctcgccgtacaacgcctggccaccatcagcggtcagccgctggtaccggcggccgacctgatcgaagccacctccgacatgggcgctttcgtactgttctccggcatgctcaagcgtactgccgtgaagctgtccaagatctgcaacgacctgcgcctgctgtccagcggcccacgcaccggcatcaacgagatcaacctgccggctcgccagccaggcagctcgatcatgcccggcaaggtcaacccggtcatcccggaagcggtcaaccaggtagcgttccaagtcatcggtaacgacctggccctgaccatggcagccgaaggcggccaactgcagttgaacgtgatggagccgctgatcgccttcaagatcttcgactcgatccgcctgctgcaacgcgccatggacatgctgcgcgagcactgcatcgtcggcatcaccgccaacgaagcccgctgccgcgaactggtggaacattccatcggcctggtcaccgcgctgaacccatacatcggctatgaaaacgccacccgcattgcgcgtatcgcgcttgaaagcgggcgcggcgtgctggaactggtgcgtgaagaaggcttgctcgacgacgccatgctcgacgacatcctgcgccccgaaaacatgattgccccacgcttggtcccgctgaaggcctaagcgtttgttgcaccgctcaccaggctgagggactagacacctctcaccttttgagggcttgaagactcgttcttcaggcccttttttttgctcgtaattcctctccttatataaagcgctgttagtgcgtttcacctataaaacatcacgcctgcggcgttacttgaaaaagcattcattcattgcaaattcccattgcgtgcacaaacggtgtgcagtttcgtgccatataaaaacaatggtttcatatatgaaacgctcaataagtaaccttaatctcgcaactaattaatttaaaagggaattc

SEQ ID NO: 45259 - protein, 478 aa, Pseudomonas fluorescens
MISVMSSAASFRTEKDLLGVLEVPAQAYYGIQTLRAVNNFRLSGVPISHYPKLVVGLAMVKQAAADANRELGQLSERKHAAISEACARLIRGDFHEEFVVDMIQGGAGTSTNMNANEVIANIALEAMGHQKGEYQYLHPNNDVNMAQSTNDAYPTAIRLGLLLGHDALLASLDSLIQAFAAKGAEFSHVLKMGRTQLQDAVPMTLGQEFRAFATTLGEDLARLKTLAPELLTEVNLGGTAIGTGINADPRYQALAVQRLATISGQPLVPAADLIEATSDMGAFVLFSGMLKRTAVKLSKICNDLRLLSSGPRTGINEINLPARQPGSSIMPGKVNPVIPEAVNQVAFQVIGNDLALTMAAEGGQLQLNVMEPLIAFKIFDSIRLLQRAMDMLREHCIVGITANEARCRELVEHSIGLVTALNPYIGYENATRIARIALESGRGVLELVREEGLLDDAMLDDILRPENMIAPRLVPLKA

SEQ ID NO: 45260 - DNA, 2867 bp, Serratia marcescens
  CDS (787)..(2223): transl_table=11
gaattcgccgtcgaaggtattgccgttggcggcgtcgccgcccgtccaaccgccggggcgatacaccgacaggtgcggcatcagtttcagcgtcagcgatttttgcaccggcggcagcagcagcaacaggccgaggaaatcggtgaagaaacccggtatcagcagcaggaagcccgccagcaccagcgaaacgcttttcaccatttccgccgccgggctttcgccggccgccagtttttgctgcatctgcacgaaggttttcatgccctgattgcgcaccagcgaaatgccgacgcaggagctgaacaccaccagcagcagggtgacagccacgccgagcacggcggcgactttgataaagatggatatttctatgtaagccagcagaaatatcagcagtagcggtaaccagcgcacctggttctcctatcggtaggtaaggcacggccgccacggggcgacggcgcgaaaaaagaggccgtaaacggccgacactattacaatgagggcatccccccaccatttcaaccgagagccggtttttattgctaaagttcacaaacgtgaaagaagtcacagaaccgaaaaagggcatatccttaaacaccataaggtgatctggattcagtcatttcttaccaaccagcatatgatctgggcagctacgggcgatttggttaatcgtttcacgccccaagccttcggcaatattaatttaggctgtgcccttactagccttgacctgacaaattattaattcggcagcaacacatagagaaggttctcatgtcaaacaacattcgtatcgaagaagacctgttaggaacacgtgaagtccccgcagacgcttactacggagttcacactctgcgtgcgattgaaaacttctacatcagcaacagcaaaatcagcgatgtccccgagttcgttcgcggcatggtgatggtgaaaaaggccgcggcgatggccaacaaagaactcaaaaccatcccgcgcaaaatcgccgacgtgatcatccaggcctgcgacgaggtgctggataaaggcaagtgcatggatcagttcccggtggacgtattccagggcggcgcgggcacctcgctgaacatgaacaccaacgaagtgctggcgaacatcggcctggagctgatgggccatcaaaaaggcgaataccagtacctgaacccgaacgatcacctcaataagtgtcagtccaccaacgacgcctacccgaccgggttccgcatcgcggtgtacgcctccaaccagaaactgatcgacgccatcaaccagctgcgcgaaggcttcgatcgcaaggcgaaagagttcgaaaccatcctgaaaatgggccgcacccagctgcaggacgcggtgccgatgaccctaggccaggaattccacgccttcagcgtgctgctgaacgaagagacccgcaatctgcaccgcaccgcgacgctgctgctggaagtgaacctcggcgccaccgccatcggcaccgcgctcaacaccccggaaggctaccagccgctggcggtgcaaaaactggcggaagtcagcggcctgccggtggtgccggcagaagacctgatcgaagccacctccgactgcggcgcctacgtgatggtgcacagcgcgctcaaacgcctggcggtgaaactgtccaaaatctgtaacgacctgcgcctgctctcctccggcccgcgcgccggcctgaacgaaatcaacttgccggagctgcaggcgggatcgtccatcatgccggccaaagtgaatccggtggtgccggaagtggtcaatcaggtgtgtttcaaggtgattggcaacgacacttgcgttaccatggcggccgaagcgggccagctgcagctgaacgtgatggagccggtgatcggccaggcgatgttcgagtcgatccacatcctgaccaacgcctgctacaacctgctggaaaaatgcattaacggcatcaccgcgaataaagaagtctgcgaacactacgtcttcaactcgatcggtatcgtcacctatctgaacccgttcatcggccaccataacggtgacatcgtcgggaagatctgcgccgaaaccggcaagagcgtgcgcgaagtggtgctggaacgcggcctgctgaccgaagccgagctggatgacatcttctccgtggagaacctgatgcacccggcctataaagccaaacgctatacggatgaaaatgaacaataacagacctacccggtagccctgaaaggcacgctaaatcctctggatagcgtgcctttttacttttaggtgcccacaaaattttaacgttttattttcaatttacaccctaaatcattgggactgcatcaaggcggcaagagcgcaagtccccaggagcttactcaagtaagtgactggggtgagcgctcgcagccaacaccgatgcagtttcaaggatgacgggaaatctcattttaaggagtaaacactatgctagccgtagaattggttatcgttctgctggccatctttttaggggccaggttgggcggtatcggtatcgggttcgcggggggactgggcgtattggcgctggcgctgatcggcgtcaaaccgggcaacattcccttcgacgtcatctccatcatcatggcggtgattgcggcgatctccgccatgcaggtcgccggggggatggactacctggtgcaacagaccgaaaaactgctgcgcaagaaccccaagcacatcaccattctcgcccctatcgtcacctacttcctgaccatcttcgccggcaccggcaacatctcgctctcggcgctgccggtgatcgccgaggtggcgaaagaacagggcatcaagccttgccgcccgctgtcgac

SEQ ID NO: 45261 - protein, 478 aa, Serratia marcescens
MSNNIRIEEDLLGTREVPADAYYGVHTLRAIENFYISNSKISDVPEFVRGMVMVKKAAAMANKELKTIPRKIADVIIQACDEVLDKGKCMDQFPVDVFQGGAGTSLNMNTNEVLANIGLELMGHQKGEYQYLNPNDHLNKCQSTNDAYPTGFRIAVYASNQKLIDAINQLREGFDRKAKEFETILKMGRTQLQDAVPMTLGQEFHAFSVLLNEETRNLHRTATLLLEVNLGATAIGTALNTPEGYQPLAVQKLAEVSGLPVVPAEDLIEATSDCGAYVMVHSALKRLAVKLSKICNDLRLLSSGPRAGLNEINLPELQAGSSIMPAKVNPVVPEVVNQVCFKVIGNDTCVTMAAEAGQLQLNVMEPVIGQAMFESIHILTNACYNLLEKCINGITANKEVCEHYVFNSIGIVTYLNPFIGHHNGDIVGKICAETGKSVREVVLERGLLTEAELDDIFSVENLMHPAYKAKRYTDENEQ

SEQ ID NO: 45262 - DNA, 1479 bp, Arabidopsis thaliana
  CDS (1)..(1479)
atgtcgatttacgtcgcgtcgcgacggctctccggcggaacaactgtgacggcgctgcgttatgccacctctctgagatcttattcgacctcgtttagggaggagagggacaccttcgggccgattcaagttccttccgataaattgtggggagcccagacgcagagatcgctgcagaacttcgaaatcggtggtgagcgcgagcgaatgcctgaaccaattgtccgcgcttttggcgtcttgaagaaatgcgctgccaaggttaacatggaatacggccttgatccgacgattgggaaagcaattatgcaagctgctcaggaagtagctgagggaaagctcaatgatcatttcccccttgttgtctggcaaactggtagtgggactcagagtaatatgaatgctaatgaggtcattgctaatagagcagctgagattcttggtcgcaaacgtggtgagaaatgtgtgcacccaaatgaccatgtgaacagatcacaatcttctaacgacacttttcctaccgtcatgcacattgcagctgcaaccgagattaattcgaggctcatccctagtttaaaaactttgcatagcactttggaatctaagtccttcgagttcaaagatattgtgaaaattggaagaactcacactcaagatgctacacctttgacactaggacaagaatttggtggctatgctactcaagttaagtatggactaaatagagtcacctgcactcttcctcgcctctatcagcttgcacaaggtggaactgcggttgggacaggattaaacactaagaaagggtttgatgtaaagatagctgctgcagtagctgaagaaacaaacttgccatttgtcactgcagaaaacaagtttgaagctctggctgcacacgatgcttgtgttgaaaccagtgggtcacttaacacaatcgccacatcgctgatgaagatcgccaatgatatacgttttcttggaagtggcccaagatgtggtcttggtgaacttgtactacctgaaaatgagccaggaagcagtatcatgcctgggaaggtaaatcctacacagtgtgaggccttgactatggtttgtgcacaggttatgggaaaccatgtagctgtgacagttggtgggtcaaatggtcatttcgaattgaatgtattcaagccggtgatcgcgagtgctcttttacattccgtcagattaatagcagatgcttcagcttcgttcgagaaaaactgtgtgaggggcattgaggccaacagagaaagaatctcaaagctattgcacgagtctcttatgcttgtgacatcattgaatccgaaaatcgggtatgacaatgctgcagcagttgccaagaaagctcacaaagaaggatgtacattgaaggaagcggctctgaatttaggcgtgcttactgcggaagagtttgatacacttgttgttcctgagaagatgattggtccctccgattga

SEQ ID NO: 45263 - protein, 492 aa, Arabidopsis thaliana
MSIYVASRRLSGGTTVTALRYATSLRSYSTSFREERDTFGPIQVPSDKLWGAQTQRSLQNFEIGGERERMPEPIVRAFGVLKKCAAKVNMEYGLDPTIGKAIMQAAQEVAEGKLNDHFPLVVWQTGSGTQSNMNANEVIANRAAEILGRKRGEKCVHPNDHVNRSQSSNDTFPTVMHIAAATEINSRLIPSLKTLHSTLESKSFEFKDIVKIGRTHTQDATPLTLGQEFGGYATQVKYGLNRVTCTLPRLYQLAQGGTAVGTGLNTKKGFDVKIAAAVAEETNLPFVTAENKFEALAAHDACVETSGSLNTIATSLMKIANDIRFLGSGPRCGLGELVLPENEPGSSIMPGKVNPTQCEALTMVCAQVMGNHVAVTVGGSNGHFELNVFKPVIASALLHSVRLIADASASFEKNCVRGIEANRERISKLLHESLMLVTSLNPKIGYDNAAAVAKKAHKEGCTLKEAALNLGVLTAEEFDTLVVPEKMIGPSD

SEQ ID NO: 45264 - DNA, 1500 bp, Arabidopsis thaliana
  CDS (1)..(1500)
atggccgctttgacaatgcagtttgaaggagagaagaaaaacgtatccgaagttgcagacgtaaccctcaagcaagaagatgaacaacaagaacgtagatcttattcgacgccgtttagggaagagagagacacctttggcccgatccaagttccttccgataaattatggggagcacagacgcagagatcgcttcagaacttcgagattggtggtgaccgcgagcgaatgcccgaaccaatcgtccgagcttttggtgtcttgaagaaatgtgctgccaaggttaacatggagtatggtcttgatccaatgattggggaagccataatggaagctgcacaagaagtagcagaaggaaagctcaatgatcatttccctcttgttgtatggcaaactggtagtgggacgcagagtaatatgaatgctaatgaggtcattgccaatagagcagctgagattcttggtcacaaacgtggtgaaaaaattgtgcacccaaatgaccatgtgaacagatcacaatcttctaatgacacttttccaactgtcatgcacattgcagctgcaaccgagattacttcgaggctaatccctagtttgaaaaatttgcatagctctttggaatctaagtccttcgagtttaaagatatagtgaaaatcggaagaactcatactcaagatgctacacctttgacattaggacaagaatttggtggctatgctactcaagttgagtatggacttaatagagtcgcatgtactctaccccgcatctatcagcttgcacaaggtggaactgctgttgggaccggattaaacactaagaaagggtttgatgtaaagatcgctgctgcagtagctgaagaaacaaacttgccattcgtcaccgcagaaaacaagtttgaagctctggctgcacacgatgcttgtgttgaaacaagtggatctcttaacacaatcgccacatcattgatgaagattgccaatgatatacgttttcttggaagtggtccaagatgtggtcttggtgaactttctctgcctgagaatgaaccaggaagcagtattatgcctggaaaggtaaatcctacacagtgtgaggccttgactatggtttgtgctcaagttatgggaaaccatgtagccgtgacaattggtgggtcgaatggtcattttgaattgaatgtattcaagccggttatcgcaagcgctctcttacattccattagactaatagcagatgcttcagcttcatttgagaaaaactgtgttagaggcattgaggccaacagagaaaggatctcaaagctattgcacgagtctcttatgcttgtgacatcattgaatcctaaaattggctatgacaatgctgcagcagtagccaaaagagctcacaaagaaggatgcacattaaagcacgcagctatgaagttaggtgttcttacttcggaagagtttgatactcttgttgttcccgagaagatgattggtccatctgattaa

SEQ ID NO: 45265 - protein, 499 aa, Arabidopsis thaliana
MAALTMQFEGEKKNVSEVADVTLKQEDEQQERRSYSTPFREERDTFGPIQVPSDKLWGAQTQRSLQNFEIGGDRERMPEPIVRAFGVLKKCAAKVNMEYGLDPMIGEAIMEAAQEVAEGKLNDHFPLVVWQTGSGTQSNMNANEVIANRAAEILGHKRGEKIVHPNDHVNRSQSSNDTFPTVMHIAAATEITSRLIPSLKNLHSSLESKSFEFKDIVKIGRTHTQDATPLTLGQEFGGYATQVEYGLNRVACTLPRIYQLAQGGTAVGTGLNTKKGFDVKIAAAVAEETNLPFVTAENKFEALAAHDACVETSGSLNTIATSLMKIANDIRFLGSGPRCGLGELSLPENEPGSSIMPGKVNPTQCEALTMVCAQVMGNHVAVTIGGSNGHFELNVFKPVIASALLHSIRLIADASASFEKNCVRGIEANRERISKLLHESLMLVTSLNPKIGYDNAAAVAKRAHKEGCTLKHAAMKLGVLTSEEFDTLVVPEKMIGPSD

SEQ ID NO: 45266 - DNA, 1467 bp, Bradyrhizobium japonicum
  CDS (46)..(1467): transl_table=11
atgaagaggccgcgcggcatttcgcgcggcggaatggatgtgctcatggccaaatctgcacgcacgaagaccgctcgccccgcgacccgcaccgagaccgacagtttcggtcccatcgaggtcccctccgatcgctattggggcgcgcagaccgaacgttcgcggcagaatttccgcatcggcacggatcgcatgccgatctcgctcgtgcatgcgctcggcatcgtcaagctcgccgcggcgcagtccaaccgcgagctcggcctgctcgaccagcgccgcgccagtgccatcatccgcgccgcgcgcgaggtgatcgacggcagcctcgacgatcatttcccgctcgtcgtgtggcagaccggctcgggcacgcagaccaacatgaacctcaacgaggtgatcgccaaccgcgccaatgagctgctcggcggcgagctcggcgccaagaagccggtgcatccgaacgatcacgtcaacatgagccagtcgtcgaacgactcttttcccaccgcaatgcatatcgcggcggcgagccgcatcaccgccgatctcgttcctgcccttggcgaactgctccgcgcgctgcgcaagaaggagaaggagttcgccaagatcgtcaagatcggccgcacccacacccaggacgcgacgccgctgacgctcggccaggaattctccggctatgccgcgcaggtcgaaagcgggatcgcgcgactgaaggtcgcggtgaaggagctctatccgctggcgcagggcggcaccgccgtcggcaccggcctcaacgcgaagccgcgctttgcaagactgttcgcaaagcacgttgccggaatcaccaaactgcccttcaccagcgccgccaacaaattcgaggcgctggcctcgaacgatgcttatgtgctggcgcacggcgccatcagttcggtcgcgacaggcctgttcaagatcgccaacgacatccgcctgctcggatcgggtccgcgctcagggctcggcgagctgatcctgccggagaacgaaccgggctcgtcgatcatgccgggcaaggtcaatccgacgcagtgcgaggcgatgaccatggtgtgctgccaggtgttcggcaatcacaccgcgatcacggtcgccggcagccagggccatttcgagctcaacgtctacaagcccgtgctggcctacaacatgctgcactcgatccgcctgatggccgatgccgcgcgctccttcaccgaacattgcgtcagcggcatccgcgccgacgaaaagcgcataagtgagctgatgcagcgctcgctgatgctggtgaccgcgctcgcaccgaagatcggctacgacaacgccgccaaggtcgcgaagacggcgcatgccaacggcaccacgctgaaggaggaagcgctgcggctcggcttcgtcacagcggacgagttcgaccgtttggtgcagccggagaagatgacgaaaccggggtaa

SEQ ID NO: 45267 - protein, 473 aa, Bradyrhizobium japonicum
MAKSARTKTARPATRTETDSFGPIEVPSDRYWGAQTERSRQNFRIGTDRMPISLVHALGIVKLAAAQSNRELGLLDQRRASAIIRAAREVIDGSLDDHFPLVVWQTGSGTQTNMNLNEVIANRANELLGGELGAKKPVHPNDHVNMSQSSNDSFPTAMHIAAASRITADLVPALGELLRALRKKEKEFAKIVKIGRTHTQDATPLTLGQEFSGYAAQVESGIARLKVAVKELYPLAQGGTAVGTGLNAKPRFARLFAKHVAGITKLPFTSAANKFEALASNDAYVLAHGAISSVATGLFKIANDIRLLGSGPRSGLGELILPENEPGSSIMPGKVNPTQCEAMTMVCCQVFGNHTAITVAGSQGHFELNVYKPVLAYNMLHSIRLMADAARSFTEHCVSGIRADEKRISELMQRSLMLVTALAPKIGYDNAAKVAKTAHANGTTLKEEALRLGFVTADEFDRLVQPEKMTKPG

SEQ ID NO: 45268 - DNA, 1665 bp, Bradyrhizobium japonicum
  CDS (229)..(1665): transl_table=11
gtgcgttctctggctctgccggcatcgaagccatcaacattggagccgtgcgattgtctgagtgttccgcacgcgcaacgcgcgttcgctcgctgcaagccgaggcgcccaccatgccattcggaaaaaggacgttcgttcgcggaagcgtgtgcgctgtgccgtccgtacactttaggtcggcgccgcaagagtgctcccgacatcaactgccacgagaggcaaaggatgaacgacctccgcaaagagacagacagcctgggtgaagtgaacgttcccgcggacaagctctggggcgcgcagacgcagcgctcgctcgagcatttcagcatcggccgggacctgatgccgcgcgaaatgatccagtcctacgcgatcctgaagaaagcggccgcgaatgcgaattacgctggcggccgtctcgacggcaagattcacaaactgatcgtccacacctgcgacgagattctcgccggccagcatcacgacatgtttccccttcacgtctggatgacgggtagcggaacgcagttcaacatgaacgtgaacgaggtgatctcgaaccgatgctgccagcttgctggcacggcgctcggcagcaagctgccggttcatccgaacgatcacgtcaacatgtcgcagtcgtcgaacgatagcttcccgtcggccatgtacatcgcggccgcgatgaacgtgacgcaacggctggttcctgcggtcgaagctctgcacgatgcgatcgcggcgaaatcgaaccagtgggacgacatcgtcaagatcggccgaacccacatgcaggatgccacacccctgacgctcgggcaggagtggtccggttatgccgcgatgctcgccgacggtctggcgcgcatcgacgacgcgctcaagggcgtcttccgcctcgcgctgggcggcaccgccgtgggcaccgggattaacgcggcgccgggctttgcagaagccgtcgcagccgagatcgcgcggttgacgggcctgcccttcgtcagtgcgccgaacaagttcgccgtgcagggtgcacacgacgcgctggtgcagctctccggtacactgcgcacgctcgccggctcgctctacaagatcgcaaacgacatccgccttttgtcctgcggtccgcgcgcgggctttgccgagttgcggattcccgagaacgagccgggctcgtcgatcatgccgggcaaggtcaatccgacgcaggctgaggcgctgacgatgatcgccgtgcaggtgatggcgaacgacgtcgccgtcgggttcggtggcgccggcggctacctggagatgaacgtctacaagccgctgatcatccacaacatcgcgcaatccgtcaccatcctcaccgacggctgcacgaatttccgcacctttctggtcgagggtaccgagccgaaccgcaagaaaatcaaggagtatgtcgagcggtcgctgatgctcgtgaccgccctggcgccggtgatcggctacgacaaggcatcgcggatcgcgcattacgcgatggacaacgatctcacgctgaagtcggcggcgctgaagctcggcttcgtgaccgagccggagttcgaccgcatcgtggatcccgccaagatggtcaagccctacgttgccgagatcaaggtgccgctcgcaatcggtgcgaaaaccggttga

SEQ ID NO: 45269 - protein, 478 aa, Bradyrhizobium japonicum
MNDLRKETDSLGEVNVPADKLWGAQTQRSLEHFSIGRDLMPREMIQSYAILKKAAANANYAGGRLDGKIHKLIVHTCDEILAGQHHDMFPLHVWMTGSGTQFNMNVNEVISNRCCQLAGTALGSKLPVHPNDHVNMSQSSNDSFPSAMYIAAAMNVTQRLVPAVEALHDAIAAKSNQWDDIVKIGRTHMQDATPLTLGQEWSGYAAMLADGLARIDDALKGVFRLALGGTAVGTGINAAPGFAEAVAAEIARLTGLPFVSAPNKFAVQGAHDALVQLSGTLRTLAGSLYKIANDIRLLSCGPRAGFAELRIPENEPGSSIMPGKVNPTQAEALTMIAVQVMANDVAVGFGGAGGYLEMNVYKPLIIHNIAQSVTILTDGCTNFRTFLVEGTEPNRKKIKEYVERSLMLVTALAPVIGYDKASRIAHYAMDNDLTLKSAALKLGFVTEPEFDRIVDPAKMVKPYVAEIKVPLAIGAKTG

SEQ ID NO: 45270 - DNA, 1494 bp, Agrobacterium tumefaciens; identical to SEQ ID NO: 45048
  CDS (103)..(1494): transl_table=11

SEQ ID NO: 45271 - protein, 463 aa, Agrobacterium tumefaciens
MTATRTETDTFGPIEVQADRYWGAQAQRSLGNFKIGWEKQPASVVRALGIVKQAAARANMALAGLDPKVGDAIIAAAQEVIDGKLTEHFPLVVWQTGSGTQSNMNANEVISNRAIEMLGGEMGTKKPVHPNDHVNMSQSSNDTYPTAMHIACVEEIVHHLLPALKHLHTALEAKVKQFEKIIKIGRTHTQDATPLTLGQEFSGYAAQVASAIANIELTLPALSKLAQGGTAVGTGLNAPVGFAEKVAEEISEITGLSFVTAPNKFEALASHDSMVFSHGAINAAAAALFKIANDIRFLGSGPRAGLGELSLPENEPGSSIMPGKVNPTQSEALTQVCAHIFGNNAALSFAGSQGHFELNVYNPMMAYNFLQSVQLLGDAAVSFTDNCVVGIEAREDNIRKGVENSLMLVTALNGKLGYDICAKIAKTAHKNGTTLREEAVGGGYLTNEEFDQYVRPENMIGPK

SEQ ID NO: 45272 - DNA, 1389 bp, Bacillus anthracis
  CDS (1)..(1389): transl_table=11
atggagtacagaattgaaagagatacattaggagaaataaaagttccagctgataaattatgggcagcacaaacacaacgtagtaaagaaaacttcccgattggaacagagcaaatgccgcttgaaattgtaaaagcatttgcaattttaaagaagagtgcagcgcttagcaatcaaaaattaggaaagctatcagaagaaaaagcagaagcaattgtggtagctgctgacgaaatcattgcagggaaatggaatgaacattttccgcttgtcgtgtggcaaacaggtagtggtacacaatcaaacatgaatgtgaatgaagtaattgcaaatcgtgggaatcaaattttgaaagaaaagggatctgacgtacatattcatccgaatgatgatgtgaacatgtcccaaagttcaaatgatacatttccaacagcgcttcatgtagcatgtgtactcgcagtagaaaatcacgtattaccagctattacgaaattaaaagaaacgttagcagaaaaagtaactgcatttgaacatattataaaaattggtcgtacacatttacaagatgcgacaccgttaacattaggacaagaaattagtggatggcaccgtatgcttgaaaaaacagagcgtatgattgcagagagcaatacatatatgaaagagcttgcgattggtggtacagcagttggaacaggtattaacgctcatcctaaatttggtgagatggtatcagaggaaattagccaatttacaggtaaacaatttatttctgcaccaaataagttccatgcattaacgagccatgatgaagttgtatatactcacggtgcattaaaagcattagctgcggatttaatgaaaatcgctaacgatgtacgttggctggcaagtggtccacgtagtggtttaggagaaattattattccggcgaatgagccaggaagctctattatgccaggtaaagtaaatccaacgcaaagtgaagcgttaacgatggttgtagcgcaagtgatgggaaatgacgcaacaatcggatttgctgcgagtcaaggtaattttgagttaaacgtatttaaacctgttattgcgtataacttcttacaatccgctcacttattagcagatgcaattgtttcatttaatgataattgtgcagttggtattgaagctgatgaagaaatcattaaagagaatgtgaatcgttcattaatgcttgttacagcattaaacccgcatatcggatatgaaaatgcagcaaaaattgcgaagcatgctcataaagaagggttaactttaaaagaagcagcattgcaatctggactactaacagaagagcaatttaatgaaattgtcgatccgaaaaaaatgattgctccgaaagagtaa

SEQ ID NO: 45273 - protein, 462 aa, Bacillus anthracis
MEYRIERDTLGEIKVPADKLWAAQTQRSKENFPIGTEQMPLEIVKAFAILKKSAALSNQKLGKLSEEKAEAIVVAADEIIAGKWNEHFPLVVWQTGSGTQSNMNVNEVIANRGNQILKEKGSDVHIHPNDDVNMSQSSNDTFPTALHVACVLAVENHVLPAITKLKETLAEKVTAFEHIIKIGRTHLQDATPLTLGQEISGWHRMLEKTERMIAESNTYMKELAIGGTAVGTGINAHPKFGEMVSEEISQFTGKQFISAPNKFHALTSHDEVVYTHGALKALAADLMKIANDVRWLASGPRSGLGEIIIPANEPGSSIMPGKVNPTQSEALTMVVAQVMGNDATIGFAASQGNFELNVFKPVIAYNFLQSAHLLADAIVSFNDNCAVGIEADEEIIKENVNRSLMLVTALNPHIGYENAAKIAKHAHKEGLTLKEAALQSGLLTEEQFNEIVDPKKMIAPKE

SEQ ID NO: 45274 - DNA, 1389 bp, Bacillus subtilis
  CDS (1)..(1389): transl_table=11
atggaatacagaattgaacgagacaccatgggagaagtaaaagttcctgctgataaattttggggcgcccaaacacagcgaagcaaggagaactttaagatcggttctgaaaaaatgccgatgcgtgttgtgaaggcgtttgcaattttaaaacgaagcactgctctagctaataaacgcctcggcaatctggacgctgaaaaagcagaagcgattgcagcggtttgtgatgatgtgctcaaaggcaagtacgatgacaacttcccgcttgtcgtatggcagaccggaagcggcacacaaagcaatatgaacatgaacgaagtggtagccaaccgtgcgactgctttattaaaagagaagaactctgatcaaacgattcatccaaatgatgacgtgaaccgaagccaaagctcaaacgacacattcccgactgcgatgcatgttgccgctgttttggctgtttacgagcagcttgtgccggcgcttgatcagcttcgcaatacactggatgaaaaagcaaaagcatacaatgatattgtcaaaatcggacgcacgcatcttcaggatgctacgccactgaccctcggacaggaaatcagcggatgggttcacatgctggaccgttcgaaggaaatgattttggaagcgacagataaaatgcgtgcgcttgcaattggtggaacggctgtcggaacgggtatcaacgcccacccagagtttggagagcttgtctcagaagagatcactaagctgaccggccaaacgttcagcagctcgccgaataaattccacgcgctgacaagccatgacgaaatcacttatgcgcatggcgcattaaaagcgcttgcggctgacttaatgaaaatcgcgaacgatgtcagatggctcgcaagcggaccccgctgcggcatcggggagatcgtcattcctgaaaatgagccgggaagctctattatgcctggtaaagtcaatccgacacaaagcgaagcgttaacaatgatcgcagcgcaaatcatggggaacgatgcgacaatcggctttgcggcgagtcaggggaactttgaactgaacgtgtttaagcctgttattatttacaacttcctgcaatctgtgcagctgctcagtgacggcatgaattcattccatgataaatgtgctgtcggtattgagcctaataaagaaaccattcaggaaaacctgtcaaattcattaatgcttgttacggcgctgaacccgcatatcggttatgaaaacgcggcgaaaatcgccaagcttgcccataaagagggattgacgctcaaagaagcagctttgaagcttgaattgctgacagaggagcaatttaacgaaatggttaagccggaagacatggtaaaaccaaaggcgtaa

SEQ ID NO: 45275 - protein, 462 aa, Bacillus subtilis
MEYRIERDTMGEVKVPADKFWGAQTQRSKENFKIGSEKMPMRVVKAFAILKRSTALANKRLGNLDAEKAEAIAAVCDDVLKGKYDDNFPLVVWQTGSGTQSNMNMNEVVANRATALLKEKNSDQTIHPNDDVNRSQSSNDTFPTAMHVAAVLAVYEQLVPALDQLRNTLDEKAKAYNDIVKIGRTHLQDATPLTLGQEISGWVHMLDRSKEMILEATDKMRALAIGGTAVGTGINAHPEFGELVSEEITKLTGQTFSSSPNKFHALTSHDEITYAHGALKALAADLMKIANDVRWLASGPRCGIGEIVIPENEPGSSIMPGKVNPTQSEALTMIAAQIMGNDATIGFAASQGNFELNVFKPVIIYNFLQSVQLLSDGMNSFHDKCAVGIEPNKETIQENLSNSLMLVTALNPHIGYENAAKIAKLAHKEGLTLKEAALKLELLTEEQFNEMVKPEDMVKPKA

SEQ ID NO: 45276 - DNA, 1392 bp, Bordetella pertussis
  CDS (1)..(1392): transl_table=11
atgaaaacccgcaccgaaaaagacactttcggcccgatcgaggtgcccgagcagcacctgtggggcgcgcagacccagcgctcgctgcatttcttcgcgatctcgaccgagaagatgccggtgccgctggtcgccgccatggcacgcctgaagcgcgccgccgccaaggtcaacgccgagctgggcgagctggatccgcaggtcgcagacgccatcatgcgggccgccgatgaggtgatcgccggcaagtggcccgacgagtttccgctgtcggtctggcagaccggctcgggcacgcagagcaacatgaacatgaacgaggtgctggccaaccgcgcctccgagctgctgggcggcgagcgcggcgaaggccgcaaggtgcaccccaacgaccacgtgaaccggggccagtcgtccaacgatacctttccgaccgccatgcacgtggccgccgcggtcgaggtcgagcaccgcgtgctgcccgccctgaaggcgttgcgcggcacgctggccgccaagagcgcggcgttctacgacatcgtcaagatcggtcgcacccatttgcaggacgccaccccgttgacgctgggccaggagatctccggctacgtggcgcagctggacctggccgagcagcagatccgcgcgacgctggccggcctgcaccagctggccatcggcggcacggcggtgggcaccggcctgaacgcgcatccgcagttcagcgccaaggtatcggccgaactggcccatgacacgggcagcgcgttcgtgtcggcgcccaacaagttccaggcgctggcttcgcacgaggcgctgctgttcgcgcacggcgccttgaagacgctggccgccggcctgatgaagatcgccaacgatgtgcgctggctggccagcggcccgcgctcggggctgggcgaaatcagcattcccgagaacgagccgggcagctccatcatgccgggcaaggtcaacccgacccagtgcgaagccgtcacgatgctggccgcgcaggtcatgggcaacgacgtggccatcaatgtcggcggggccagcggcaacttcgagctgaacgtcttcaagccgctggtgatccacaatttcctgcagtcggtgcgcctgctggccgacggcatggtcagcttcgacaagcactgcgcggccggcatcgagcccaaccgcgagcgcatcaccgagctggtcgagcgttcgctgatgctggtgactgcgctcaacccgcacatcggctacgacaaggccgcgcagatcgccaagaaggcgcacaaggaaaacctgtcgctgaaagaggcggcgctggcgctggggcacctgaccgaggcgcagttcgccgagtgggtggtgccgggcgacatgaccaacgcgcgccgctag

SEQ ID NO: 45277 - protein, 463 aa, Bordetella pertussis
MKTRTEKDTFGPIEVPEQHLWGAQTQRSLHFFAISTEKMPVPLVAAMARLKRAAAKVNAELGELDPQVADAIMRAADEVIAGKWPDEFPLSVWQTGSGTQSNMNMNEVLANRASELLGGERGEGRKVHPNDHVNRGQSSNDTFPTAMHVAAAVEVEHRVLPALKALRGTLAAKSAAFYDIVKIGRTHLQDATPLTLGQEISGYVAQLDLAEQQIRATLAGLHQLAIGGTAVGTGLNAHPQFSAKVSAELAHDTGSAFVSAPNKFQALASHEALLFAHGALKTLAAGLMKIANDVRWLASGPRSGLGEISIPENEPGSSIMPGKVNPTQCEAVTMLAAQVMGNDVAINVGGASGNFELNVFKPLVIHNFLQSVRLLADGMVSFDKHCAAGIEPNRERITELVERSLMLVTALNPHIGYDKAAQIAKKAHKENLSLKEAALALGHLTEAQFAEWVVPGDMTNARR

SEQ ID NO: 45278 - DNA, 1422 bp, Corynebacterium glutamicum
  CDS (1)..(1422): transl_table=11
atgagtgatttcatgaccgagcaggaattccgtattgagcacgacaccatgggtgaagtgaaggttccagcaaaggctctgtggcaggcacagacccagcgcgctgttgagaacttccctatctctggtcgtggtctggaatccgcacagatccgcgcaatgggtctgctgaaggcagcttgtgcgcaggtaaacaaggactccggtgcgctggatgcagagaaggcagatgccatcattgcagctggtaaggagatcgcgtccggtaagcatgacgctgagttcccaattgatgtgttccagactggttccggtacttcctccaacatgaacaccaatgaggttatcgcttccatcgcgaaggctaacggcgttgaggttcacccaaatgaccacgtcaacatgggtcagtcctccaatgacaccttccctactgcaactcacgttgctgcaaccgaagctgctgtcaatgacctcatcccaggcctgaaggttctgcacgagtctttggcgaagaaggctaacgagtggtctgaggttgttaagtccggccgcacccacctgatggacgctgttccagtaaccctgggccaggagttcggtggctacgctcgccagatccagctcggcatcgagcgcgttgaggctactcttcctcgccttggtgagctggctattggtggcaccgctgctggtaccggtatcaacacctccgctgatttcggcggcaaggttgttgctgaactgatcaacttgaccgacgtcaaggagctcaaggaagctgagaaccacttcgaggctcaggctgcacgcgacgctcttgttgagttctccggcgcaatgcgcgttatcgctgtctccttgtacaagatcgctaacgatatccgcctcatgggctccggcccactgaccggtcttggcgagatccgtctcccagacctgcagccaggttcctccatcatgccaggcaaggtcaacccagttctctgtgagaccgctacccaggtttccgctcaggttatcggcaatgacgcagctgttgcgttctccggcacccagggccagttcgagctcaacgtgttcatcccagtgatggctcgcaacgtgcttgagtccgctcgcctgctggctaacacttcccgcgtgttcgcaacccgtctcgttgatggcattgagccaaacgaggcacacatgaaggagctcgctgagtcttcaccttccatcgttaccccactgaactctgcaatcggctacgaagctgctgcaaaggtggctaagactgctttggctgagggcaagaccatccgccagactgtcatcgatttgggcttggttgatggcgagaagctcaccgaggaagagctggacaagcgcctcgacgttcttgctatggctcacaccgagcgcgagaacaagttctaa

SEQ ID NO: 45279 - protein, 473 aa, Corynebacterium glutamicum
MSDFMTEQEFRIEHDTMGEVKVPAKALWQAQTQRAVENFPISGRGLESAQIRAMGLLKAACAQVNKDSGALDAEKADAIIAAGKEIASGKHDAEFPIDVFQTGSGTSSNMNTNEVIASIAKANGVEVHPNDHVNMGQSSNDTFPTATHVAATEAAVNDLIPGLKVLHESLAKKANEWSEVVKSGRTHLMDAVPVTLGQEFGGYARQIQLGIERVEATLPRLGELAIGGTAAGTGINTSADFGGKVVAELINLTDVKELKEAENHFEAQAARDALVEFSGAMRVIAVSLYKIANDIRLMGSGPLTGLGEIRLPDLQPGSSIMPGKVNPVLCETATQVSAQVIGNDAAVAFSGTQGQFELNVFIPVMARNVLESARLLANTSRVFATRLVDGIEPNEAHMKELAESSPSIVTPLNSAIGYEAAAKVAKTALAEGKTIRQTVIDLGLVDGEKLTEEELDKRLDVLAMAHTERENKF

SEQ ID NO: 45280 - DNA, 1404 bp, Escherichia coli
  CDS (1)..(1404): transl_table=11
atgaatacagtacgcagcgaaaaagattcgatgggggcgattgatgtcccggcagataagctgtggggcgcacaaactcaacgctcgctggagcatttccgcatttcgacggagaaaatgcccacctcactgattcatgcgctggcgctaaccaagcgtgcagcggcaaaagttaatgaagatttaggcttgttgtctgaagagaaagcgagcgccattcgtcaggcggcggatgaagtactggcaggacagcatgacgacgaattcccgctggctatctggcagaccggctccggcacgcaaagtaacatgaacatgaacgaagtgctggctaaccgggccagtgaattactcggcggtgtgcgcgggatggaacgtaaagttcaccctaacgacgacgtgaacaaaagccaaagttccaacgatgtctttccgacggcgatgcacgttgcggcgctgctggcgctgcgcaagcaactcattcctcagcttaaaaccctgacacagacactgaatgagaaatcccgtgcttttgccgatatcgtcaaaattggtcgtactcacttgcaggatgccacgccgttaacgctggggcaggagatttccggctgggtagcgatgctcgagcataatctcaaacatatcgaatacagcctgcctcacgtagcggaactggctcttggcggtacagcggtgggtactggactaaatacccatccggagtatgcgcgtcgcgtagcagatgaactggcagtcattacctgtgcaccgtttgttaccgcgccgaacaaatttgaagcgctggcgacctgtgatgccctggttcaggcgcacggcgcgttgaaagggttggctgcgtcactgatgaaaatcgccaatgatgtccgctggctggcctctggcccgcgctgcggaattggtgaaatctcaatcccggaaaatgagccgggcagctcaatcatgccggggaaagtgaacccaacacagtgtgaggcattaaccatgctctgctgtcaggtgatggggaacgacgtggcgatcaacatggggggcgcttccggtaactttgaactgaacgtcttccgtccaatggtgatccacaatttcctgcaatcggtgcgcttgctggcagatggcatggaaagttttaacaaacactgcgcagtgggtattgaaccgaatcgtgagcgaatcaatcaattactcaatgaatcgctgatgctggtgactgcgcttaacacccacattggttatgacaaagccgccgagatcgccaaaaaagcgcataaagaagggctgaccttaaaagctgcggcccttgcgctggggtatcttagcgaagccgagtttgacagctgggtacggccagaacagatggtcggcagtatgaaagccgggcgttaa

SEQ ID NO: 45281 - protein, 467 aa, Escherichia coli
MNTVRSEKDSMGAIDVPADKLWGAQTQRSLEHFRISTEKMPTSLIHALALTKRAAAKVNEDLGLLSEEKASAIRQAADEVLAGQHDDEFPLAIWQTGSGTQSNMNMNEVLANRASELLGGVRGMERKVHPNDDVNKSQSSNDVFPTAMHVAALLALRKQLIPQLKTLTQTLNEKSRAFADIVKIGRTHLQDATPLTLGQEISGWVAMLEHNLKHIEYSLPHVAELALGGTAVGTGLNTHPEYARRVADELAVITCAPFVTAPNKFEALATCDALVQAHGALKGLAASLMKIANDVRWLASGPRCGIGEISIPENEPGSSIMPGKVNPTQCEALTMLCCQVMGNDVAINMGGASGNFELNVFRPMVIHNFLQSVRLLADGMESFNKHCAVGIEPNRERINQLLNESLMLVTALNTHIGYDKAAEIAKKAHKEGLTLKAAALALGYLSEAEFDSWVRPEQMVGSMKAGR

SEQ ID NO: 45282 - DNA, 1413 bp, Halobacterium salinarium
  CDS (1)..(1413): transl_table=11
atgagcgaggattaccgcacggagcaggacagcctcggcgagatgcaggttcccgctgacgcctactggggggcacagacccagcgcgcgatcgagaacttcccgatctcggggatcgcgttcgggcggcggttcgtgcgcgcgctcggcgtcgtcaagaaggccgccgcgcaggcgaaccgcgacctcggcctcgttgacgacgagcgcgccgacgccatcgtcgcggccgccgacgaggtcatcgccggcgagcacgacgaccagttcccggtcgacgtcttccagaccgggtccgggacgtcctcgaacatgaacgccaacgaggtcatcgcgaaccgcgccgcggagctcctcggcgaggagatcggggatcgcgtcgtgcaccccaacgaccacgtgaactatggccagtccagcaacgacgtgatcccgaccgcgatgcacgtggcgagcctcgacgcgctcgtcaacgacgtcaaacccggcctggagacgctggcagcggaactcgacgacaaagcggacgcgttcgacggcgtcgtgaagaccgggcgcacgcacttgcaggacgccacgccggtgcggttgggccaggagttcggcggctaccgcacccaagtcgagaagggcatcgaccgcatcgaggccgttgccccgcgcctctcggagctcgcgctcggcggcaccgccgtcggcaccgggctgaacacccaccccgagttcccggagacggcggccggctacatcagcgaggagaccggcgttacgttccgtgaggcggacaaccacttcgaggcgcaggccgcccacgacgccatgaacgaggcccacggcgcgctgcgcacggtcgcggggtcgctgaacaagatcgccaacgacctccggctgcttgcctccggcccccgcaacgggctgggggagatcgagcagcccgagaaccagcccggctcctcgatcatgcccgggaagatcaaccccgtggtggcggaggcggtcaaccaggtccacaagcaggtcgtgggcaacgacgccgccatcgccgcgggggccgcggaggggcagatcgacttgaacctctacaagcccgtgctggcgcacaacttcctgcagtccgcggacatgctcgccaacgcgagcgctgccttcggcgagaagttcgtcgccaagctcgaagccaacgaggccgcctgcgaggcgcaggtcgagcgctcgatggcgctggcgaccgcgctcaaccccacgatcggctacgacaaggccagcgaggtcgcgaaggccgcgctgaaggaggggaaaacagtcacggaggtcgtcgtcgagaagggatacctctcggaggcggaggccgctgacgtgctcgaccccgaggggatgacccaccggggcatcctctccggcgacgacacgtag

SEQ ID NO: 45283 - protein, 470 aa, Halobacterium salinarium
MSEDYRTEQDSLGEMQVPADAYWGAQTQRAIENFPISGIAFGRRFVRALGVVKKAAAQANRDLGLVDDERADAIVAAADEVIAGEHDDQFPVDVFQTGSGTSSNMNANEVIANRAAELLGEEIGDRVVHPNDHVNYGQSSNDVIPTAMHVASLDALVNDVKPGLETLAAELDDKADAFDGVVKTGRTHLQDATPVRLGQEFGGYRTQVEKGIDRIEAVAPRLSELALGGTAVGTGLNTHPEFPETAAGYISEETGVTFREADNHFEAQAAHDAMNEAHGALRTVAGSLNKIANDLRLLASGPRNGLGEIEQPENQPGSSIMPGKINPVVAEAVNQVHKQVVGNDAAIAAGAAEGQIDLNLYKPVLAHNFLQSADMLANASAAFGEKFVAKLEANEAACEAQVERSMALATALNPTIGYDKASEVAKAALKEGKTVTEVVVEKGYLSEAEAADVLDPEGMTHRGILSGDDT

SEQ ID NO: 45284 - DNA, 1419 bp, Methylobacterium extorquens
  CDS (1)..(1419): transl_table=11
atgtcgccgcacgagaacccttccgtcgagacgcgtaccgagtccgacaccttcggcccgatcgaagtgcccgcccaccgctactggggcgcccagacgcagcgctcgatccagaacttcaagatcggcaccgagcgccagccggcgccgctcgtccatgcgctcggcatcgtcaagcaggccgccgcgctggtgaacaaggatctcggcggcctcgatccgaagatcgccgacgcgatcgccgaatccgctgccgaagtggtcgccggaaagcacgacgacgagttcccgctggtggtgtggcagacgggctcgggcacgcagtccaacatgaacgccaacgaggtgatcgcgagcctcgcaaacgagcggctcgggggcaagcgcggcggcaagtcgccggtccaccccaacgatcattgcaaccgcggccagtcctcgaacgacaccttccccaccgccatgcacatcgcggtcgcccgcgaggttcaggagcggctgctgccggcgctctcccacctgcacaccgcgctcgatgccaaggcgaaggagttcgagagcatcgtcaagatcggccgcacgcacttgcaggatgcgacgccggtctcgctcggccaggaattctccggttacgccgcgcaggtcgcgctcggtggcgcgcgcatcgccgccacgctccccggcgtgctggcgctggcgcagggcggcaccgccgtcggcaccggcctcaatgcgcatccggaattcgcggagcggtttgcggccaaggtcgcggagctgaccgggctgccctttacctcggccgagaacaagttcgaggcgctggccacccacgacgccctcgtcttccttcagggcgcgctgacggctttggcatcgggcctcttcaagatcgccaacgacatccgcctgctcggctccggcccgcgctcgggcctcggcgaattgtcgctgccggagaacgagcccggctcgtcgatcatgccgggcaaggtcaacccgacccagtgcgaggcgctgacgatggtctgcgcgcaggtggtcggcaacggcaccacggtgagctttgccggctcacagggtcatttcgagctcaacgtgttcaagccggtgatcgccaacgcggtgctgcaatcggtgcggattctggccgacgcctcagtcagcttcaccgacaattgcgtcgtcggcatcaaggccaacaccgaccggatcagcgacctgatgagccgctcgctcatgctggtgaccgcgctcgcgccctcgatcggctacgacaaggccgccgagatcgccaagaccgcgcacaagaacggcaccaccctgaaggaagaggcgctgcggctcggctacgtcacggacgaggagttcgagcgggtcgtacgccccgaaaccatgctggcgccgagcgcggaataa

SEQ ID NO: 45285 - protein, 472 aa, Methylobacterium extorquens
MSPHENPSVETRTESDTFGPIEVPAHRYWGAQTQRSIQNFKIGTERQPAPLVHALGIVKQAAALVNKDLGGLDPKIADAIAESAAEVVAGKHDDEFPLVVWQTGSGTQSNMNANEVIASLANERLGGKRGGKSPVHPNDHCNRGQSSNDTFPTAMHIAVAREVQERLLPALSHLHTALDAKAKEFESIVKIGRTHLQDATPVSLGQEFSGYAAQVALGGARIAATLPGVLALAQGGTAVGTGLNAHPEFAERFAAKVAELTGLPFTSAENKFEALATHDALVFLQGALTALASGLFKIANDIRLLGSGPRSGLGELSLPENEPGSSIMPGKVNPTQCEALTMVCAQVVGNGTTVSFAGSQGHFELNVFKPVIANAVLQSVRILADASVSFTDNCVVGIKANTDRISDLMSRSLMLVTALAPSIGYDKAAEIAKTAHKNGTTLKEEALRLGYVTDEEFERVVRPETMLAPSAE

SEQ ID NO: 45286 - DNA, 1395 bp, Pseudomonas putida
  CDS (1)..(1395): transl_table=11
atgagccgtatcgagacagacagcctgggcccggtcgaagttccggaggacgcctactggggtgcgcagacccagcgttcgctgatcaacttcgccattggcaaggaacgcatgcccctcgcggtattgcacgccctggcactgatcaagaaggccgcggcgcgcgtcaacgaccgcaatggcgacctgccggccgacatcgcccggttgatcgaacaggccgccgatgaagtgctggatggccagcacgacgatcagttcccgctcgtcgtctggcagacgggcagtggcacccaaagcaacatgaacgtcaacgaggtgatcgccggacgcgccaacgaactggccggcaaaggccgtggcggcaaggcgccagtacaccccaatgaccacgtcaaccgctcgcagagctccaacgactgcttccccaccgccatgcacattgccgcagcccaggcggtgcatgaaaagctgctgccggccgtcactgaactgtcttcggggctggccgagctgtcgatgcgccaccacaagctggtaaaaaccggccgcacgcacatgatggacgccacgccgattaccttcggccaggaagtgtcggctttcgtcgcccagctcgattacgcccagcgcgctatccgcgccaccctgccggcggtgtgcgaactggcccagggcggcactgccgtgggtaccgggctgaacgctccgcagggttttgccgaggccatcgcggccgagctggcggcgctgtccggcctgccgttcatcactgcacccaacaagttcgccgccctcgccggccacgaaccgctgaccagcctggcgggagccctgaagaccctggccgtggccctgatgaaaatcgccaacgacctgcgcctgctggggtccggccctcgcgccgggcttgccgaggtgcgcctgccagccaacgagccgggcagctcgatcatgccgggcaaggtcaaccccacccagtgcgaggcgctgtcgatgctggcctgccaggtactgggcaacgacgcggccatcggctttgccgccagccaggggcatttgcagttgaatgtgttcaagccggtgatcattcataacctgctgcaatccatcgagttgctggccgatggttgccgcaacttccagcagcattgcgtggcgggtatcgagccggatgccgagcagatggccgcgcacctggagcgtgggttgatgctggtgacggcgctgaacccgcatattggctatgacaaggcggcagaaattgccaagaaggcttacagcgagggcacgaccttgcgcgaggcggcattggcgttgaagtacctgaccaatgaacagttcgaccagtgggtgcggccggagaacatgctggcgcctgggggcaaaggctag

SEQ ID NO: 45287 - protein, 464 aa, Pseudomonas putida
MSRIETDSLGPVEVPEDAYWGAQTQRSLINFAIGKERMPLAVLHALALIKKAAARVNDRNGDLPADIARLIEQAADEVLDGQHDDQFPLVVWQTGSGTQSNMNVNEVIAGRANELAGKGRGGKAPVHPNDHVNRSQSSNDCFPTAMHIAAAQAVHEKLLPAVTELSSGLAELSMRHHKLVKTGRTHMMDATPITFGQEVSAFVAQLDYAQRAIRATLPAVCELAQGGTAVGTGLNAPQGFAEAIAAELAALSGLPFITAPNKFAALAGHEPLTSLAGALKTLAVALMKIANDLRLLGSGPRAGLAEVRLPANEPGSSIMPGKVNPTQCEALSMLACQVLGNDAAIGFAASQGHLQLNVFKPVIIHNLLQSIELLADGCRNFQQHCVAGIEPDAEQMAAHLERGLMLVTALNPHIGYDKAAEIAKKAYSEGTTLREAALALKYLTNEQFDQWVRPENMLAPGGKG

SEQ ID NO: 45288 - DNA, 1494 bp, Rhizobium meliloti
  CDS (103)..(1494): transl_table=11
atggccaaggcagagaaatgcccggcagcggggagtaagatcggccttggacccggtccccgcctcggcttcatgaaccgcatgacgaaagcaggtatcacgatgacatcgacccgcacggaaacagatacgttcggccccatcgaagtggcgagcgaccgctattggggcgcccaggcgcagcgatcgctgggcaatttcaaaatcggctgggaaaagcagcctctggcaatcgtgcgcgcactcggcatcgtcaaacaggcggctgcccgcgccaacatggcgctcggccgcctcgacccggcgatcggcgacgccatcgtcaaggccgcacaggaggtgatcgacggcaagcttgacgagcacttccctctcgtcgtgtggcagacgggctccggaacccagtcgaacatgaatgcgaacgaggtcgtttccaaccgtgcgatcgagctgctcggcggcgtcatgggttcgaagaagccggttcacccgaacgatcacgtcaatatgagccagtcgtcgaacgacacctatcccacggccatgcacatcgcctgtgcggagcgcgtgatccacgatctgctgccggcgctcaagcacctgcacaaggcgctcgaagagaaggtgaaggctttcgatcacatcatcaagatcggccgcacccacacgcaggacgcaacgcccctgacgctggggcaggagttttccggctatgcggcgcaggtcgcctcctcgatcaaacggatcgagatgacgctccccggcctttgcgagctcgcccagggggggaccgcggtcggcaccgggctcaatgcgccggtcggatttgccgagaaggtcgccgaggaaatcgctgccatcaccggcatcggcttcacttccgcgccgaacaagttcgaagcgctggccgcccacgactcgatggtcttcagccacggggcaatcaacgccaccgccgccgcgctcttcaagatcgccaacgacatccgcttcctcggctccggcccccgctccggcctcggcgagctttcactgccggaaaacgagccgggctcgtccatcatgccgggcaaggtcaacccgactcagtgcgaggcgctcacccaggtctgcgtccaggtcttcggcaatcatgcggcgctgacctttgccggcagccagggccacttcgagctcaacgtctacaatccgctgatggcgtacaacttcctgcagtcggtgcaactgctcgccgatgcggctatctccttcaccgacaattgcgtcgtcgggatcgaggcgcgggaggacaacatcaaggcggcgctcgaccgttcgctcatgctggtgactgcgcttgcgccgaagatcggctacgacaacgcggccaagatcgccaagaccgcccacaagaacggtaccacgcttcgcgaggaggccgtcggcggcggttacgtcacggacgaggagttcgacgccgtcgtccgccccgaaaccatgatcggcccggcctga

SEQ ID NO: 45289 - protein, 463 aa, Rhizobium meliloti
MTSTRTETDTFGPIEVASDRYWGAQAQRSLGNFKIGWEKQPLAIVRALGIVKQAAARANMALGRLDPAIGDAIVKAAQEVIDGKLDEHFPLVVWQTGSGTQSNMNANEVVSNRAIELLGGVMGSKKPVHPNDHVNMSQSSNDTYPTAMHIACAERVIHDLLPALKHLHKALEEKVKAFDHIIKIGRTHTQDATPLTLGQEFSGYAAQVASSIKRIEMTLPGLCELAQGGTAVGTGLNAPVGFAEKVAEEIAAITGIGFTSAPNKFEALAAHDSMVFSHGAINATAAALFKIANDIRFLGSGPRSGLGELSLPENEPGSSIMPGKVNPTQCEALTQVCVQVFGNHAALTFAGSQGHFELNVYNPLMAYNFLQSVQLLADAAISFTDNCVVGIEAREDNIKAALDRSLMLVTALAPKIGYDNAAKIAKTAHKNGTTLREEAVGGGYVTDEEFDAVVRPETMIGPA

SEQ ID NO: 45290 - DNA, 1404 bp, Salmonella typhimurium
  CDS (1)..(1404): transl_table=11
atggtaacggtacgccgcgagaaagattcaatgggcgcgattgaagtcccggcagataaactgtggggggcgcagactcaacgttcgctggagcattttcggatttccacggagaaaatgcccgtctcgctcattcacgctctggcgttgaccaagcgcgccgctgcgaaggtcaaccaggacttagggttgttggcggcggaaaaagccagcgcgattatccaggcggctgatgaagtgctggcgggaaaacatgctgatgagtttccgctggcgatttggcagaccgggtccggtacgcaaagcaacatgaatatgaatgaagtgttagcgaaccgcgccagtgaaattttgggcggcgttcgcggtatggaacgcaaggtgcatcccaatgatgacgtcaataagagtcaaagctcaaacgatgttttcccaaccgccatgcacgtggcggcgttactggcgttacgcgaacaccttatcccgcaattatccgcattaacggatacgcttcgcgataaatcccacgctttcgccgatattgtcaaaattggccgtactcacctgcaggacgcgacgccgctcaccttaggccaggagatttccggttgggtagccatgctggaacataacctcagacacattgagcacagtttaccgcacgtcgcggaactggcgctcggcggaaccgcagtagggacagggcttaatacccatccggaatatgcccggcgcgtggccgaggaactggcgacgattaccgcggcgccgtttgttaccgcccccaataaattcgaagcgctggcgacctgtgacgcgttggtacaggcgcatggcgcattaaaaggactggcggcctcgctgatgaaaatcgccaacgatgttcgctggctggcgtccggcccgcgttgcggcattggcgagattgctatcccggagaatgagccaggcagttccattatgcctggtaaagtgaacccgacccagtgtgaagcggtaacgatgctatgttgccaggtgatgggtaacgatgtggccatcaatatggggggcgcatcgggcaactttgagctcaacgtctatcgtccgatggttattcataattttctgcaaacggtgcgcctgctggccgatggcatggagagttttaataaacactgtgcgtcaggaatcgagccaaaccgcgagcgtattacgcagttgctgaatgagtcgctgatgctggtcactgcgctgaatacgcacatcggttacgataaagcggcggagattgcgaagaaggcgcataaagaagggctgacgctcaaagcctcagccgtggcattaggataccttagcgacgaggagttcgacgcctgggtacgtccggagttgatggttggcagtatgacgccgggacgttaa

SEQ ID NO: 45291 - protein, 467 aa, Salmonella typhimurium
MVTVRREKDSMGAIEVPADKLWGAQTQRSLEHFRISTEKMPVSLIHALALTKRAAAKVNQDLGLLAAEKASAIIQAADEVLAGKHADEFPLAIWQTGSGTQSNMNMNEVLANRASEILGGVRGMERKVHPNDDVNKSQSSNDVFPTAMHVAALLALREHLIPQLSALTDTLRDKSHAFADIVKIGRTHLQDATPLTLGQEISGWVAMLEHNLRHIEHSLPHVAELALGGTAVGTGLNTHPEYARRVAEELATITAAPFVTAPNKFEALATCDALVQAHGALKGLAASLMKIANDVRWLASGPRCGIGEIAIPENEPGSSIMPGKVNPTQCEAVTMLCCQVMGNDVAINMGGASGNFELNVYRPMVIHNFLQTVRLLADGMESFNKHCASGIEPNRERITQLLNESLMLVTALNTHIGYDKAAEIAKKAHKEGLTLKASAVALGYLSDEEFDAWVRPELMVGSMTPGR

SEQ ID NO: 45292 - DNA, 1404 bp, Streptomyces avermitilis
  CDS (1)..(1404): transl_table=11
atgaccgacgaggacgacaagcagaactaccgtgtcgagcacgactccatgggtgaggtccgtgtccccgcggacgccaagtggcgggcccagacccagcgtgccgtggagaacttccccatctccgggcagcggctcgagcgggcgcacatcgaggccctcgcccggatcaagggagccgccgccaaggtgaacgccgagttgggcgtgctcgacaaggacgtcgccgaggccattcaggaggcggccgccgaggtcgcggaggggcgttgggacgagcacttccccgtggacgtgttccagaccggctccgggacctcgtccaacatgaacgccaacgaggtcatcgccacgctcgcgaccgaacggctcggcagggacgtacaccccaatgaccacgtgaacgcgtcgcagtcgtcgaacgacgtgttcccgtccagcattcacatcgcggccaccgccgccgtcacccgcgatctggtacccgccctggagcacctggccgccgcgctgggccgcaagtccgaggagttcgcggacgtcgtgaaggccgggcgtacgcatctcatggacgcgacgcccgtgaccctggggcaggagttcggcggatacgcggcccaggtgcggtacggcgtcgagcggctggccgcctccctgccgcggctcgccgaactgcccctcgggggcaccgcggtcgggaccgggatcaacaccccgccgggcttctccgccgccgtcatcgccgaggtcgcccgcgtcaccgggctgccgctcaccgaggcgcgcgaccacttcgaggcgcagggtgcgcgggacgggatcgtcgagaccagcgggcagttgcggaccatcgccgtaggactgacgaagatcgcgaacgatctgcggtggatggcttcggggccgcgtaccgggctctccgagatcagcctgcccgaccttcagccggggtcctcgatcatgcccggcaaggtgaatcccgtgattcccgaggccgtgctgatggtcgccgcacaggtgacgggcaacgacgcgaccgtcgccgccgccggagccgccggcaacttcgaactcaatgtgatgctgcccgtcatcgcgaagaacgtgctggagtccgtccggctgctcgcccatgtctcccggctgctggccgaccgcaccgtcgacgggatcgtcgcccatcgcgaccgggcccgtgagtacgccgagtcgtcaccgtccgtcgtcaccccgctgaacaagtacatcgggtacgaggaggccgcgaaggtcgccaagaaggccctcgccgagcggcagacgatccgtcaggtcgtcctggagagcggatacgtggaccgtggcgacctcaccctggagcagctcgacgaggcgctcgacgtcctgcggatgacgcacccctga

SEQ ID NO: 45293 - protein, 467 aa, Streptomyces avermitilis
MTDEDDKQNYRVEHDSMGEVRVPADAKWRAQTQRAVENFPISGQRLERAHIEALARIKGAAAKVNAELGVLDKDVAEAIQEAAAEVAEGRWDEHFPVDVFQTGSGTSSNMNANEVIATLATERLGRDVHPNDHVNASQSSNDVFPSSIHIAATAAVTRDLVPALEHLAAALGRKSEEFADVVKAGRTHLMDATPVTLGQEFGGYAAQVRYGVERLAASLPRLAELPLGGTAVGTGINTPPGFSAAVIAEVARVTGLPLTEARDHFEAQGARDGIVETSGQLRTIAVGLTKIANDLRWMASGPRTGLSEISLPDLQPGSSIMPGKVNPVIPEAVLMVAAQVTGNDATVAAAGAAGNFELNVMLPVIAKNVLESVRLLAHVSRLLADRTVDGIVAHRDRAREYAESSPSVVTPLNKYIGYEEAAKVAKKALAERQTIRQVVLESGYVDRGDLTLEQLDEALDVLRMTHP

SEQ ID NO: 45294 - DNA, 1386 bp, Streptomyces coelicolor
  CDS (1)..(1386): transl_table=11
atgagcgaataccgcatcgagcacgactccatgggcgaggtccgcgtccccgcggacgccaagtggcgcgcccagacccagcgcgccgtcgagaacttccccgtctccgggcagcgcatcgagcgcgcgcacatcgaggcgctggcgcggatcaagagcgcggcggcgaaggtcaacgccgagctgggagtgctcgacgaggacgtcgccggcgcgatccaggaggcggccggtgaggtggccgaggggaagtgggacgagcacttccccgtcgacgtgttccagaccgggtccgggacctcgtccaacatgaacaccaacgaggtcgtcgccaccctggcgactgaacggctcggccgcgacgtgcatcccaacgaccacgtcaacgcctcccagtcgtccaacgacgtcttcccgtcctcgatccacatcgccgccaccgccgccgtcacccgcgacctgatcccggccctggaccatctcgccggcgccctggagcgcaaggccggggagttcgccgacgtggtgaagtccgggcgtacgcacctcatggacgccacgcccgtcaccctgggccaggagttcggcggttacgcggcccaggtgcggtacggcatcgagcggcttcaggcctcactgccccggctcgccgagctgccgctgggcggcaccgcggtcggcaccggcatcaacaccccgcccggcttctccgccgccgtcatcgaggaggtggcccgcgcgacggggctgccgctgaccgaggcgcgcgaccacttcgaggcgcagggcgcccgggacggcatcgtcgagaccagcgggcagctgcggaccatcggcgtcgggctcacgaagatcgccaacgacctgcgctggatggcgtccggtccgcgcaccgggctcgcggagatctcgctgcccgacctccagcccgggtcgtccatcatgcccggcaaggtcaacccggtgatccccgaggcggtcctcatggtcgccgcccaggtcaccggcaacgacgcgacggtcgccgcggcgggcgcggccggcaacttcgagctgaacgtgatgctgccggtcatcgccaagaacgtgctggagtcggtgcggctgctcgccaacgtctcccggctgctcgccgaccgcaccgtggacgggatcgtggcgcaccccgagcgggcccgcgagtacgccgagtcctcgccctccgtggtcacgccgctcaacaagtacctcgggtacgaggaggccgccaaggtcgccaagagggcgctggccgagcggaagacgatccggcagaccgtgctggagggcggctacgtggaacgcggcgacctcacgcgggagcaactggaccaggccctggacgtgctgcggatgacccgcccgtga

SEQ ID NO: 45295 - protein, 461 aa, Streptomyces coelicolor
MSEYRIEHDSMGEVRVPADAKWRAQTQRAVENFPVSGQRIERAHIEALARIKSAAAKVNAELGVLDEDVAGAIQEAAGEVAEGKWDEHFPVDVFQTGSGTSSNMNTNEVVATLATERLGRDVHPNDHVNASQSSNDVFPSSIHIAATAAVTRDLIPALDHLAGALERKAGEFADVVKSGRTHLMDATPVTLGQEFGGYAAQVRYGIERLQASLPRLAELPLGGTAVGTGINTPPGFSAAVIEEVARATGLPLTEARDHFEAQGARDGIVETSGQLRTIGVGLTKIANDLRWMASGPRTGLAEISLPDLQPGSSIMPGKVNPVIPEAVLMVAAQVTGNDATVAAAGAAGNFELNVMLPVIAKNVLESVRLLANVSRLLADRTVDGIVAHPERAREYAESSPSVVTPLNKYLGYEEAAKVAKRALAERKTIRQTVLEGGYVERGDLTREQLDQALDVLRMTRP

SEQ ID NO: 45296 - DNA, 1485 bp, Rhizopus oryzae
  CDS (1)..(1485)
atgttgcgagcttctgctaccagattcttaagtcaagctaaaaacatgaacaactctcctcgtcttttcagtagtgcctctgctgctttgcaaaaattccgtgctgagcgcgatacttttggtgatctccaagttcctgctgatagatattggggtgctcaaacccaaaggtctcttcaaaattttgacattggtggccctactgaacgtatgcccgaacctttgatccgtgcctttggtgtcctcaaaaaggctgctgctactgtcaacatgacttatggcttggatcctaaagttggtgaagctattcaaaaggctgctgacgaggtcattgatggaagcttgattgatcatttccctcttgttgtctggcaaactggttccggtactcaaaccaagatgaacgttaacgaagttatctccaaccgtgctattgaacttttgggtggtgagcttggtagtaaggctcctgttcatcccaacgatcatgtcaacatgagtcaatcatccaatgacacgttccctactgccatgcacgttgctgctgttgttgaaattcacggtcgacttattcctgctttgaccactttgcgtgatgcccttcaagccaaatccgctgagtttgaacacatcatcaagatcggtcgtactcacttgcaagatgcaactcctttgactctcggtcaagaattctctggttatactcaacaattgacttacggtattgctcgtgtacaaggtaccttggagcgcctctataaccttgctcaaggtggtactgctgttggtactggtcttaacaccagaaaaggtttcgatgccaaggtagctgaagctattgcttctattaccggtcttcctttcaagaccgcccctaataagtttgaagcccttgctgctcacgatgctctcgttgaagctcacggagctctcaataccgttgcttgttctcttatgaagatcgccaacgatatccgttatcttggttctggacctcgctgtggtcttggtgaactttccttgcctgaaaacgaacccggatcttctatcatgcccggtaaggttaatcctactcaatgtgaagctatgaccatggtctgtgctcaagtcatgggtaacaacactgctatttctgttgctggttccaatggtcaattcgagcttaatgtcttcaaacccgtcatgatcaagaacttgatccaatccattcgtcttatttctgatgcctctatttcattcaccaaaaactgtgttgttggtattgaagccaatgaaaagaagattagcagcattatgaatgagtcattgatgttggtcactgctcttaaccctcatattggttacgataaagctgctaaatgtgccaagaaggcccacaaggaaggcaccaccttgaaggaagctgccctttctcttggttacttgacttctgaagaattcgaccagtgggttagacccgaagatatgatctctgccaaggattaa

SEQ ID NO: 45297 - protein, 494 aa, Rhizopus oryzae [sequence omitted]

SEQ ID NO: 45298 - DNA, 1449 bp, Schizosaccharomyces pombe
  CDS (1)..(1449)
atgaattccactactccgacttatcatctcattcccaaaggcggtaagcatggcgagttccgacaggaatctgacacctttggtcccatacaagtccctgcagaaaagtattggggtgctcaaactcagcgttctcttcaaaactttcgaattggtggtgaaaaagagcgacttcctcttcccttagttcgcgcatttggagttttaaagcgtgcggctgcttctgttaatcgtgaattcggtttggatcccaaacttgcagatgccattgaacaggctgcccaagaagtcattgatggtcgtttggatgataacttccccttggttgttttccaaactggctcgggcacccaatccaatatgaacagtaacgaggtaatcgctaatcgtgccatagaaatccttggtggtacgttaggttcgaaaaagcccgttcatccaaacgatcacgttaacatgtctcaatcttctaacgacactttccccactgttatgcatattgcctctgttttgcaaattcacactcatttacttcctgccatgaagcacctccaccgggccttgaagggtaaggaagaggagtttaagaacattatcaaaatcggtcgaacccacatgcaagatgccactcctctttctttaggtcaagaattttccggctatgttactcaggttggttatggcattgagcgcataaacaacgctcttcctcgtctttgtcttctcgctcaaggtggtactgccgtgggtactggactaaatacttttgaaggatttgacgtgaaggttgctgagaaggtttcaaagcttacaaatattgagtttaagaccgcccctaacaagtttgaggctcttgcagcccatgatgcgattgtggagatgagtggtgctttaaatgttattgcttgttctcttatgaaaattgctaacgatattcgtcaacttggttctggccctcgttgtggtttaggcgaattgatccttcctgctaatgaacctggaagttcaatcatgccaggcaaagtaaaccccacccaatgtgaagccttaacaatggtttgtgctcaagtaatgggcaatcatgccactattactgtcgctggtgcctccggacactgtgaactcaatgtttttaaacctcttttagcaaagaacattctaagcagtattcgtcttttaggggatgcttgcgagtcttttactgatcattgcgttgtcggcattgagccaaattacgaaggtattgcccgtcatcttcgtgattccttgatgcttgttactgcgttaaatcctcacatcggttatgataactgtgccaagattgccaagactgctcttaaaaataagagcactctcaagcacgagtttgttactttgggtttcggtacccccgagcaattcgatgaatgggttcgccctgaattaatgatttcagctaagaaagtataa

SEQ ID NO: 45299 - protein, 482 aa, Schizosaccharomyces pombe
MNSTTPTYHLIPKGGKHGEFRQESDTFGPIQVPAEKYWGAQTQRSLQNFRIGGEKERLPLPLVRAFGVLKRAAASVNREFGLDPKLADAIEQAAQEVIDGRLDDNFPLVVFQTGSGTQSNMNSNEVIANRAIEILGGTLGSKKPVHPNDHVNMSQSSNDTFPTVMHIASVLQIHTHLLPAMKHLHRALKGKEEEFKNIIKIGRTHMQDATPLSLGQEFSGYVTQVGYGIERINNALPRLCLLAQGGTAVGTGLNTFEGFDVKVAEKVSKLTNIEFKTAPNKFEALAAHDAIVEMSGALNVIACSLMKIANDIRQLGSGPRCGLGELILPANEPGSSIMPGKVNPTQCEALTMVCAQVMGNHATITVAGASGHCELNVFKPLLAKNILSSIRLLGDACESFTDHCVVGIEPNYEGIARHLRDSLMLVTALNPHIGYDNCAKIAKTALKNKSTLKHEFVTLGFGTPEQFDEWVRPELMISAKKV

SEQ ID NO: 45300 - DNA, 2489 bp, Saccharomyces cerevisiae
  CDS (830)..(2296)
taatcacttctacgagtctagtagatctcttctccttcctataagtggttaatgtattcttcgagaagctcatcatttttttttttcattttttttttttttttcagttttctacaatttcatcaaatcaatggttaaaccgggcagaaaaactaccaagcgttacttttactgatgttagtactactaccgcagttattgcgactactacattaactataactatacaagaaaaaaagtaaagagggctcgtaaagcaaagcttggtatctcctacatagtcaatacatagtagtgagtcgcctatagccattctgtaatgccatttgttaagacgtgtccttaaacccttccgaatcgccgcgggcgacatcataatgtcagtacctaataatggttattattcgtaccctgtggttagagagctatggaagctagcagtaaatgtctctagttcttgctatcactaccatattggagaggcttcaggcccctcccctgagccgatcctcggaatgactaccccgattcccggaatgggcgttcgatgattggctctttcctgtaaagcctttttgcgtttcttataggctatatataatcttcatcactgttgtagacgttaaacaagcatccaacaggaggccggaccgaacacacgggggagtgactctagctctttcttctgggatattcatatcgtttctccattacatacagtcatttttttgcatttttaaattcgtgacttttagtactgcagctgttttttttctcacgtcaagaaattccataaagtctaactattaaacggataagagatacaatcatgttgagatttaccaattgtagttgcaagactttcgtaaaatcgtcatataagcttaatataagaagaatgaactcctcgttcagaactgaaaccgatgcatttggtgagatacacgtgcctgctgataagtactggggtgcccaaactcaaagatcctttcaaaacttcaagattggtggcgctcgtgaaagaatgccattgcctttggtgcatgcatttggtgttttgaagaaatctgccgcgattgtgaatgagtctctggggggattggatcccaagatctccaaggctattcaacaggccgctgacgaagtggcttctggtaagctagacgaccactttccattggttgttttccaaacgggttccggtacccagtctaacatgaatgctaatgaagttatttccaatcgtgccattgagatcctaggaggcaagattggatctaaacaagtccatccaaacaatcattgcaaccaatctcaatcatccaatgatactttccccactgtcatgcatatcgctgccagtttgcaaattcaaaacgagttgatacctgagttgaccaatttaaagaacgcccttgaagccaaatccaaggaatttgaccatattgtgaagatcggtagaacacacttgcaagatgccacgcctttgacactaggtcaagagttttccggttacgtgcaacaagttgagaacggtatccaaagagtggcacattctttgaaaacattgagtttcctggcacaaggtggtactgccgttggtacagggttgaacaccaagcccggattcgatgtcaagatagccgagcaaatttccaaagaaactggactaaagtttcaaaccgcccctaataagttcgaggctttggctgctcacgacgccattgtcgaatgtagcggtgctctaaacacccttgcttgttctcttttcaaaatagcgcaagatataagatacttagggtccgggccacgttgcggctaccatgaactaatgctgccagagaatgaaccaggttcctcaatcatgcctggtaaagttaacccaacccaaaacgaggcattgactcaagtgtgtgtgcaagtcatgggtaacaatgcagctatcacgtttgccggctctcaaggtcaattcgagttaaatgtcttcaagccagtcatgatcgccaatctattgaattcgatcaggttaattactgatgccgcatattcatttagagtgcactgtgttgaaggtatcaaagccaatgagcctcgtattcatgagttgttgactaaatctttaatgttagtcaccgctttgaaccctaagatcggttatgatgccgcttccaaggtcgccaagaatgctcataagaagggcattaccttgaaggaaagtgcattggaattgggtgtattgactgaaaaggaatttgatgaatgggttgttcctgaacacatgctaggtcctaaataaacgagctaaatacctaataatatacaagttttttatgtcttattatatgaaggaaaataaggaagtggagagaatttgtgattcagcaatggtccctccgctaaggtcccgcctctggccagttatgtcagaagaggagcataggcatacattccatttttgatggcttaatggggcccataaatttacatca

SEQ ID NO: 45301 - protein, 488 aa, Saccharomyces cerevisiae
MLRFTNCSCKTFVKSSYKLNIRRMNSSFRTETDAFGEIHVPADKYWGAQTQRSFQNFKIGGARERMPLPLVHAFGVLKKSAAIVNESLGGLDPKISKAIQQAADEVASGKLDDHFPLVVFQTGSGTQSNMNANEVISNRAIEILGGKIGSKQVHPNNHCNQSQSSNDTFPTVMHIAASLQIQNELIPELTNLKNALEAKSKEFDHIVKIGRTHLQDATPLTLGQEFSGYVQQVENGIQRVAHSLKTLSFLAQGGTAVGTGLNTKPGFDVKIAEQISKETGLKFQTAPNKFEALAAHDAIVECSGALNTLACSLFKIAQDIRYLGSGPRCGYHELMLPENEPGSSIMPGKVNPTQNEALTQVCVQVMGNNAAITFAGSQGQFELNVFKPVMIANLLNSIRLITDAAYSFRVHCVEGIKANEPRIHELLTKSLMLVTALNPKIGYDAASKVAKNAHKKGITLKESALELGVLTEKEFDEWVVPEHMLGPK

SEQ ID NO: 45302 - DNA, 1488 bp, Glycine max
  CDS (1)..(1488)
atggcgttgtacgtgctctcgcgtcgtttatcagctggatccaactcaaccacgctcctcgccttgcgttttgtttcctctaccagatcctactcctcttccttcagggaagaaagagatacctttggagccattcaagttccctccgagaaattatggggagcacaaactcaaagatcgttgcagaacttcgatatcggtgggccccgcgaacgcatgcccgaacccatcattcgcgcctttggcgtcttgaagaaatgcgctgctaaggtgaacatggagtatggtcttgatcccgccgttggaaaagcgattatgcaagcggcacaagaagtggccgagggaaaactaaacgaccattttcctctcgttgtatggcaaactggcagtggcactcaaagtaacatgaatgctaacgaggttattgcaaaccgagcagcagagattcttggccataagcggggtgagaagtttgtgcacccaaatgaccatgtcaatagatcacagtcttctaatgatacattcccaactgtaatgcacattgcagccgcaacggaaataaactcaagactgatccccagccttaaaacgttacacgatactctaaactcaaagtcagttgaatttaaagatattgtcaagattggacgcactcatactcaagatgcaacacctttgactcttggacaagagtttagtggatatactacacaagtgaagtacggtattgatagagtaattgacactttgccacacatgtatcagcttgcccagggtggtacagctgtagggactggattgaatacaaagaaggggtttgatgccaagatagcagcagcagtagctgaggaaacaaatctgccttttgtcacggcagaaaataagtttgaggccttggctgcccatgatgcttttgttgaaactagtggagcccttaacactgttgtggcttcattgatgaagattgctaatgatatacggttattgggaagtggtccacgctgcggtcttggggagctcattcttcctgaaaacgaaccaggaagcagtattatgcctgggaaggttaacccgacccagtgtgaggctttgacgatggtgtgtgcacaggtcatgggaaaccatgttgcaatcacagtgggtggatcaaatggtcattttgagctcaatgtgttcaagccaatgattgccaattgtctcctgcattcgctgagactgcttggagattcgtctgcttcctttgaaaagaattgtttgagaggtattcaagctaatagggaaagaatttcaaaattactgcatgagtcacttatgcttgtcacatccttaaacccaaaaatcggttatgacaaggcagcaacagttgccaagacagctcacaaagaggggactactcttaaggaagctgcattgaaactcggagtgctctgctctgaagattttgacaagcttgtggtacctgagaaaatgcttggaccatctgattga

SEQ ID NO: 45303 - protein, 495 aa, Glycine max
MALYVLSRRLSAGSNSTTLLALRFVSSTRSYSSSFREERDTFGAIQVPSEKLWGAQTQRSLQNFDIGGPRERMPEPIIRAFGVLKKCAAKVNMEYGLDPAVGKAIMQAAQEVAEGKLNDHFPLVVWQTGSGTQSNMNANEVIANRAAEILGHKRGEKFVHPNDHVNRSQSSNDTFPTVMHIAAATEINSRLIPSLKTLHDTLNSKSVEFKDIVKIGRTHTQDATPLTLGQEFSGYTTQVKYGIDRVIDTLPHMYQLAQGGTAVGTGLNTKKGFDAKIAAAVAEETNLPFVTAENKFEALAAHDAFVETSGALNTVVASLMKIANDIRLLGSGPRCGLGELILPENEPGSSIMPGKVNPTQCEALTMVCAQVMGNHVAITVGGSNGHFELNVFKPMIANCLLHSLRLLGDSSASFEKNCLRGIQANRERISKLLHESLMLVTSLNPKIGYDKAATVAKTAHKEGTTLKEAALKLGVLCSEDFDKLVVPEKMLGPSD

SEQ ID NO: 45304 - DNA, 1485 bp, Hordeum vulgare
  CDS (1)..(1485)
atggcgatggttctgcgacgcctcgcgggcgcatcaggctcgccgtcggcggctgcactgctgctccgtccggcgctgacccgcccgatctccaccgacttccgcgaggagcgcgacacattcggccccatccgcgtacccaacgacaagttgtggggcgcgcagacacagagatcgctgcaaaattttgacattggcggcgagcgcgagcggatgcccgtgcctatcatccgcgcctttggcgtgctaaaaaagtgcgctgctaaggtgaatatggagtatggacttgatccaacaattgggaaggcaataatgcaggcggctgaggaggttgcagagggaaagttggatgatcactttccgcttgttatctggcaaactggcagtggcacacaaagcaacatgaatgccaatgaggtaattgcaaacagggcagctgagatacttggacataagcgtggtgacaagtttgtacaccctaatgatcatgtgaacaggtcacagtcctcaaatgatacatttccaactgttatgcacatagcagcagctgtagagatcaattcaaggtttatcccaagtctggagcagttgcataagtcacttcattcaaagtctgatgaatttaaagacattattaaaattgggcgtacacatacccaagatgccaccccactgactcttggtcaagagttcagtggttatgctacacaggtgaaatatggaattgaccgaattgcatgcaccttaccaaggatgtatcagcttgctcaaggtgggactgcagtcggcactggcttgaacacgaagaaaggatttgatggcaaaattgcagctgctgtggctgaggaaacagaactacctttcgtgacagcagagaacaagtttgaagctttggcagctcatgacgcttttgttgagagcagtggtgctgtgaacacaatttctgcatctcttatgaagatagcaaatgacatacgcttgctgggaagtggccctcgttgtggacttggtgaacttatcctaccagaaaatgagcctgggagcagcattatgcctggaaaggtcaatcctacccagtgtgaagctctgaccatggtttgtgctcaggttatgggtaatcatgtcggtgttacaataggtggttcaaatgggcattttgaactgaacgtttataagccaatgattgctgctggattgcttcgatcattgagattattaggggatgcatctgtatcctttgagaaaaactgtgtcaggggaatagaagcaaaccataagagaatttcacaattgttgcacgagtctttgatgttggtaacatcgttgaaccccaaaattggctatgacaatgctgcagctgttgctaagaaagctcacaaagaaggaacaacactgaaggaagctgctttaagcctcagagttttgacggaaaaggaattccatgaactcgttgttccagagaaaatgattggcccttctgattaa

SEQ ID NO: 45305 - protein, 494 aa, Hordeum vulgare
MAMVLRRLAGASGSPSAAALLLRPALTRPISTDFREERDTFGPIRVPNDKLWGAQTQRSLQNFDIGGERERMPVPIIRAFGVLKKCAAKVNMEYGLDPTIGKAIMQAAEEVAEGKLDDHFPLVIWQTGSGTQSNMNANEVIANRAAEILGHKRGDKFVHPNDHVNRSQSSNDTFPTVMHIAAAVEINSRFIPSLEQLHKSLHSKSDEFKDIIKIGRTHTQDATPLTLGQEFSGYATQVKYGIDRIACTLPRMYQLAQGGTAVGTGLNTKKGFDGKIAAAVAEETELPFVTAENKFEALAAHDAFVESSGAVNTISASLMKIANDIRLLGSGPRCGLGELILPENEPGSSIMPGKVNPTQCEALTMVCAQVMGNHVGVTIGGSNGHFELNVYKPMIAAGLLRSLRLLGDASVSFEKNCVRGIEANHKRISQLLHESLMLVTSLNPKIGYDNAAAVAKKAHKEGTTLKEAALSLRVLTEKEFHELVVPEKMIGPSD

SEQ ID NO: 45306 - DNA, 1485 bp, Triticum aestivum
  CDS (1)..(1485)
atggcgatggttctgcggcgcctcgccggcgcatcaggctcgccttcggcggctgcactgctgctccggccggcgctgacccgcccgatctccaccggcttccgcgaggagcgcgacacgttcggccccatccgcgtgcccaacgacaagttgtggggcgcgcagacacagagatcgctgcaaaatttcgacattggcggcgagcgcgagcggatgcctgtgcctatcatccgcgcctttggcgtgctaaaaaagtgcgccgctaaggtgaatatggagtatggccttgatccaacaattgggaaggcaataatgcaggcggccgaggaggttgcagagggaaagttggatgatcactttccgcttgttatctggcaaactggcagtggcacacaaagcaacatgaatgccaatgaggtaattgcaaatagggcggctgagatacttggacataagcgtggtgacaagtttgtacaccctaatgaccatgtgaacaggtcacagtcctcgaatgatacatttcccactgttatgcacatagcagcagctgtagagatcaattcaaggtttatcccaagtctggagcagttgcataagtcacttcattcaaagtctgatgagtttaaagacatcattaaaattgggcgtacacatacccaagatgccaccccactgactcttggtcaagagttcagtggttatgctacacaggtgaaatatggaattgaccgaattgcatgtaccttaccaaggatgtatcagcttgctcaaggtgggactgcagttggtactggcttgaacacgaagaaaggatttgatggcaaaattgcagctgctgtggctgaggaaacagaactacctttcgtgacagcagagaacaagtttgaagctttggcagcacatgatgcttttgttgagagcagtggtgctgtgaacacaatttctgcatctcttatgaagatagcaaatgacatacgcttgctgggaagtggccctcgttgtggacttggtgaacttatcctaccagaaaatgagcctgggagcagcattatgcctggaaaggttaatcctacccagtgtgaggctctgaccatggtttgtgctcaggttatgggcaatcatgtcggtgttacaataggtggttcaaatgggcattttgaactgaacgtttataagccaatgattgctgctggattgcttcgatcattgagattattaggggatgcatctgtatcctttgagaaaaactgtgtcaggggaatagaagcaaaccataagagaatttcacaattgttgcacgagtctttgatgttggtgacatcgttgaaccccaaaattggctatgacaatgctgcagccgttgctaagaaagctcacaaagaaggaacaacactgaaggaagctgctttaagccttggagttttgacggaaaaggaattccatgaactcgttgttccagagaaaatgattggcccttctgattaa

SEQ ID NO: 45307 - protein, 494 aa, Triticum aestivum
MAMVLRRLAGASGSPSAAALLLRPALTRPISTGFREERDTFGPIRVPNDKLWGAQTQRSLQNFDIGGERERMPVPIIRAFGVLKKCAAKVNMEYGLDPTIGKAIMQAAEEVAEGKLDDHFPLVIWQTGSGTQSNMNANEVIANRAAEILGHKRGDKFVHPNDHVNRSQSSNDTFPTVMHIAAAVEINSRFIPSLEQLHKSLHSKSDEFKDIIKIGRTHTQDATPLTLGQEFSGYATQVKYGIDRIACTLPRMYQLAQGGTAVGTGLNTKKGFDGKIAAAVAEETELPFVTAENKFEALAAHDAFVESSGAVNTISASLMKIANDIRLLGSGPRCGLGELILPENEPGSSIMPGKVNPTQCEALTMVCAQVMGNHVGVTIGGSNGHFELNVYKPMIAAGLLRSLRLLGDASVSFEKNCVRGIEANHKRISQLLHESLMLVTSLNPKIGYDNAAAVAKKAHKEGTTLKEAALSLGVLTEKEFHELVVPEKMIGPSD

SEQ ID NO: 45308 - DNA, 1497 bp, Zea mays
  CDS (1)..(1497)
atggcgatggctctgcgccgccttgcgggcgtgtccggatcgccgtcggcctcctctgccgcggccacggtgctactccggtcggcgctgacccgcccgatctccaccggcttccgcgaggagcgcgacaccttcggtcccatccaagtccccaacgacaagctgtggggcgcgcagacgcagagatcgctgcagaactttgacattggcggggagcgtgagaggatgcccgttcccatcatccgtgcctttggcgtgctaaaaaagtgcgccgctaaggtgaatatggactatggccttgatccaacaatagggaaggccataatacaggcagctgaggaggtcgcagagggaaagttggatgatcacttcccacttgttatctggcaaactggcagtggcacacaaagcaacatgaatgccaatgaggtaattgcaaatagggcatctgagatccttggacacaagcgcggtgagaagtttgtgcacccaaatgaccatgtgaataggtcacaatcttcaaatgatacatttcccactgtaatgcatatagcgacggccgttgagatacattcgaggtttatcccaagtttgcaacagttgcatgattcacttcattcgaaaactattgagtttaaagacataattaaaattggacgtacacatacccaagatgccaccccattgactcttggccaagaattcagtggctacactacacaggtcaaatatggaattgaccgcattaattgtacattacctcggatgtaccagcttgctcaaggtggaactgcagttggaactggcttgaacaccaagaaaggatttgatgccaaaatagctgctgcagtggctgaggaaacaaacctaccctttgtgacagcagagaacaagtttgaagctttggcagcacatgacgcttttgttgagagcagtggtgccgtaaatacaatttctgcatctcttatgaagatagcaaacgacatacgtttgctaggaagtggtcctcggtgtggtcttggtgaactaatcctaccagaaaatgagcctgggagcagcattatgcctgggaaagttaatccaacccagtgtgaggctctgacaatggtttgtgcacaggtcatgggtaatcatgttggtgttacagttggtggtgccaatgggcattttgaactgaatgtttttaagccaatgatcgcagccggattacttcgatcgttgaggttgttaggggatgcatccgtgtccttcgagaaaaattgtgtcaggggaattcaagcaaaccacaagagaatttcacaacttttgcatgagtctctgatgttagtgacatctttgaaccctaaaattggctatgacaatgctgcagctgttgctaagaaagcccacaaagaaggaaccacgttgaaggaggctgcattagaccttggagtattaacggagcaagaattccatgagcttgtcgttccagagaaaatgattggtccttctgattga

SEQ ID NO: 45309 - protein, 498 aa, Zea mays
MAMALRRLAGVSGSPSASSAAATVLLRSALTRPISTGFREERDTFGPIQVPNDKLWGAQTQRSLQNFDIGGERERMPVPIIRAFGVLKKCAAKVNMDYGLDPTIGKAIIQAAEEVAEGKLDDHFPLVIWQTGSGTQSNMNANEVIANRASEILGHKRGEKFVHPNDHVNRSQSSNDTFPTVMHIATAVEIHSRFIPSLQQLHDSLHSKTIEFKDIIKIGRTHTQDATPLTLGQEFSGYTTQVKYGIDRINCTLPRMYQLAQGGTAVGTGLNTKKGFDAKIAAAVAEETNLPFVTAENKFEALAAHDAFVESSGAVNTISASLMKIANDIRLLGSGPRCGLGELILPENEPGSSIMPGKVNPTQCEALTMVCAQVMGNHVGVTVGGANGHFELNVFKPMIAAGLLRSLRLLGDASVSFEKNCVRGIQANHKRISQLLHESLMLVTSLNPKIGYDNAAAVAKKAHKEGTTLKEAALDLGVLTEQEFHELVVPEKMIGPSD

SEQ ID NO: 45310 - DNA, 26 bp, Artificial sequence
  primer
atgtgtttaaagcaaatcattggcag

SEQ ID NO: 45311 - DNA, 25 bp, Artificial sequence
  primer
ttactgttcgctttcatcagtatag

SEQ ID NO: 45312 - protein, 461 aa, Artificial sequence
  consensus sequence
  Variant (2)..(2): Xaa in position 2 is any amino acid
  Variant (4)..(4): Xaa in position 4 is any amino acid
  Variant (5)..(10): Xaa in position 5 to 10 is any or no amino acid
  Variant (12)..(13): Xaa in position 12 to 13 is any amino acid
  Variant (15)..(17): Xaa in position 15 to 17 is any amino acid
  Variant (20)..(24): Xaa in position 20 to 24 is any amino acid
  Variant (26)..(27): Xaa in position 26 to 27 is any amino acid
  Variant (29)..(29): Xaa in position 29 is any amino acid
  Variant (31)..(33): Xaa in position 31 to 33 is any amino acid
  Variant (36)..(36): Xaa in position 36 is any amino acid
  Variant (38)..(53): Xaa in position 38 to 53 is any amino acid
  Variant (54)..(55): Xaa in position 54 to 55 is any or no amino acid
  Variant (57)..(57): Xaa in position 57 is any amino acid
  Variant (61)..(62): Xaa in position 61 to 62 is any amino acid
  Variant (64)..(75): Xaa in position 64 to 75 is any amino acid
  Variant (76)..(76): Xaa in position 76 is any or no amino acid
  Variant (78)..(79): Xaa in position 78 to 79 is any amino acid
  Variant (81)..(92): Xaa in position 81 to 92 is any amino acid
  Variant (93)..(94): Xaa in position 93 to 94 is any or no amino acid
  Variant (96)..(100): Xaa in position 96 to 100 is any amino acid
  Variant (102)..(102): Xaa in position 102 is any amino acid
  Variant (104)..(104): Xaa in position 104 is any amino acid
  Variant (107)..(108): Xaa in position 107 to 108 is any amino acid
  Variant (112)..(112): Xaa in position 112 is any amino acid
  Variant (116)..(117): Xaa in position 116 to 117 is any amino acid
  Variant (119)..(119): Xaa in position 119 is any amino acid
  Variant (121)..(121): Xaa in position 121 is any amino acid
  Variant (123)..(123): Xaa in position 123 is any amino acid
  Variant (124)..(124): Xaa in position 124 is any or no amino acid
  Variant (126)..(127): Xaa in position 126 to 127 is any amino acid
  Variant (128)..(129): Xaa in position 128 to 129 is any or no amino acid
  Variant (131)..(132): Xaa in position 131 to 132 is any amino acid
  Variant (133)..(136): Xaa in position 133 to 136 is any or no amino acid
  Variant (139)..(139): Xaa in position 139 is any amino acid
  Variant (143)..(144): Xaa in position 143 to 144 is any amino acid
  Variant (147)..(147): Xaa in position 147 is any amino acid
  Variant (150)..(151): Xaa in position 150 to 151 is any amino acid
  Variant (154)..(157): Xaa in position 154 to 157 is any amino acid
  Variant (159)..(165): Xaa in position 159 to 165 is any amino acid
  Variant (166)..(166): Xaa in position 166 is any or no amino acid
  Variant (168)..(173): Xaa in position 168 to 173 is any amino acid
  Variant (175)..(180): Xaa in position 175 to 180 is any amino acid
  Variant (182)..(184): Xaa in position 182 to 184 is any amino acid
  Variant (186)..(189): Xaa in position 186 to 189 is any amino acid
  Variant (190)..(191): Xaa in position 190 to 191 is any or no amino acid
  Variant (193)..(193): Xaa in position 193 is any amino acid
  Variant (197)..(198): Xaa in position 197 to 198 is any amino acid
  Variant (202)..(202): Xaa in position 202 is any amino acid
  Variant (204)..(204): Xaa in position 204 is any amino acid
  Variant (211)..(230): Xaa in position 211 to 230 is any amino acid
  Variant (231)..(237): Xaa in position 231 to 237 is any or no amino acid
  Variant (239)..(239): Xaa in position 239 is any amino acid
  Variant (242)..(242): Xaa in position 242 is any amino acid
  Variant (246)..(246): Xaa in position 246 is any amino acid
  Variant (248)..(270): Xaa in position 248 to 270 is any amino acid
  Variant (271)..(271): Xaa in position 271 is any or no amino acid
  Variant (273)..(276): Xaa in position 273 to 276 is any amino acid
  Variant (277)..(277): Xaa in position 277 is any or no amino acid
  Variant (279)..(285): Xaa in position 279 to 285 is any amino acid
  Variant (287)..(291): Xaa in position 287 to 291 is any amino acid
  Variant (293)..(295): Xaa in position 293 to 295 is any amino acid
  Variant (297)..(298): Xaa in position 297 to 298 is any amino acid
  Variant (300)..(300): Xaa in position 300 is any amino acid
  Variant (303)..(303): Xaa in position 303 is any amino acid
  Variant (306)..(306): Xaa in position 306 is any amino acid
  Variant (308)..(308): Xaa in position 308 is any amino acid
  Variant (310)..(310): Xaa in position 310 is any amino acid
  Variant (315)..(315): Xaa in position 315 is any amino acid
  Variant (317)..(318): Xaa in position 317 to 318 is any amino acid
  Variant (320)..(321): Xaa in position 320 to 321 is any amino acid
  Variant (324)..(327): Xaa in position 324 to 327 is any amino acid
  Variant (334)..(334): Xaa in position 334 is any amino acid
  Variant (339)..(341): Xaa in position 339 to 341 is any amino acid
  Variant (343)..(350): Xaa in position 343 to 350 is any amino acid
  Variant (352)..(352): Xaa in position 352 is any amino acid
  Variant (355)..(364): Xaa in position 355 to 364 is any amino acid
  Variant (366)..(368): Xaa in position 366 to 368 is any amino acid
  Variant (371)..(373): Xaa in position 371 to 373 is any amino acid
  Variant (375)..(382): Xaa in position 375 to 382 is any amino acid
  Variant (384)..(386): Xaa in position 384 to 386 is any amino acid
  Variant (388)..(397): Xaa in position 388 to 397 is any amino acid
  Variant (399)..(400): Xaa in position 399 to 400 is any amino acid
  Variant (403)..(404): Xaa in position 403 to 404 is any amino acid
  Variant (406)..(415): Xaa in position 406 to 415 is any amino acid
  Variant (417)..(419): Xaa in position 417 to 419 is any amino acid
  Variant (422)..(422): Xaa in position 422 is any amino acid
  Variant (426)..(426): Xaa in position 426 is any amino acid
  Variant (429)..(436): Xaa in position 429 to 436 is any amino acid
  Variant (438)..(442): Xaa in position 438 to 442 is any amino acid
  Variant (444)..(454): Xaa in position 444 to 454 is any amino acid
  Variant (455)..(460): Xaa in position 455 to 460 is any or no amino acid
RXEXXXXXXXDXXGXXXVPXXXXXGXXTXRXXXNFXIXXXXXXXXXXXXXXXXXXKXAAAXXNXXXXXXXXXXXXXIXXAXXXXXXXXXXXXXXFXXXXXQXGXGTXXNMNXNEVXXNXAXEXXGXXXXGXXXXXXPNXHVNXXQSXNDXXPTXXXXAXXXXXXXXLXXXXXXLXXXXXXKXXXFXXXXXXKXGRTXXQDAXPXTLGQEFXXXXXXXXXXXXXXXXXXXXXXXXXXXGXTAXGTGXNXXXXXXXXXXXXXXXXXXXXXXXXAXXXXXAXXXXXXXVXXXXXLXXXAXXLXKIXNDXRXLXSGPRXGXXEXXLPXXXXGSSIMPXKVNPXXXEXXXXXXXXVXGNXXXXXXXXXXGXXXLNXXXPXXXXXXXXSXXXLXXXXXXXXXXCXXGIXXNXXXXXXXXXXSXXXVTXLNPXIGXXXXXXXXKXXXXXGXXXXXXXXXXXXXXXXXL

SEQ ID NO: 45313 - protein, 54 aa, Artificial sequence
  protein pattern
  Variant (2)..(2): Xaa in position 2 is any amino acid
  Variant (3)..(3): Xaa in position 3 is Ala, Cys, Gly, Ser or Thr
  Variant (4)..(4): Xaa in position 4 is Asn or Gln
  Variant (6)..(6): Xaa in position 6 is Ile, Leu or Val
  Variant (8)..(8): Xaa in position 8 is any or no amino acid
  Variant (10)..(10): Xaa in position 10 is any amino acid
  Variant (12)..(12): Xaa in position 12 is any or no amino acid
  Variant (15)..(15): Xaa in position 15 is any amino acid
  Variant (16)..(16): Xaa in position 16 is Ala, Cys, Asn, Ser or Thr
  Variant (18)..(19): Xaa in position 18 to 19 is any amino acid
  Variant (21)..(21): Xaa in position 21 is Phe, Ile, Leu or Val
  Variant (22)..(23): Xaa in position 22 to 23 is any amino acid
  Variant (25)..(26): Xaa in position 25 to 26 is any amino acid
  Variant (27)..(27): Xaa in position 27 is Ala, Glu or Gln
  Variant (28)..(28): Xaa in position 28 is any amino acid
  Variant (35)..(35): Xaa in position 35 is Ala or Gly
  Variant (37)..(37): Xaa in position 37 is Ile or Val
  Variant (40)..(40): Xaa in position 40 is Ser, Thr or Val
  Variant (41)..(42): Xaa in position 41 to 42 is any amino acid
  Variant (44)..(44): Xaa in position 44 is any amino acid
  Variant (45)..(45): Xaa in position 45 is Ile, Leu, Met or Val
  Variant (46)..(46): Xaa in position 46 is Asn, Ser or Thr
  Variant (47)..(53): Xaa in position 47 to 53 is any amino acid
  Variant (54)..(54): Xaa in position 54 is Ala, Gly or Ser
KXXXDXRXLXSXGPXXGXXEXXXPXXXXGSSIMPXKXNPXXXEXXXXXXXXXXX

SEQ ID NO: 45314 - protein, 28 aa, Artificial sequence
  protein pattern
  Variant (2)..(2): Xaa in position 2 is any amino acid
  Variant (3)..(4): Xaa in position 3 to 4 is any or no amino acid
  Variant (6)..(6): Xaa in position 6 is any amino acid
  Variant (7)..(8): Xaa in position 7 to 8 is any or no amino acid
  Variant (10)..(10): Xaa in position 10 is Gly or Thr
  Variant (12)..(12): Xaa in position 12 is Ala or Ser
  Variant (15)..(15): Xaa in position 15 is Gln or Ser
  Variant (16)..(16): Xaa in position 16 is any amino acid
  Variant (20)..(20): Xaa in position 20 is any amino acid
  Variant (24)..(24): Xaa in position 24 is Ile, Leu or Val
  Variant (25)..(25): Xaa in position 25 is Ala, Cys, Ser or Thr
  Variant (26)..(26): Xaa in position 26 is Gly, Asn, Ser or Thr
  Variant (27)..(27): Xaa in position 27 is any amino acid
  Variant (28)..(28): Xaa in position 28 is Ala, Gly or Leu
FXXXVXXXQXGXGTXXNMNXNEVXXXXX

SEQ ID NO: 45315 - protein, 27 aa, Artificial sequence
  protein pattern
  Variant (2)..(3): Xaa in position 2 to 3 is any amino acid
  Variant (4)..(4): Xaa in position 4 is Phe, Ile, Leu, Met or Val
  Variant (5)..(5): Xaa in position 5 is any amino acid
  Variant (7)..(7): Xaa in position 7 is any amino acid
  Variant (8)..(8): Xaa in position 8 is Ala or Gly
  Variant (11)..(13): Xaa in position 11 to 13 is any amino acid
  Variant (16)..(16): Xaa in position 16 is any amino acid
  Variant (18)..(18): Xaa in position 18 is Ile, Leu, Met or Val
  Variant (19)..(19): Xaa in position 19 is any amino acid
  Variant (20)..(20): Xaa in position 20 is Ala, Leu or Val
  Variant (22)..(22): Xaa in position 22 is any amino acid
  Variant (24)..(24): Xaa in position 24 is Phe or Ile
  Variant (25)..(25): Xaa in position 25 is any amino acid
  Variant (26)..(26): Xaa in position 26 is Ala, Gly, Ser or Thr
  Variant (27)..(27): Xaa in position 27 is Phe, Trp or Tyr
FXXXXKXXRTXXXDAXPXXXGXEXXXX

SEQ ID NO: 45316 - protein, 21 aa, Artificial sequence
  protein pattern
  Variant (2)..(2): Xaa in position 2 is any amino acid
  Variant (3)..(3): Xaa in position 3 is Asp or His
  Variant (4)..(4): Xaa in position 4 is any amino acid
  Variant (6)..(6): Xaa in position 6 is any amino acid
  Variant (7)..(7): Xaa in position 7 is Ala, Cys, Gly or Ser
  Variant (10)..(10): Xaa in position 10 is Gln, Ser or Thr
  Variant (13)..(14): Xaa in position 13 to 14 is any amino acid
  Variant (16)..(16): Xaa in position 16 is Ala, Ser or Thr
  Variant (17)..(19): Xaa in position 17 to 19 is any amino acid
  Variant (20)..(20): Xaa in position 20 is Ile, Leu, Met or Val
  Variant (21)..(21): Xaa in position 21 is Ala, Gly, Ser or Thr
NXXXNXXQSXNDXXPXXXXXX

SEQ ID NO: 45317 - protein, 29 aa, Artificial sequence
  protein pattern
  Variant (2)..(2): Xaa in position 2 is Ile or Leu
  Variant (3)..(3): Xaa in position 3 is any amino acid
  Variant (4)..(4): Xaa in position 4 is Ala, Pro or Val
  Variant (5)..(15): Xaa in position 5 to 15 is any amino acid
  Variant (16)..(16): Xaa in position 16 is Gly, Ser or Thr
  Variant (17)..(17): Xaa in position 17 is Ala, Ile, Leu, Pro or Val
  Variant (18)..(18): Xaa in position 18 is any amino acid
  Variant (19)..(19): Xaa in position 19 is Ile, Leu or Val
  Variant (20)..(20): Xaa in position 20 is Ala, Ile or Val
  Variant (22)..(22): Xaa in position 22 is any amino acid
  Variant (24)..(27): Xaa in position 24 to 27 is any amino acid
  Variant (29)..(29): Xaa in position 29 is His or Tyr
GXXXXXXXXXXXXXXXXXXXTXLXXXXGX

SEQ ID NO: 45318 - protein, 15 aa, Artificial sequence
  protein pattern
  Variant (2)..(2): Xaa in position 2 is any or no amino acid
  Variant (4)..(4): Xaa in position 4 is Ala, Ile or Val
  Variant (5)..(5): Xaa in position 5 is any amino acid
  Variant (6)..(6): Xaa in position 6 is Ala, Ser or Thr
  Variant (7)..(7): Xaa in position 7 is any amino acid
  Variant (9)..(9): Xaa in position 9 is Ala, Gly or Ser
  Variant (10)..(11): Xaa in position 10 to 11 is any amino acid
  Variant (13)..(13): Xaa in position 13 is Phe or Tyr
  Variant (14)..(14): Xaa in position 14 is any amino acid
  Variant (15)..(15): Xaa in position 15 is Ile, Leu or Val
YXGXXXXRXXXNXXX

SEQ ID NO: 45319 - protein, 19 aa, Artificial sequence
  protein pattern
  Variant (2)..(2): Xaa in position 2 is any amino acid
  Variant (3)..(3): Xaa in position 3 is Phe or Leu
  Variant (4)..(4): Xaa in position 4 is Glu or Gln
  Variant (7)..(7): Xaa in position 7 is Ala or Val
  Variant (8)..(9): Xaa in position 8 to 9 is any amino acid
  Variant (11)..(12): Xaa in position 11 to 12 is Ile, Leu, Met or Val
  Variant (13)..(15): Xaa in position 13 to 15 is any amino acid
  Variant (16)..(16): Xaa in position 16 is Phe, Ile, Leu, Met or Val
  Variant (17)..(18): Xaa in position 17 to 18 is any amino acid
GXXXLNXXXPXXXXXXXXS

SEQ ID NO: 45320 - protein, 15 aa, Artificial sequence
  protein pattern
  Variant (2)..(2): Xaa in position 2 is Ala or Gly
  Variant (3)..(3): Xaa in position 3 is Ser or Thr
  Variant (5)..(5): Xaa in position 5 is Ala, Ile or Val
  Variant (9)..(9): Xaa in position 9 is Ile, Leu, Met or Val
  Variant (11)..(11): Xaa in position 11 is Ala, Cys, Gly, Ser or Thr
  Variant (12)..(14): Xaa in position 12 to 14 is any amino acid
  Variant (15)..(15): Xaa in position 15 is Phe or Tyr
GXXAXGTGXNXXXXX

SEQ ID NO: 45321 - DNA, 294 bp, Escherichia coli
  CDS (1)..(294): transl_table=11
atggtcggcggcggtgggatagcgccattaaccgggagtgagtcggatatttgcgaactgcaaaagatgtattttcttccggctatccgcggcaaagggctggcaaaaaaactggccttaatggcgatggagcaggcgcgagagatgggtttcaaacgctgctatctggaaacgaccgcttttttaaaggaagccattgcgctttatgagcatttgggctttgagcatatcgactatgcgcttggctgcacgggccatgtcgattgtgaagtgcggatgttgcgcgaactctaa

SEQ ID NO: 45322 - protein, 97 aa, Escherichia coli
MVGGGGIAPLTGSESDICELQKMYFLPAIRGKGLAKKLALMAMEQAREMGFKRCYLETTAFLKEAIALYEHLGFEHIDYALGCTGHVDCEVRMLREL

SEQ ID NO: 45323 - DNA, 486 bp, Vibrio cholerae O1 biovar eltor str. N16961
  CDS (1)..(486): transl_table=11
atgagagtagaaatcgtaccgattcgacctgagtttgacgctgagatttgccaaattattcaaagcgtcggcgctgaatttggcgcgattggtgaagggtttggcccatcggatgccgaagtgcttgccatgagccagtactatcgagagcaagaccgtagcgcgtattttgttgcgttattggaggggaaggtagtcggcggtggtggcattgcaccttttgctggccatacggatttgtgtgagctgaagaagttgtttctgctccccacaagccgcggccatggcgtaggccgggcgctcagcgaacattgtttgaattttgcgaaacagcaaggctataccaaatgttatttagataccctttctagcatgactcaagcgatcaagctctaccaacagcttggttttgagcacttaacgcagcccatggcggggacagagcataatggctgcgacgtgtggatgctgaaatcactcaactag

SEQ ID NO: 45324 - protein, 161 aa, Vibrio cholerae O1 biovar eltor str. N16961
MRVEIVPIRPEFDAEICQIIQSVGAEFGAIGEGFGPSDAEVLAMSQYYREQDRSAYFVALLEGKVVGGGGIAPFAGHTDLCELKKLFLLPTSRGHGVGRALSEHCLNFAKQQGYTKCYLDTLSSMTQAIKLYQQLGFEHLTQPMAGTEHNGCDVWMLKSLN

SEQ ID NO: 45325 - DNA, 294 bp, Escherichia coli O157:H7 EDL933
  CDS (1)..(294): transl_table=11
gtggtcggcggcggtgggattgcgccattagcaggtagtgaatcggacatttgcgaactgcaaaagatgtattttcttccggctattcgcggcaaagggctggcaaaaaaactggccttaaaggcgatggaggaggcaagagaaatgggcttcaaacgctgctatctggaaacgaccgcttttttgaaagaagcgattggtttgtatgaacatttaggttttcaacatatcgactatgcacttggctgcacgggccatgttgattgtgaagtgcggatgctacgcgaactctaa

SEQ ID NO: 45326 - protein, 97 aa, Escherichia coli O157:H7 EDL933
MVGGGGIAPLAGSESDICELQKMYFLPAIRGKGLAKKLALKAMEEAREMGFKRCYLETTAFLKEAIGLYEHLGFQHIDYALGCTGHVDCEVRMLREL

SEQ ID NO: 45327 - DNA, 471 bp, Clostridium acetobutylicum ATCC 824
  CDS (1)..(471): transl_table=11
atgttaataagagagatagagaagaaggataatgagcaggttgaaacacttataaggacttgtttaatagagtttggtgctgataagccgggttgcgcatggacagatcctgatttgggccgtttttatgagatatatcaagataaaaaatctaagtattgggttgttgaggaagaaggtaagataatagcgggctgtggcataggacctctaaatggggctgagaatgtatgtgaacttcaaaagatgtattcatacaaggaagcaaggggaactggaattgcaaaagatttgctaggtctagctttggattttgcaaaaaaatactatgacaaatgctatcttgaaaccttttctaatatgactgcggctaataaattctatgttaaaaatggatttaagaaattagaaaagcctttaattgaaacagatcactacgcatgtgatgtttggtacataaaggagttgtaa

SEQ ID NO: 45328 - protein, 156 aa, Clostridium acetobutylicum ATCC 824
MLIREIEKKDNEQVETLIRTCLIEFGADKPGCAWTDPDLGRFYEIYQDKKSKYWVVEEEGKIIAGCGIGPLNGAENVCELQKMYSYKEARGTGIAKDLLGLALDFAKKYYDKCYLETFSNMTAANKFYVKNGFKKLEKPLIETDHYACDVWYIKEL

SEQ ID NO: 45329 - DNA, 474 bp, Oceanobacillus iheyensis HTE831
  CDS (1)..(474): transl_table=11
atgttcattagagagattgaggaaaaagataatcgtcaaatagaaaaactaataaaagaatctttagaatcggtaagtcttgatcgagaaggaacagcttattatgacccacaattacctcgtttatctcagtactatagttcaatccaggatggttcgtattggatagctgtggagggtgaagaagtagtaggggggattggtattgccccttatgtaaaagagaaaggtatatgtgaattacaaaagttttatgtacatcaagattatcaaggcaaaggaattggcagaaagttattaagaactgctttggaatttgctgaaagaaaatataatcaatgctatttagaaacaagacatgaattaaaacaagcaaataaattatacgagcagaacgactttacattattaccgagtccaatagaaggctcagatcattcgtttatggatcgatggtacatagttgacttatag

SEQ ID NO: 45330 - protein, 157 aa, Oceanobacillus iheyensis HTE831
MFIREIEEKDNRQIEKLIKESLESVSLDREGTAYYDPQLPRLSQYYSSIQDGSYWIAVEGEEVVGGIGIAPYVKEKGICELQKFYVHQDYQGKGIGRKLLRTALEFAERKYNQCYLETRHELKQANKLYEQNDFTLLPSPIEGSDHSFMDRWYIVDL

SEQ ID NO: 45331 - DNA, 504 bp, Shigella flexneri 2a str. 301
  CDS (1)..(504): transl_table=11
atgaataacattgcgccgcaatcacctgtaatgcgtcgcctgacgctgcaggataatcctgctatcgccagcgtcatccgtcaggtttacgcagagtatggtcttaccgccgataaaggctacaccgttgccgatccgaatctcgacgaactgtatcaagtgtacagccagcctggccatgcttattgggtggttgaatacaatggcgaagtggtcggcggcggcgggattgcgccattaacaggtagtgaagcggacatttgcgaactgcagaaaatgtactttcttcccgctattcgcggtaaagggctagcgaaaaaactggccttaatggcgatggagcaggcacgagagatgggcttcaaacgctgctatctggaaacgaccgcttttttaaaggaagccattgcgctttatgagcatttgggctttgagcatatcgactatgcgcttggctgcacgggccatgtcgattgtgaagtgcggatgctacgcgaactctaa

SEQ ID NO: 45332 - protein, 167 aa, Shigella flexneri 2a str. 301
MNNIAPQSPVMRRLTLQDNPAIASVIRQVYAEYGLTADKGYTVADPNLDELYQVYSQPGHAYWVVEYNGEVVGGGGIAPLTGSEADICELQKMYFLPAIRGKGLAKKLALMAMEQAREMGFKRCYLETTAFLKEAIALYEHLGFEHIDYALGCTGHVDCEVRMLREL

SEQ ID NO: 45333 - DNA, 930 bp, Shewanella oneidensis MR-1
  CDS (1)..(930): transl_table=11
atggcaaatgatttaggctcttctagccaactcaggcagctctcccgctatatggtgagacatttaggcatgcttaacgcagcggtaggtgatttacccctctcccccgtgcaggcccatgccttgcttgagataggtaatcaaccacaaaccattaaggatctcgccaacaaactcagcattgataaatccaatgccagccgagccatcaaacacttgatcgataagcatctcgcccaaagtcaaatgcacccacgggatagtcgttgccttgtcgtgcaactgactcctgcgggtaaaaagctactcgcaaaactcgataaccaacaaaatcaactatttaaagaaatcttagcgcaactcacccctgatcaaattcaacatattgagcaggcgctgatgcagtacaaccaagcaatacataaaaccaaacagcaatcgggttgtattattcgtgtagcctcagccaccgatgatgccgccatagcccaagttatccgcgatgtatctgccgaatatggtttgaccgcagataaaggctatagcgtggccgatcccaccttagattgtttaagtcagatttattcgcaagcgggtgctcaatattgggttgttgaatatgaaggtaaagtcgttggtggtgcaggcattgccccacttgccaataatgcaggcatttgtgaactacaaaaaatgtactttatgcccgaaatccgcggtaaaggcttagctaaacgtttagcactactcgctctcgactttgcccgtcaaacgggttaccaaagctgctacttagaaacgactgcgatattaaaagaagcactcaagctctacgaacacttaggtttttaccctctcagcgcaccactaggaaataccggccacgatgcctgtgagatcccgatgttattgccattacagcctgaataa

SEQ ID NO: 45334 - protein, 309 aa, Shewanella oneidensis MR-1
MANDLGSSSQLRQLSRYMVRHLGMLNAAVGDLPLSPVQAHALLEIGNQPQTIKDLANKLSIDKSNASRAIKHLIDKHLAQSQMHPRDSRCLVVQLTPAGKKLLAKLDNQQNQLFKEILAQLTPDQIQHIEQALMQYNQAIHKTKQQSGCIIRVASATDDAAIAQVIRDVSAEYGLTADKGYSVADPTLDCLSQIYSQAGAQYWVVEYEGKVVGGAGIAPLANNAGICELQKMYFMPEIRGKGLAKRLALLALDFARQTGYQSCYLETTAILKEALKLYEHLGFYPLSAPLGNTGHDACEIPMLLPLQPE

SEQ ID NO: 45335 - DNA, 495 bp, Corynebacterium efficiens YS-314
  CDS (1)..(495): transl_table=11
atgattactcgccccatcgagcagcgggataatgcggcggtgcgggagatcatccgtgagtcgctggaatcacatgggctcgccatccccggttcggcgtatttcgatccccagctcggtgagctcgcccagttctatgacagtcttccgcacgccggttactgggtggtggaggtggagggccgtgtgatgggtggtgtcggcatcgcccccttcggcatcgcccccttcggcaccgccatctgcgagctgcagaaactctatctgcgtcccgaggtgcaggggcgcggtctgtcccgtctgcttatggacgaggccctgtccttcgcggcctgccactatgggcagtgctatctggagaccacccactcactgcgcaccgcgtgcattctgtatgagaaatacggcttccggttgctgccggaaccgctacccgggtcagagcactccgccatggatgcgtggtacctgaaggatctcgaaccgcatccgtga

SEQ ID NO: 45336 - protein, 164 aa, Corynebacterium efficiens YS-314
MITRPIEQRDNAAVREIIRESLESHGLAIPGSAYFDPQLGELAQFYDSLPHAGYWVVEVEGRVMGGVGIAPFGIAPFGTAICELQKLYLRPEVQGRGLSRLLMDEALSFAACHYGQCYLETTHSLRTACILYEKYGFRLLPEPLPGSEHSAMDAWYLKDLEPHP

SEQ ID NO: 45337 - DNA, 495 bp, Vibrio vulnificus CMCP6
  CDS (1)..(495): transl_table=11
atgtcagaaaaaatggactttgtcttgcgccctatcaccgttgaagacaacgcctcaatcgccaatgtgattcgtcaagtctcggcggagtatgggttaaccgccgataaaggctacagtgttgccgatccaaccctagacgatctttttagcatctactcacaagcaaatgccgcctattgggtggtggaacatcaagggaagatcgtcggtggaggtggcttttctgcgctagcaggggtcgaaggtgtctgcgagttacaaaaaatgtacttcttacccatttgccgtgggcagggtctggccaagaaaatcgtttcgctcagccgcagcgccgcgaaaaagatgggttatcaacgctgttacctagaaaccactgcctgcttgaaagaagccattgctctgtatgaaaagctcggatttgaacatctgcaagcgccactcgggcaaaccggacatgacgcttgtgaagtggtgatgatttgccatttataa

SEQ ID NO: 45338 - protein, 164 aa, Vibrio vulnificus CMCP6
MSEKMDFVLRPITVEDNASIANVIRQVSAEYGLTADKGYSVADPTLDDLFSIYSQANAAYWVVEHQGKIVGGGGFSALAGVEGVCELQKMYFLPICRGQGLAKKIVSLSRSAAKKMGYQRCYLETTACLKEAIALYEKLGFEHLQAPLGQTGHDACEVVMICHL

SEQ ID NO: 45339 - DNA, 519 bp, Vibrio parahaemolyticus RIMD 2210633
  CDS (1)..(519): transl_table=11
gtgtatctaaaaggcttaaccaaagtatgccaagcaaaccaatttgttcttcgcccactcagcaaggccgataacccacaagtcgccgacgtgattcgtcaggtttccgcggaatatggtctaaccgcagacaaaggatacggcgtcgcagacccaacacttgatgacatgcattctgtgtataaccaacaaggtgccgcttattgggtgattgagtacaatggcgtcatcgtcggtggtggtggttttgctccactagcaggcgaacctaacgtgtgcgaactacaaaaaatgtactttttaccccaaactcgcggacacggcttggcaaaacgtatcgtcgcgatgagtttgcaactggcgaagcaacttggctataaaaagtgttatttggaaacgacagagtgcttaaaagaagcgataggtttgtatgagaagttaggctttgagcatttacatgccccgcttggacaaacagggcatgatgcatgtgaagtagtgatgcttaaaacactgtaa

SEQ ID NO: 45340 - protein, 172 aa, Vibrio parahaemolyticus RIMD 2210633
MYLKGLTKVCQANQFVLRPLSKADNPQVADVIRQVSAEYGLTADKGYGVADPTLDDMHSVYNQQGAAYWVIEYNGVIVGGGGFAPLAGEPNVCELQKMYFLPQTRGHGLAKRIVAMSLQLAKQLGYKKCYLETTECLKEAIGLYEKLGFEHLHAPLGQTGHDACEVVMLKTL

SEQ ID NO: 45341 - DNA, 516 bp, Salmonella enterica subsp. enterica serovar Typhi Ty2
  CDS (1)..(516): transl_table=11
ttgagccatattatgaataatgtcgcctcgccaacgctcacggtgcaccgaatcactaccgccgacaatgccgctattgcccgtgtcatccgtcaggtttcagcggaatacggacttaccgccgataaaggttataccgttgccgaccccaatctggatgaactgtatcaggtttatagccaaccgggcgcggcctactgggtggtagagcaaaacggttgtgtggtgggcggcggcggcgtggcgccgttatcctgtagcgaaccagacatttgtgaactgcaaaaaatgtattttttaccggtaattcgtggtcaggggctggcgaaaaagctggcgctgatggcgctggatcatgcccgtgaacagggttttaaacgctgctatctggaaacaacggcttttttacgcgaggcgattgcgctatacgaacgtttaggatttgaacatattagcgaaccgctcggctgcaccggacatgtcgattgcgaagtgaggatgttaaaggatctctga

SEQ ID NO: 45342 - protein, 171 aa, Salmonella enterica subsp. enterica serovar Typhi Ty2
MSHIMNNVASPTLTVHRITTADNAAIARVIRQVSAEYGLTADKGYTVADPNLDELYQVYSQPGAAYWVVEQNGCVVGGGGVAPLSCSEPDICELQKMYFLPVIRGQGLAKKLALMALDHAREQGFKRCYLETTAFLREAIALYERLGFEHISEPLGCTGHVDCEVRMLKDL

SEQ ID NO: 45343 - DNA, 939 bp, Chromobacterium violaceum ATCC 12472
  CDS (1)..(939): transl_table=11
atggttgcgtatcgcaactttaaaggacgcgtcatgaacgagcgcgagctgcgcgcgctgtcgcgcgacatcgtcagggaactgggcatgctggccggccgttgcggcgaggtggatctgagcccggtggaggctcacctgctgatcgagctggaggcggccccggcgaacaatcagcagctggccgagcgcttgcgggtggacaaatccaacagcagccggccgttgcagcggctggccgagcgcggtctgatcgcctggcgggcggatccggccgacgggcgcagcaagctggccgagctgacggcagcgggccgcgattggctaaagcggctgcacgcggcgatggacgccgacatggagcgggtgctggctcaactggacgacggggagcgggcggcgctggagtcgggcctgcgcgtttaccgcagggcgctgtcgcaggcggataggcagcgcggctacgtcatccgcccgctggcggcggccgacaatggcgagctggcggcgctgatccggcgggtatcggccgagtacggcctgggcgagggctgcagctttctcgatccgcagctggacgcgctgttccaggtttacgaccggccgggctcttgctatctggtggtgatcgggccggacggacgactgcttggcggcggcggcatcgccccgctggcgggcggcgaacaagatgtatgcgaactgcagaagatgtatttcgacgcggcgctgcgcggtcgcgggctggggaggcgattattgcgccggctgctggccgaggcgagggccttgggctaccggcgcgcttatctggaaaccacggccgcgctgggcgaggcgacggccttgtacgcatcggaaggcttcgccaggctgaatgggcgctggggcgataccgggcacggcgcttgcgagatcgcgatggcgcgggagctgtaa

SEQ ID NO: 45344 - protein, 312 aa, Chromobacterium violaceum ATCC 12472
MVAYRNFKGRVMNERELRALSRDIVRELGMLAGRCGEVDLSPVEAHLLIELEAAPANNQQLAERLRVDKSNSSRPLQRLAERGLIAWRADPADGRSKLAELTAAGRDWLKRLHAAMDADMERVLAQLDDGERAALESGLRVYRRALSQADRQRGYVIRPLAAADNGELAALIRRVSAEYGLGEGCSFLDPQLDALFQVYDRPGSCYLVVIGPDGRLLGGGGIAPLAGGEQDVCELQKMYFDAALRGRGLGRRLLRRLLAEARALGYRRAYLETTAALGEATALYASEGFARLNGRWGDTGHGACEIAMAREL

SEQ ID NO: 45345 - DNA, 495 bp, Vibrio vulnificus YJ016
  CDS (1)..(495): transl_table=11
atgtcagaaaaaatggactttgtcttgcgccctatcaccgttgaagacaacgcctcaatcgccaatgtgattcgtcaagtctcggcggagtatgggttaaccgccgataaaggctacagtgttgccgacccaaccctagacgatctttttagcatctactcacaagcaaatgccgcctattgggtggtggaacatcaagggaagatcgtcggtggcggtggcttttctgcgctagcaggagtccaaggtgtctgcgagttacaaaaaatgtacttcttacccatttgccgtgggcagggtctggccaagaaaatcgtttcgctcagccgcagcgccgcgaaaaagatgggttatcaacgctgttacctagaaaccactgcctgcttgaaagaagccattgctctgtatgaaaagctcggatttgaacatctgcaagcgccactcgggcaaaccggacatgacgcttgtgaagtggtgatgatttgccatttataa

SEQ ID NO: 45346 - protein, 164 aa, Vibrio vulnificus YJ016
MSEKMDFVLRPITVEDNASIANVIRQVSAEYGLTADKGYSVADPTLDDLFSIYSQANAAYWVVEHQGKIVGGGGFSALAGVQGVCELQKMYFLPICRGQGLAKKIVSLSRSAAKKMGYQRCYLETTACLKEAIALYEKLGFEHLQAPLGQTGHDACEVVMICHL

SEQ ID NO: 45347 - DNA, 504 bp, Erwinia carotovora subsp. atroseptica SCRI1043
  CDS (1)..(504): transl_table=11
atgacaaccgcgacctccgccaatcttcaggtacgcccaatcaccgcgcaggatgatgccgctatcgctcaggtcatccgccaagtttctgccgaatttggtttgacggccgacaaaggctataccgtttccgatcccaatctggacgcgttgtttgctctgtatagccagccgaaaagcgcctattgggtggttgaatatgagggccacatagttggaggcggcggtattgcgccactggtcgcgggcgaagaggatgtgtgtgaattacagaaaatgtatttcctacccgtcgtacgaggcaaagggctagcacgtcagttagcgatacaggcacttgattttgctcgtcagcatggctttcgccgttgctatctggaaacaaccggccacctgaccagcgcgattcggctgtatgagtctctgggcttcgatcctattccccattcaatgggcaacacgggccataccgattgtgaagtgacgatgctgaaggtgctgtaa

SEQ ID NO: 45348 - protein, 167 aa, Erwinia carotovora subsp. atroseptica SCRI1043
MTTATSANLQVRPITAQDDAAIAQVIRQVSAEFGLTADKGYTVSDPNLDALFALYSQPKSAYWVVEYEGHIVGGGGIAPLVAGEEDVCELQKMYFLPVVRGKGLARQLAIQALDFARQHGFRRCYLETTGHLTSAIRLYESLGFDPIPHSMGNTGHTDCEVTMLKVL

SEQ ID NO: 45349 - DNA, 528 bp, Desulfotalea psychrophila LSv54
  CDS (1)..(528): transl_table=11
ttgagctataaaattttacagaaaacttcagaaggaaagctgacaatgcaatatggtattaaagaaattcaggccgagcaggacgaggcagtttgtcgaatcattaaagccgtcggtgctgagcacggagccatcggcgaaggttttggcccctccgacccagaagtagagagaatgagtcatttctatatgggagagcagaagagtatctaccttattgccacagttaatggtcaagttgtcggtggtagtggtattgctgccttcaatggcagtgctgagatctgtgaactgcgaaaactatttttactggcggagagtcgtggcctggggctgggcaaaaaattaaccgatgaatgtttaacctttgcccgcgaaaatggctacaggcagtgctatctggatacccttgccaatatgaaaccagcaatagccctctatgagaagttgggattcagacatctgcagagaccacttgagggtaccatccacagcggttgcgatgtttggatgctcaaggatctatag

SEQ ID NO: 45350 - protein, 175 aa, Desulfotalea psychrophila LSv54
MSYKILQKTSEGKLTMQYGIKEIQAEQDEAVCRIIKAVGAEHGAIGEGFGPSDPEVERMSHFYMGEQKSIYLIATVNGQVVGGSGIAAFNGSAEICELRKLFLLAESRGLGLGKKLTDECLTFARENGYRQCYLDTLANMKPAIALYEKLGFRHLQRPLEGTIHSGCDVWMLKDL

SEQ ID NO: 45351 - DNA, 504 bp, Yersinia pseudotuberculosis IP 32953
  CDS (1)..(504): transl_table=11
atgaccacaaccacacctatccgactcctggtgcgccccatcaccgcaagagataacctcgccattgccaatgttatccgtgaggtttcggcagaattcggcctgactgcggacaaaggctataccgtgtccgatcctaatcttgatcacttgtatgaattgtacagccagccacgtagcgcttattgggtgattgaggtggatggtcacatcgcgggtggtggtggtgtcgcgccactgttgggcggtgaagccgatctatgcgaattacagaaaatgtattttctgccaatactgcgtggtaagggtttagcgaaacagttggcactacaggcgttggcatttgcccgccagcagggatttggtcgctgttatttggaaaccactgccagcctgaccagtgctgttggtctgtacgaaagattaggttttgaacatattggcggtgcgatggggaataccggccatgtagattgcgaagtgacgatgctgaaaacgctttaa

SEQ ID NO: 45352 - protein, 167 aa, Yersinia pseudotuberculosis IP 32953
MTTTTPIRLLVRPITARDNLAIANVIREVSAEFGLTADKGYTVSDPNLDHLYELYSQPRSAYWVIEVDGHIAGGGGVAPLLGGEADLCELQKMYFLPILRGKGLAKQLALQALAFARQQGFGRCYLETTASLTSAVGLYERLGFEHIGGAMGNTGHVDCEVTMLKTL

SEQ ID NO: 45353 - DNA, 993 bp, Bacteroides fragilis NCTC 9343
  CDS (1)..(993): transl_table=11
atgatatgcagtctttttgttgataaagtcaacaaagagacttatctttgtgccatgaagcaagaatatataagtcgtataaggtctttcaacagatattatacgaaaatattaggtatactcaacaaatactatttaggaagtgaattgggacttccggaggtgcgtattattcaggatgtttatttacaccctgacaggagttctaaagatatatccaatgaattaaacatggataaaggcttgttatcccgcttattaaaacaattggaacagaaagagtatatatttcgaaaaagcacggaaaaggataatcgtatggggttggtaaatctcacagaaaaaggatgtgaggtttattaccgcttgaatactgctgcaaatcaatctattgaaaggatattctcacacttagaagatcgtcaactacaaagattggttcattgtatggattctatttataagataataaatagtgtggagaccggtcttaccgttgataataatgagccaattgttatacgaccgatagaagaatcagataatgcttcaatagcatcggtgcttcgtgcgtcagtagaggagcatggagctcctaaggtcggtactttttatgatgatccgcatacggatagaatgtttcagacttttaatattaaaggtgcagaatactggatagtggaaagtaatggtgtaatattaggcggaggtggcttttatccgaccaaaggtttaccacatggttatgctgagttatcgaaatttcattttagaccggagcttagagggagaggtattggaaaacgtttacttcaattcatagagcagcgtgctgttagtgccggatatgtgtatatgtatattgtttcttatcatcagtttggaaatgctgttagtatgtatgaaaaatacggatatgaacatatagacaatgcattagatcagtcgggcttgtatcaagatgcacctttccacatggtaaaagcactctga

SEQ ID NO: 45354 - protein, 330 aa, Bacteroides fragilis NCTC 9343
MICSLFVDKVNKETYLCAMKQEYISRIRSFNRYYTKILGILNKYYLGSELGLPEVRIIQDVYLHPDRSSKDISNELNMDKGLLSRLLKQLEQKEYIFRKSTEKDNRMGLVNLTEKGCEVYYRLNTAANQSIERIFSHLEDRQLQRLVHCMDSIYKIINSVETGLTVDNNEPIVIRPIEESDNASIASVLRASVEEHGAPKVGTFYDDPHTDRMFQTFNIKGAEYWIVESNGVILGGGGFYPTKGLPHGYAELSKFHFRPELRGRGIGKRLLQFIEQRAVSAGYVYMYIVSYHQFGNAVSMYEKYGYEHIDNALDQSGLYQDAPFHMVKAL

SEQ ID NO: 45355 - DNA, 483 bp, Colwellia psychrerythraea 34H
  CDS (1)..(483): transl_table=11
gtgagttatatagttcaagaaatcaaatctcaacacgatattcaagtgtgcgaaattattaaacaagtaggcaaagaatacggtgctactggcgaggggtttggtccatctgattctgaagttcaagcgatgagccagaactacaaagatgaaagctctagccgctatatcgtcgcaagtatagaagggcgtatcgtcggtggctgtggtatcgctgcttttaataacagtaatgaaatttgtgaattacgaaaattatttcttttaccagaaagcagaggtttaggtattggtaaaaatcttaccgaaggttgccttaagtatgccaaaagtaaaggttataaaaaatgctatttggataccctaacaagcatgaagtcagcaatcgctttatacgagaagttggggtttagccatctagataagccacttcaaggtactattcataacggttgtgatgtttggatgctaaaagagctttag

SEQ ID NO: 45356 - protein, 160 aa, Colwellia psychrerythraea 34H
MSYIVQEIKSQHDIQVCEIIKQVGKEYGATGEGFGPSDSEVQAMSQNYKDESSSRYIVASIEGRIVGGCGIAAFNNSNEICELRKLFLLPESRGLGIGKNLTEGCLKYAKSKGYKKCYLDTLTSMKSAIALYEKLGFSHLDKPLQGTIHNGCDVWMLKEL

SEQ ID NO: 45357 - DNA, 474 bp, Streptococcus agalactiae A909
  CDS (1)..(474): transl_table=11
atgattatccgtccgattattaaaaatgatgaccaagcagttgcacaattaattcgacaaagtttacgcgcctatgatttagataaacctgatacagcatattcagaccctcacttagatcatttgacctcatactacgaaaaaatagagaagtcaggattctttgtcattgaggagagagatgagattattggctgtggcggctttggtccgctgaaaaatctaattgcagagatgcagaaggtgtacattgcagaacgtttccgtggtaaggggcttgctactgatttagtgaaaatgattgaagtagaagctcgaaaaattgggtatagacaactttatttagagacagccagtactttgagtagggcaactgcggtttataagcatatgggatattgtgccttatcgcaaccaatagcaaatgatcaaggtcatacagctatggatatttggatgattaaagatttataa

SEQ ID NO: 45358 - protein, 157 aa, Streptococcus agalactiae A909
MIIRPIIKNDDQAVAQLIRQSLRAYDLDKPDTAYSDPHLDHLTSYYEKIEKSGFFVIEERDEIIGCGGFGPLKNLIAEMQKVYIAERFRGKGLATDLVKMIEVEARKIGYRQLYLETASTLSRATAVYKHMGYCALSQPIANDQGHTAMDIWMIKDL

SEQ ID NO: 45359 - DNA, 981 bp, Desulfovibrio desulfuricans G20
  CDS (1)..(981): transl_table=11
atggaaaaagtaacatcgtgttttatcaggaagatatcacgcgatctggcgcgggaactgcgccttgtgggcagttatgcagaccagaaggggctgacggtggcggaggcgtatgtgcttatcgagctgggtgagcatggaacgttgtctgtgcagcaggtggcgcagttgctgctgattgatgcggccgatgccagccgggcggtacagtcacttattttgcagaagcttgccgtgctggtgcccgaaggcccgccggacagggcaaagggagtggcattgaccgaagccggacaccggaggctggcagaagtgcacggcgagatggacagtctggtgcgtgcagggctggaccagctgacccccggagaacagaaagcagtggctgacggcctgatgacctatgccagagggttgcggtacagcaggctgcaggaaggatttgtcatcagacccgtccggcctgccgacaatgctgcggtggcagagattatccgcagcgtttcacaagagcacggtctgacggccgaagccggttatgccgtgggggatgctgcggtggacgccgtaagtcaggcgtatgccgcggacggagcctgttactgggtggtggaacatcaggggcgggtgctgggcggtggcggcgtggcgccgcttgccggttgtgacggcagcatctgcgagctgcagaagatgtatctgctggcggaatgcagaggacgcgggctgggcaggcggctggtgctcacagcgctggagtttgcccgcagccacggatacagggcctgttatctggagaccaccggaatattgcagcaggccgcacggctgtacgaatcgctggggttcgagcgctgcacagcgcagggcgatacgggacacagtgtctgtgagctgcggtatatcatgcattttaccacgcaggcatcatcagcccgcggggaacaccccccgcagccctgctgcggctgcggcgcctga

SEQ ID NO: 45360 - protein, 326 aa, Desulfovibrio desulfuricans G20
MEKVTSCFIRKISRDLARELRLVGSYADQKGLTVAEAYVLIELGEHGTLSVQQVAQLLLIDAADASRAVQSLILQKLAVLVPEGPPDRAKGVALTEAGHRRLAEVHGEMDSLVRAGLDQLTPGEQKAVADGLMTYARGLRYSRLQEGFVIRPVRPADNAAVAEIIRSVSQEHGLTAEAGYAVGDAAVDAVSQAYAADGACYWVVEHQGRVLGGGGVAPLAGCDGSICELQKMYLLAECRGRGLGRRLVLTALEFARSHGYRACYLETTGILQQAARLYESLGFERCTAQGDTGHSVCELRYIMHFTTQASSARGEHPPQPCCGCGA

SEQ ID NO: 45361 - DNA, 507 bp, Myxococcus xanthus DK 1622
  CDS (1)..(507): transl_table=11
atgagcacggaagagctgacgctgcgacgcatcgaatcgagggatgacgccgcggtggccggcatcatccggacggtgatgccggagttcggcgcggacggccctggcttcgccatccacgaccccgaggtgtcagcgatgagcgccgcctacgcccggccccggcacgtctacttcgtcgtggagcgggcggggcgtgtcatcggtggcggtggaatcgccccacttgaaggaggagacgcgggcgtctgcgagctgcggaagatgtacttcctccccgaagcccgaggcctcggccagggcgagcgcctgctccgacgctgcctggagttcgcacgtgaagcgggcttccagcgctgctacctggagacgctggccggaatgcagcaggcccagaagctctaccgccgcatgggcttcgagccactgtgcgcgcccatgggcagcacgggccacttcggctgcgaccactggtacgcccgggacttgtcaaagccgctcgactga

SEQ ID NO: 45362 - protein, 168 aa, Myxococcus xanthus DK 1622
MSTEELTLRRIESRDDAAVAGIIRTVMPEFGADGPGFAIHDPEVSAMSAAYARPRHVYFVVERAGRVIGGGGIAPLEGGDAGVCELRKMYFLPEARGLGQGERLLRRCLEFAREAGFQRCYLETLAGMQQAQKLYRRMGFEPLCAPMGSTGHFGCDHWYARDLSKPLD

SEQ ID NO: 45363 - DNA, 513 bp, Synechococcus sp. CC9311
  CDS (1)..(513): transl_table=11
ttgagtgaatggcaagacatagagctgcggcctctgcacccattggatgaaacggccttgtccggagtgattcgggcagcacttgttgaatttggtgctgatcgacccggttttgcttggcaagatccggagcttgatgccatgagcaagacctacgccgcgcctggatggatttattacgtggcagtagagggtgggaatgttgtcgggggagctggaattggtcctctaattggtgtggaagccacttgcgaattgcagaagatgtacttagctccttcagcacgggggaagggtgttggttggcggcttatggggagcctgttggaacaggctcgtgtgctgggctatcgctgtgtttatctcgaaactctttcgggaatggcggcggctcaacggctttattgggcttggggattcctaaagattgaacagccccttggtcaaacagggcacggtggttgtgactgttggttcctcaaggaactgcatggacctggggtttctggatag

SEQ ID NO: 45364 - protein, 170 aa, Synechococcus sp. CC9311
MSEWQDIELRPLHPLDETALSGVIRAALVEFGADRPGFAWQDPELDAMSKTYAAPGWIYYVAVEGGNVVGGAGIGPLIGVEATCELQKMYLAPSARGKGVGWRLMGSLLEQARVLGYRCVYLETLSGMAAAQRLYWAWGFLKIEQPLGQTGHGGCDCWFLKELHGPGVSG

SEQ ID NO: 45365 - DNA, 1023 bp, Shewanella sp. MR-4
  CDS (1)..(1023): transl_table=11
atgattcgaactgagccactgccagcccacactagtgcttgcatggctcaactttggttaaccctgatggcattcaatccgactatggcaaatgatcccggctcatctagccaactgagacacctttcccgctatatggtcagacacttaggcatgctcaatgcggcctttggcgatttacctctgtccccagtacaggcccacgccttgtttgagataggcaatcaaccgcaaaccattaaggaactcgcctgcaaactgagcatagataaatccaatgctagccgcgcaatcaagcacttagtcgataaaaacctcgcccagagccaaatgcatccgcgggataatcgctgcctcgtcgttcaactgactcctgcgggtaaaaagctgctcgctaagttagatagccagcaaaatcaactctttcaagaaatcttggctcagctgaccccagagcaaattcaacaaatcgagcaagccctaatgcaatacaaccaagccatacataaagccaaacaacaatcgggttatcttatccgtgaagcgaccgccgccgatgatgctgccattgcccaagtgatccgcgcagtttccgccgaatacggcttaaccgcggataaaggctatagcgtggccgacccaaccttagattgtttaagccaaatctattcgcagccgggcgcccaatactgggtgatagagcatgaaggccaagtggttggcggcgcaggcatagcgccactggctaacaatgccggtatttgtgaactgcaaaaaatgtactttatacccgagatccgtggtaaaggcttagccaaacgtttagcactgctggctctagacttcgcccgtggagcgggttatcagagctgctatctcgaaaccaccgcattactcaaagaggccctaaagctctacgaacacttagggtttaactacttaagcgccccccttggcaatactggccacgacgcctgtgaaatcccaatgctattaccactgcacgccgaactaaccccataa

SEQ ID NO: 45366 - protein, 340 aa, Shewanella sp. MR-4
MIRTEPLPAHTSACMAQLWLTLMAFNPTMANDPGSSSQLRHLSRYMVRHLGMLNAAFGDLPLSPVQAHALFEIGNQPQTIKELACKLSIDKSNASRAIKHLVDKNLAQSQMHPRDNRCLVVQLTPAGKKLLAKLDSQQNQLFQEILAQLTPEQIQQIEQALMQYNQAIHKAKQQSGYLIREATAADDAAIAQVIRAVSAEYGLTADKGYSVADPTLDCLSQIYSQPGAQYWVIEHEGQVVGGAGIAPLANNAGICELQKMYFIPEIRGKGLAKRLALLALDFARGAGYQSCYLETTALLKEALKLYEHLGFNYLSAPLGNTGHDACEIPMLLPLHAELTP

SEQ ID NO: 45367 - DNA, 981 bp, Shewanella sp. MR-7
  CDS (1)..(981): transl_table=11
atggctcaactttggttaaccctgatggcattcaatccgactatggcaaatgatcccggctcatctagccaactgagacacctttcccgctatatggtcagacacttaggcatgctcaatgcggcctttggcgatttacctctgtccccagtacaggcccacgccttgtttgagataggcaatcaaccgcaaaccattaaggaactcgcctgcaaactgagcatagataaatccaatgccagccgcgcaatcaagcacttagtcgataaaaacctcgcccagagccaaatgcatccgcgggataatcgctgtctcgtcgttcaactgactcctgcgggtaaaaagctgctcgcaaaattagatagccagcaaaatcaactctttcaagaaatcttggctcagctgacccctgagcaaattcaacaaatcgagcaagctcttatgcaatacaaccaagccatacataaagccaaacaacaatcgggttatcttatccgtgaagcgaccgccgccgatgatgctgccattgcccaagtgatccgcgcagtttccgccgaatacggcttaaccgcggataaaggctatagcgtggccgacccaaccttagattgtttaagccaaatctattcgcagccgggcgcccaatactgggtgatagagcatgaaggccaagtggttggcggcgcaggcatagcgccactggctaacaatgccggtatttgtgaactgcaaaaaatgtactttatacccgagatccgtggtaaaggcttagccaaacgtttagcactgctggctctagacttcgcccgtggagcgggttatcagagctgctatctcgaaaccaccgcattactcaaagaggccctaaagctctacgaacacttagggtttaactacttaagcgccccacttggtaatactggccacgacgcctgtgaaatcccaatgctattaccactgcacgccgaactgaatgaatag

SEQ ID NO: 45368 - protein, 326 aa, Shewanella sp. MR-7
MAQLWLTLMAFNPTMANDPGSSSQLRHLSRYMVRHLGMLNAAFGDLPLSPVQAHALFEIGNQPQTIKELACKLSIDKSNASRAIKHLVDKNLAQSQMHPRDNRCLVVQLTPAGKKLLAKLDSQQNQLFQEILAQLTPEQIQQIEQALMQYNQAIHKAKQQSGYLIREATAADDAAIAQVIRAVSAEYGLTADKGYSVADPTLDCLSQIYSQPGAQYWVIEHEGQVVGGAGIAPLANNAGICELQKMYFIPEIRGKGLAKRLALLALDFARGAGYQSCYLETTALLKEALKLYEHLGFNYLSAPLGNTGHDACEIPMLLPLHAELNE

SEQ ID NO: 45369 - DNA, 489 bp, Leuconostoc mesenteroides subsp. mesenteroides ATCC 8293
  CDS (1)..(489): transl_table=11
atgattattagaacaataaaaaaagaggataatttgattgtgaaaaaaattatccaagaatctctagaatctttaaactttgctattgaagggactgcatactttgatccccaattgggccgcctcaatgaatactatgataatttagataacgcaaaatattgggtagtcgaattagataataaaatagttggcggtatcgggattgcaccatttgacaatgaacaaggaatttgtgagcttcaaaagttatatctaattcctgaagcacaaggattaggaatctccagaaaattgatggaaaccgcgttatcctttgccagcactcattataagtcctgttatctggaaacaaatcatgatcttaaagttgcttgtattttatacgaaaaatttggctttaaattattaaattctccaatttctggttctgggcattttgcaatgaatgcttggtatttgaaggatctagaggtagtaaaccaatag

SEQ ID NO: 45370 - protein, 162 aa, Leuconostoc mesenteroides subsp. mesenteroides ATCC 8293
MIIRTIKKEDNLIVKKIIQESLESLNFAIEGTAYFDPQLGRLNEYYDNLDNAKYWVVELDNKIVGGIGIAPFDNEQGICELQKLYLIPEAQGLGISRKLMETALSFASTHYKSCYLETNHDLKVACILYEKFGFKLLNSPISGSGHFAMNAWYLKDLEVVNQ

SEQ ID NO: 45371 - DNA, 1023 bp, Shewanella sp. ANA-3
  CDS (1)..(1023): transl_table=11
atgattcgaactgagccacagcctgcccacacaagtgcttgcatggctcaactttggttaaccctgatggcattcaatccgactatggcaaatgatcccggctcatctagccaactgagacacctttcccgctatatggtcagacacttaggcatgctcaatgcggcctttggcgatttacctctgtccccagtacaggcccacgccttgtttgagataggcaatcaaccgcaaaccattaaggaactcgcctgcaaactgagcatagataaatccaatgctagccgagcaatcaaacacttagtcgataaaaacctcgcccagagccaaatgcatccgcgggataatcgctgcctcgtcgttcaactgactcctgcgggtaaaaagctgctcgcaaaattagatagccagcaaaatcaactctttcaagaaatcttggcccagctgacccctgagcaaattcaacaaatcgagcaagctcttatgcaatacaaccaagccatacataaagccaaacaacaatcgggttatcttatccgtgaagcgaccgccgccgatgatgccgccattgctcaagtgatccgcgcggtttccgccgaatacggtttaactgcagataaaggctatagcgttgccgatccgaccttagattgtttaagccaaatctattcgcagccgggcgcccaatactgggtgatagagcatgaaggccaagtggttggcggcgcgggcatagcgccactggctaacaatgaaggaatttgtgagctgcaaaaaatgtactttatgcccgagatccgcggtaaaggcttagccaaacgtttagcgctgcaggctctagagtttgcgcgtgaagcgggttatcagagctgttacctcgaaaccaccgcattactcaaagaggccctaaaactctacgaacacttaggttttaactacctaagcgccccacttggcaatactggccacgacgcctgtgagatcccaatgctattgccactgcacgccgaactgaatgaatag

SEQ ID NO: 45372 - protein, 340 aa, Shewanella sp. ANA-3
MIRTEPQPAHTSACMAQLWLTLMAFNPTMANDPGSSSQLRHLSRYMVRHLGMLNAAFGDLPLSPVQAHALFEIGNQPQTIKELACKLSIDKSNASRAIKHLVDKNLAQSQMHPRDNRCLVVQLTPAGKKLLAKLDSQQNQLFQEILAQLTPEQIQQIEQALMQYNQAIHKAKQQSGYLIREATAADDAAIAQVIRAVSAEYGLTADKGYSVADPTLDCLSQIYSQPGAQYWVIEHEGQVVGGAGIAPLANNEGICELQKMYFMPEIRGKGLAKRLALQALEFAREAGYQSCYLETTALLKEALKLYEHLGFNYLSAPLGNTGHDACEIPMLLPLHAELNE

SEQ ID NO: 45373 - DNA, 579 bp, Nostoc punctiforme PCC 73102
  CDS (1)..(579): transl_table=11
atggactctgccagaattgctatttgctgggtaaattgggatatagaaccagaaaattttctgtgtaaacttgaccagcaaatggtaatgaaaaactattatcaagattttttaattcgtgattgggtgcaaagcgatcgcacaagagccgccgaagtcatcagttatgtattatcagaatacggtctcggttgggaacccaagggcgctgaccgagatgtgctacgagttgaggaatgttatttagctactgggggagagttttgggtaattgaacaccaaagccagttagtaggaactggggcatactaccccatacagcgaggtgaaaaagctgtagaaatccgcaaaatgtatcttttacccagcatcaggggtttgggattagggaaatatttgttacaacagctagaagcagcgatcgcagagcgtggttttgagcaaatttggattgaaaccgccagtgttttggtggaagcagtcaagctgtatgaaagcaacggctacactccagcaacaggagtagaaacaatacgctgcgatcgcgtgtattttaagtcactggttaatggtcattag

SEQ ID NO: 45374 - protein, 192 aa, Nostoc punctiforme PCC 73102
MDSARIAICWVNWDIEPENFLCKLDQQMVMKNYYQDFLIRDWVQSDRTRAAEVISYVLSEYGLGWEPKGADRDVLRVEECYLATGGEFWVIEHQSQLVGTGAYYPIQRGEKAVEIRKMYLLPSIRGLGLGKYLLQQLEAAIAERGFEQIWIETASVLVEAVKLYESNGYTPATGVETIRCDRVYFKSLVNGH

SEQ ID NO: 45375 - DNA, 492 bp, Croceibacter atlanticus HTCC2559
  CDS (1)..(492): transl_table=11
atgccaactcctactataagagaaataaatattgaagataatcctcatgttgctaagtgtgtaagagatgttcttattgaatttggagttccaaaagttggtactgcgtatgaagatgcttctttagattgtatgtatgaaacctataatcatccaaaaatggtttacctggttttagaggaaaattctcaaattattggaagcgcaggtattgctaaacttgataatcacaatggaaatatatgcgaattgcaaaaaatgtattttgctccagaagctagaggaagaggtttaggtaccaaaatgatcgcaaagtgcttagagtatgcgaaagactttggttttgaagcctgttatttagaaacaatgccatatatggatgctgccagagctctctatgccaaaaacggatttgagattatagacaaacctttaggaaatacaggtcattattcttgtacggtatatatgcttaaaaacctaaaaaactaa

SEQ ID NO: 45376 - protein, 163 aa, Croceibacter atlanticus HTCC2559
MPTPTIREINIEDNPHVAKCVRDVLIEFGVPKVGTAYEDASLDCMYETYNHPKMVYLVLEENSQIIGSAGIAKLDNHNGNICELQKMYFAPEARGRGLGTKMIAKCLEYAKDFGFEACYLETMPYMDAARALYAKNGFEIIDKPLGNTGHYSCTVYMLKNLKN

SEQ ID NO: 45377 - DNA, 906 bp, Photobacterium sp. SKA34
  CDS (1)..(906): transl_table=11
atgcagccccaacaacttcgccagctctctcgccaattagtccgtcaactcggcatgctaaataatcaatgtggacaattcgcccttacccacgtacaagcccacactttgattgagttagaacaagggccttgtacggttaatcaaatggcagagcgtttacgggtcgataaatccaatgccagccgtaatttagccatgttactcaaccaaggattgatccattcaattgccaaccctaacgataaacgtagccaactctctcagttgacaccgaatggtattcaaacactctccgctcttcaccaccaacttgataaagatacccaaacgattttaaatcaactggatcaagatgaaatagagcagttagaaacaagtttacgccgttaccataaagctttgacaatcacagagcatcaacaggggtatgtactcagagaaatcacgcctttagataatgccgccgttgctgcacttattcgtcgtgtttcagctgaatatggattaaccccagatagaggctttagcgttgcggatcctcatcttgatgatctcttccagcattaccaattaccgaaaagtcgttattgggtgatagaaaaaaacaatcgtattttaggctgtggcggtgtagcaccattagcgggagatgcacagtggagtgaactgcaaaaagtcttcttcttaccagagctcagaggcaaggggttagcacgagtattaactgttcaggcattaaagtttgcccgagaaaatggctttaaaggctgctatttagagaccacagaggtattaaaagaagcggtgaaactctatcaatctctaggctttgtcgatattccaactgcgctaggcaatacagggcacaatgtgtgtgaaattcatatgcttaaaaccttctaa

SEQ ID NO: 45378 - protein, 301 aa, Photobacterium sp. SKA34
MQPQQLRQLSRQLVRQLGMLNNQCGQFALTHVQAHTLIELEQGPCTVNQMAERLRVDKSNASRNLAMLLNQGLIHSIANPNDKRSQLSQLTPNGIQTLSALHHQLDKDTQTILNQLDQDEIEQLETSLRRYHKALTITEHQQGYVLREITPLDNAAVAALIRRVSAEYGLTPDRGFSVADPHLDDLFQHYQLPKSRYWVIEKNNRILGCGGVAPLAGDAQWSELQKVFFLPELRGKGLARVLTVQALKFARENGFKGCYLETTEVLKEAVKLYQSLGFVDIPTALGNTGHNVCEIHMLKTF

SEQ ID NO: 45379 - DNA, 495 bp, Oceanospirillum sp. MED92
  CDS (1)..(495): transl_table=11
atggactttcagataaaagagattcaacccgaagatgatgcggcggtatgccagattattaagcaggtcgggcaagagttcggcgctgttggtgagggctatgggccttcagatggtgaggtgatctgtatgagccagcattacagcgatagtaccggtagtcggtatctggtcgcaaaagtcgatggagtcatcgtgggcggtggtgggattgctgccctgagtggtgctgaggatgtggcagagctcaagaagttgtttctgctgcctacgagcagagggatgggcatcggccgcgctttagctgaagcctgcctggcgttcgcgcaagcacatggttatcgcagttgttatctggacacgctctgcagtatgaaatcagccattgccttatatgaacagctgggtttccagcggttagatcagccgtttgccagctctgaacataacggttgtgatgtctggatgcttaaagagttagtggtaaccggctaa

SEQ ID NO: 45380 - protein, 164 aa, Oceanospirillum sp. MED92
MDFQIKEIQPEDDAAVCQIIKQVGQEFGAVGEGYGPSDGEVICMSQHYSDSTGSRYLVAKVDGVIVGGGGIAALSGAEDVAELKKLFLLPTSRGMGIGRALAEACLAFAQAHGYRSCYLDTLCSMKSAIALYEQLGFQRLDQPFASSEHNGCDVWMLKELVVTG

SEQ ID NO: 45381 - DNA, 477 bp, Flavobacteria bacterium BBFL7
  CDS (1)..(477): transl_table=11
atgaaaattcgcaaaattcttcctaaagataatcaagctatcaaagagattattcaagcctctattttagaacatggtgcacccaaaataggaactgcatatagcgatgcggcaacgcaagcgatgtatgaacaataccaaaaacctcgcagaacttactacgtgatagaagttgatggagtagtggtaggtggcgcaggaatcgcaccactagataattacaacggtaatgtgagcgaacttcaaaagatgtactttaaaccacaagcacgtggtaaaggttacggtaagaaattgatgataacttgcctagaacgcgccaaagaattcaaatttgaaagcgtttacctagagactatggataatatgtacgatgcccaaggcttgtacaaacacgtaggttttaaattactcgatgggccattaggtgatactggtcacttctcttgtccggtgcaaatgcttttaaaattttaa

SEQ ID NO: 45382 - protein, 158 aa, Flavobacteria bacterium BBFL7
MKIRKILPKDNQAIKEIIQASILEHGAPKIGTAYSDAATQAMYEQYQKPRRTYYVIEVDGVVVGGAGIAPLDNYNGNVSELQKMYFKPQARGKGYGKKLMITCLERAKEFKFESVYLETMDNMYDAQGLYKHVGFKLLDGPLGDTGHFSCPVQMLLKF

SEQ ID NO: 45383 - DNA, 906 bp, Vibrio sp. Ex25
  CDS (1)..(906): transl_table=11
atgaacgctcgtcaactccgacactactcccgtcaagccgtccgattgcttggtatgctcgataaacaatgcggcgatgtcgctcttaccccggtacaagcgcacgcattaggtgaaatccaattgcagccattgaccatcaaccaactggcgcagcagcttagtgtcgacaagtccaatgcaagccgcaccattactggtttgattaaattaggtttggttgagagcatcgaaaacccgaaagataaacgaagccaactcgtagtgctcacaattcaaggacagcaggcgttagcgcaactagaccagcagcaaaacagcttttttgagcagttgcttacacaacttgatgactgtgagcaagaacaactcaaacttggtctagagacttacctaaaagggctaacaaaagtgtgtcaggcagaggaatacacccttcgacctcttaccaaagcagacaatccgcaagtggcagacgtaattcgtaaagtctccgcagaatacggcttaaccgcagacagaggttatggtgtggccgatccaacgcttgatgatatgtattcggtgtataatcaaaacggggccgcctattgggtcattgaacatcgcggagagatcgttggtggcggtggctttgcccctttagctggtgagccaaatgtgtgtgagctgcaaaagatgtacttcttacctcaaacacgaggacacggtttagccaaacgcatcgtcgcattgagcttacaactggcgaaacagcttgggtatcagcagtgctatttagagacaaccgaatgtctaagagaggcggtaggcttgtatgaaaagctaggctttgagcatctcgatgccccgcttggacaaacagggcatgatgcatgtgaagtcgtaatgcttaaggtactgtaa

SEQ ID NO: 45384 - protein, 301 aa, Vibrio sp. Ex25
MNARQLRHYSRQAVRLLGMLDKQCGDVALTPVQAHALGEIQLQPLTINQLAQQLSVDKSNASRTITGLIKLGLVESIENPKDKRSQLVVLTIQGQQALAQLDQQQNSFFEQLLTQLDDCEQEQLKLGLETYLKGLTKVCQAEEYTLRPLTKADNPQVADVIRKVSAEYGLTADRGYGVADPTLDDMYSVYNQNGAAYWVIEHRGEIVGGGGFAPLAGEPNVCELQKMYFLPQTRGHGLAKRIVALSLQLAKQLGYQQCYLETTECLREAVGLYEKLGFEHLDAPLGQTGHDACEVVMLKVL

SEQ ID NO: 45385 - DNA, 504 bp, Escherichia coli
  CDS (1)..(504): transl_table=11
atgaataacattgcgccgcaatcacctgtaatgcgtcgcctgacgctgcaggataatcctgctatcgcccgcgtcattcgtcaggtatccgccgaatacggtcttaccgctgataaaggctacaccgtcgccgatccgaatcttgacgagctgtatcaagtatatagtcagcctggccatgcatattgggtcgttgagtacgagggtgaagtggtcggcggcggtgggatagcgccattaaccgggagtgagtcggatatttgcgaactgcaaaagatgtattttcttccggctatccgcggcaaagggctggcaaaaaaactggccttaatggcgatggagcaggcgcgagagatgggtttcaaacgctgctatctggaaacgaccgcttttttaaaggaagccattgcgctttatgagcatttgggctttgagcatatcgactatgcgcttggctgcacgggccatgtcgattgtgaagtgcggatgttgcgcgaactctaa

SEQ ID NO: 45386 - protein, 167 aa, Escherichia coli
MNNIAPQSPVMRRLTLQDNPAIARVIRQVSAEYGLTADKGYTVADPNLDELYQVYSQPGHAYWVVEYEGEVVGGGGIAPLTGSESDICELQKMYFLPAIRGKGLAKKLALMAMEQAREMGFKRCYLETTAFLKEAIALYEHLGFEHIDYALGCTGHVDCEVRMLREL

SEQ ID NO: 45387 - DNA, 504 bp, Salmonella typhimurium
  CDS (1)..(504): transl_table=11
atgaataatgtcgcctcgccaacgctcacggtgcgccgaatcactaccgccgacaatgccgctattgcccgtgtcatccgtcaggtttcagcggaatacggacttaccgccgataaaggttataccgttgccgaccccaatctggatgaactgtatcaggtttatagccaaccgggcgcggcctactgggtggtagagcaaaacggttgtgtggtgggcggcggcggcgtggcgccgttatcctgtagcgaaccagacatttgtgaactgcaaaaaatgtattttttaccggtgattcgtggccaggggctggcgaaaaagctggcgctgatggcgctggatcatgcccgtgaacagggttttaaacgctgctatctggaaacaacggcttttttacgcgaggcgattgcgctatacgaacgtttaggatttgaacatattagcgaaccgctcggctgcaccggacatgtcgattgcgaagtgaggatgttaaaggatctctga

SEQ ID NO: 45388 - protein, 167 aa, Salmonella typhimurium
MNNVASPTLTVRRITTADNAAIARVIRQVSAEYGLTADKGYTVADPNLDELYQVYSQPGAAYWVVEQNGCVVGGGGVAPLSCSEPDICELQKMYFLPVIRGQGLAKKLALMALDHAREQGFKRCYLETTAFLREAIALYERLGFEHISEPLGCTGHVDCEVRMLKDL

SEQ ID NO: 45389 - DNA, 21 bp, Artificial sequence
  primer
atggtcggcggcggtgggata

SEQ ID NO: 45390 - DNA, 22 bp, Artificial sequence
  primer
ttagagttcgcgcaacatccgc

SEQ ID NO: 45391 - protein, 154 aa, Artificial sequence
  consensus sequence
  Variant (2)..(8): Xaa in position 2 to 8 is any amino acid
  Variant (10)..(14): Xaa in position 10 to 14 is any amino acid
  Variant (16)..(16): Xaa in position 16 is any amino acid
  Variant (18)..(20): Xaa in position 18 to 20 is any amino acid
  Variant (21)..(22): Xaa in position 21 to 22 is any or no amino acid
  Variant (24)..(27): Xaa in position 24 to 27 is any amino acid
  Variant (29)..(37): Xaa in position 29 to 37 is any amino acid
  Variant (39)..(40): Xaa in position 39 to 40 is any amino acid
  Variant (41)..(56): Xaa in position 41 to 56 is any or no amino acid
  Variant (59)..(59): Xaa in position 59 is any amino acid
  Variant (61)..(62): Xaa in position 61 to 62 is any amino acid
  Variant (64)..(68): Xaa in position 64 to 68 is any amino acid
  Variant (69)..(73): Xaa in position 69 to 73 is any or no amino acid
  Variant (77)..(77): Xaa in position 77 is any amino acid
  Variant (79)..(79): Xaa in position 79 is any amino acid
  Variant (81)..(82): Xaa in position 81 to 82 is any amino acid
  Variant (84)..(85): Xaa in position 84 to 85 is any amino acid
  Variant (88)..(88): Xaa in position 88 is any amino acid
  Variant (90)..(93): Xaa in position 90 to 93 is any amino acid
  Variant (95)..(101): Xaa in position 95 to 101 is any amino acid
  Variant (103)..(105): Xaa in position 103 to 105 is any amino acid
  Variant (107)..(109): Xaa in position 107 to 109 is any amino acid
  Variant (115)..(120): Xaa in position 115 to 120 is any amino acid
  Variant (122)..(123): Xaa in position 122 to 123 is any amino acid
  Variant (126)..(128): Xaa in position 126 to 128 is any amino acid
  Variant (131)..(139): Xaa in position 131 to 139 is any amino acid
  Variant (140)..(142): Xaa in position 140 to 142 is any or no amino acid
  Variant (144)..(144): Xaa in position 144 is any amino acid
  Variant (145)..(145): Xaa in position 145 is any or no amino acid
  Variant (147)..(153): Xaa in position 147 to 153 is any amino acid
DXXXXXXXIXXXXXEXGXXXXXGXXXXDXXXXXXXXXYXXXXXXXXXXXXXXXXXXGGXGXXPXXXXXXXXXXCELXKXYXXPXXRGXGXXXXLXXXXXXXAXXXGXXXCYLETXXXXXXAXXLYXXXGFXXXXXXXXXXXXHXXCXXXXXXXL

SEQ ID NO: 45392 - protein, 20 aa, Artificial sequence
  protein pattern
  Variant (3)..(3): Xaa in position 3 is any amino acid
  Variant (5)..(5): Xaa in position 5 is Leu, Met or Val
  Variant (6)..(6): Xaa in position 6 is Phe or Tyr
  Variant (7)..(11): Xaa in position 7 to 11 is any amino acid
  Variant (14)..(14): Xaa in position 14 is any amino acid
  Variant (16)..(19): Xaa in position 16 to 19 is any or no amino acid
ELXKXXXXXXXRGXGXXXXL

SEQ ID NO: 45393 - protein, 20 aa, Artificial sequence
  protein pattern
  Variant (3)..(3): Xaa in position 3 is Asp or Glu
  Variant (5)..(7): Xaa in position 5 to 7 is any amino acid
  Variant (8)..(8): Xaa in position 8 is Leu or Met
  Variant (9)..(10): Xaa in position 9 to 10 is any amino acid
  Variant (12)..(13): Xaa in position 12 to 13 is any amino acid
  Variant (16)..(18): Xaa in position 16 to 18 is any amino acid
YLXTXXXXXXAXXLYXXXGF

SEQ ID NO: 45394 - DNA, 1344 bp, Escherichia coli
  CDS (1)..(1344): transl_table=11
atgcatgtgcttaacattctctgggtggtattcggcattggtctgatgctggtactgaatttgaagttcaaaatcaattcaatggtggctttgttggtggcggcgctgtccgtcgggatgctggcgggcatggatttgatgtcgctgctgcacactatgaaagcgggcttcggcaacacgctgggggaactggctatcatcgtggtgttcggtgcggtcatcggtaaattgatggtcgactccggcgcggctcaccagatagcgcatacgctgctggcgcgtctcggtctgcgctatgtacagctgtcggtgattatcatcggcctgatttttggtctggcgatgttctatgaagtggcctttatcatgttagcgccgctggttattgttattgccgccgaagctaaaattccgttcctgaaactggcgatcccggcagtagcagctgccactaccgcacattcactgttcccaccgcagccgggtccggtggcgctggtgaatgcttatggcgcggatatggggatggtttatatctatggcgtactggtgacgatcccaagtgtaatctgcgcaggtctgatcctgccgaagttcctcggcaatcttgagcgcccaacgccatcattcctgaaagcagatcaaccggtagatatgaataatctgccctctttcggcgtttcgattctggtgccgctgatcccggcgatcattatgatctctaccaccatcgccaatatctggctggtaaaagatacccctgcctgggaagtggttaactttatcggttcctcgccgattgcaatgtttattgcgatggtggttgcattcgtactctttggcaccgcacgtggtcatgacatgcagtgggtgatgaacgcttttgaaagcgcggtgaagagtattgcaatggtgattctgatcatcggtgcgggtggcgtgctgaagcagaccatcatcgacaccggcattggcgacaccatcggcatgttgatgtcccacggcaatatctcgccctacatcatggcatggctgatcactgtgctaattcgtctggcgacgggtcagggtgtcgtttcggcgatgaccgccgccgggattatcagtgctgcaatcctagatccagcaactggtcagctggttggcgtgaatccggcgctgctggtactggcgacggctgcgggttccaacaccctcacccacattaacgatgcatctttctggttgttcaaaggttactttgacctgtcagtaaaagacacgttgaaaacctggggtctgctggagctggtcaactccgtggttgggctgattattgtgctgattattagcatggtagcgtaa

SEQ ID NO: 45395 - protein, 447 aa, Escherichia coli
MHVLNILWVVFGIGLMLVLNLKFKINSMVALLVAALSVGMLAGMDLMSLLHTMKAGFGNTLGELAIIVVFGAVIGKLMVDSGAAHQIAHTLLARLGLRYVQLSVIIIGLIFGLAMFYEVAFIMLAPLVIVIAAEAKIPFLKLAIPAVAAATTAHSLFPPQPGPVALVNAYGADMGMVYIYGVLVTIPSVICAGLILPKFLGNLERPTPSFLKADQPVDMNNLPSFGVSILVPLIPAIIMISTTIANIWLVKDTPAWEVVNFIGSSPIAMFIAMVVAFVLFGTARGHDMQWVMNAFESAVKSIAMVILIIGAGGVLKQTIIDTGIGDTIGMLMSHGNISPYIMAWLITVLIRLATGQGVVSAMTAAGIISAAILDPATGQLVGVNPALLVLATAAGSNTLTHINDASFWLFKGYFDLSVKDTLKTWGLLELVNSVVGLIIVLIISMVA

SEQ ID NO: 45396 - DNA, 1344 bp, Yersinia pestis
  CDS (1)..(1344): transl_table=11
atggaatggattaatatcctgtgggtcatgttgggtattggcttaatgctagtgctcaatatccgctaccagattaactcaatggtcgcattgctgctggcagctctgctagtagggactctcgcgggcatggacctgcttaagctgctgcataccattaaggctgggtttggtggcacgctaggtgaactggcgataatcgtcgtatttggtgcggtgatcggcaaactgatggtggactctggcgctgctcatcagatagcccagacgctattgcgccgattcgggcttaaatatgttgaagccgcggtaattatcatcggcctgatctttggtctggcgatgttttatgaggttgcctttattattttggcaccactggtcattgctattgcggtcgaagccaagataccgttcctcaaactggcgatcccggcagttgctgcagcgacgacggctcactccctattcccaccacagccggggccggttgcgctggttgccgcttatggcgcagacatggggatggtttatatctatggagttctggttgctattccttcagtgatctgtgccgggcttattttgccaaagttcttgggcaatctggagcggccaattccgacgttcctgaagtctgacaacccgattgatgaaaacaatctgccgtcgttcagtacctcgattttggtaccgttaattcccgctttcatcatgatttttaccaccatagccaatatctggttggttaaagggaccacgtcgtacaccattctcaatttcattggctcatcacctattgccatgtttatcgccatgttggttgccttcgtacttttcggcaccggacgcggtcataaaatggaatgggtcatgcactcatttgaaggggcggtaaaaggcgttgccatggtcatcctgatcatcggtgcgggcggtgcgctaaagcaggtgatcattgataccgggatcggcgatacgattggcatgctgatgtctgctggtggtgtatcaccttatattatggcttggctgattacggtgctgattcgtctgacaacgggccaaggcgtggtttcggcgatgaccgccgcagggattatcggtgctgcggtaatggacccggtcactgggaccattacctcagtcgatccggcactgttggtgctggcgacagcggcaggttctaacacctttactcatatcaatgacgcctcattctggctgtttaaaggttattttgagctgtcgattaaagatacgctgaagacttggggcctgctcgaattgaccaactcggtggttggtttggcggtggtactgctgatcagcatgtttgtctag

SEQ ID NO: 45397 - protein, 447 aa, Yersinia pestis
MEWINILWVMLGIGLMLVLNIRYQINSMVALLLAALLVGTLAGMDLLKLLHTIKAGFGGTLGELAIIVVFGAVIGKLMVDSGAAHQIAQTLLRRFGLKYVEAAVIIIGLIFGLAMFYEVAFIILAPLVIAIAVEAKIPFLKLAIPAVAAATTAHSLFPPQPGPVALVAAYGADMGMVYIYGVLVAIPSVICAGLILPKFLGNLERPIPTFLKSDNPIDENNLPSFSTSILVPLIPAFIMIFTTIANIWLVKGTTSYTILNFIGSSPIAMFIAMLVAFVLFGTGRGHKMEWVMHSFEGAVKGVAMVILIIGAGGALKQVIIDTGIGDTIGMLMSAGGVSPYIMAWLITVLIRLTTGQGVVSAMTAAGIIGAAVMDPVTGTITSVDPALLVLATAAGSNTFTHINDASFWLFKGYFELSIKDTLKTWGLLELTNSVVGLAVVLLISMFV

SEQ ID NO: 45398 - DNA, 1320 bp, Pantoea citrea
  CDS (1)..(1320): transl_table=11
atgccaattacaataatagcgctcggggtaatactgctgctggtcctgatgattgttttcaaggccaacggctttttatctctgatttttgtctccatcgtcgtaggtatagccgaagggatgacaccgttgcaggccctggcttctgtacaaaaaggggttggcggtactctgggcagccttgcgatgattcttggttttggtgccatgctcggtaagctggtgtcagataccggggccgcccaacgggtggcgaccacgttgattgcggcttttggtaaacagcgggtgcaatgggctctgatggtgacagggctgattgtcgggctggccatgttttatgaaattggttttgtcctgttgttaccgctggtgtttaccgtggtggccgccgccggtatgccattactgtatgtggggctgccgatggtggctgcattgtcagtgacccattgcttcctgcctccgcacccggggccgacggcgatcgccgctatcttcggggccaatctgggtaccacactgttgtatggcataattattaccctgccaacggtgattgtggccggtccggtattttctaagttcctaaaaaactttgaaaaagaaccgccggaagggctgtataaccccaaaattttcgccgaacatgagttgcccggattcgctattagtatatttgctgcagtcatcccggtgatccttatggcgattgccgcagtttttgaactcacaactccgaaagagaatccgctccgtcagtttttcgaatttattggtaaccctgcgatcgcgctgtttattgccgtggtgatcgccgtatttaccctcggattgcgcaatggccggaaaatgggcgaagtcatggagatgtgcagctcctcaatttcgtcaattgccatgattgtatttatcattgccggtggcggggcatttaaacaagtcctggtggacagtggggtgggcgattttatcgcaggaatgatgaaaggatcgtcattgtcgccactattgatgtgctggaccgtggcggcaatgctgcgagttgcgttgggatcagccacagtagcggcgattactaccgcgggtattgtcactccgattatcgcggtgactcacgcagaccctgcactaatggtgttggcggtagggtctggtagcgtgatcgcctcgcatgttaatgaccccggtttctggttattcaaaggctactttaatctgagcgtgactgaaacactgaaaacctggactgtgatggaaacactgatttcggtgatgggtctggccggagtccttattcttaactcagtactgcactaa

SEQ ID NO: 45399 - protein, 439 aa, Pantoea citrea
MPITIIALGVILLLVLMIVFKANGFLSLIFVSIVVGIAEGMTPLQALASVQKGVGGTLGSLAMILGFGAMLGKLVSDTGAAQRVATTLIAAFGKQRVQWALMVTGLIVGLAMFYEIGFVLLLPLVFTVVAAAGMPLLYVGLPMVAALSVTHCFLPPHPGPTAIAAIFGANLGTTLLYGIIITLPTVIVAGPVFSKFLKNFEKEPPEGLYNPKIFAEHELPGFAISIFAAVIPVILMAIAAVFELTTPKENPLRQFFEFIGNPAIALFIAVVIAVFTLGLRNGRKMGEVMEMCSSSISSIAMIVFIIAGGGAFKQVLVDSGVGDFIAGMMKGSSLSPLLMCWTVAAMLRVALGSATVAAITTAGIVTPIIAVTHADPALMVLAVGSGSVIASHVNDPGFWLFKGYFNLSVTETLKTWTVMETLISVMGLAGVLILNSVLH

SEQ ID NO: 45400 - DNA, 1464 bp, Kineococcus radiotolerans SRS30216
  CDS (1)..(1464): transl_table=11
atggagaccgtcacacccgcctacggcacgagcacgctgctgctcatcgccgccgccgccgtggccctgctgctgctgctgatcatccgcttcaagctgcacgcgttcgtcgcgctcgtgctcgtcagcgccgtcaccgccgtcgtcaccgtcggtcccgacgggagcctgctcgacgtcgtcgacgtcctgaccgccggcttcggcagcacgctggccagcgtcgccctgctcgtcggcttcggcgtcatgatcgggcgcctgctggaggtcaccggcggcgcgcaggtgctcgccgacaccctcgtggcccgcttcggcgagaagcgcgcccccctcgccctcggcgtcgcctcgctgatcttcgggttcccgatcttcttcgacgccgggctcgtggtcttcctgccgatcatcttctcggtggcccgccgcttcggcggctccgtcctgacgtacgccctgcccgccgcgggcgccttcgccgtcatgcacgccttcgtgcccccgcaccccggcccggtcgcggccggtgagctgctcggcgccgacatcggcgtcctcatcctcgtgggcctcgtcctcgccgtccccacgtggttcaccgccagctacctcttcggcctgtgggccgggcgccgcaccgacgtgccgctgcccgcggagtgggccgagcgcctggccgcgaacacggccgggcaggccgggccctccggcaccgccggcgccgccaccgccccgggcgcgacgggcgggacgggcaccccgggcccggccgccccgcgcttcagcaccgtcctcctcgtgctgctgctgcccctggtgctgatcttcctcaacacgggcctgaacacgctggccaccgccggcgccgtcgacggcgaggcgacctgggtgcaggtgctgcgcctggtggggcagacgcccatcgcgctgctcatcgccgtgctcgtcaccatggtcgtcctcagccggggccggctgacgcgcggcgaggtcgaggacctggccaacagctccctcgggccggtctgcgccgtcatcctcatcaccggcgccggcggcatgttcggcggggtcctgcgcgccagcggcatcggcggcgccctggccgacaccctggccgcgaccggcctgcccgtcatcgtggccgcgttcatcatctccctgggcctgcgcgtggcgcagggctcggcgacggtggcgctgaccaccaccgccgggctgatggcccccaccgtcgaggcgaccgcgggcctgtccagcctcgaccccgcgttcatcgtcatcgccatcgccgccggcgcgaccgcgctcagccacgtcaacgactccggcttctggctcgtggggcgcttcctgggcatggacgtgcccacgacgctgcggacgtggacggtcatggagaccctcatcggcctcgtcggcttcgcgctggccttcctcgggtacctggtcctgtga

SEQ ID NO: 45401 - protein, 487 aa, Kineococcus radiotolerans SRS30216
METVTPAYGTSTLLLIAAAAVALLLLLIIRFKLHAFVALVLVSAVTAVVTVGPDGSLLDVVDVLTAGFGSTLASVALLVGFGVMIGRLLEVTGGAQVLADTLVARFGEKRAPLALGVASLIFGFPIFFDAGLVVFLPIIFSVARRFGGSVLTYALPAAGAFAVMHAFVPPHPGPVAAGELLGADIGVLILVGLVLAVPTWFTASYLFGLWAGRRTDVPLPAEWAERLAANTAGQAGPSGTAGAATAPGATGGTGTPGPAAPRFSTVLLVLLLPLVLIFLNTGLNTLATAGAVDGEATWVQVLRLVGQTPIALLIAVLVTMVVLSRGRLTRGEVEDLANSSLGPVCAVILITGAGGMFGGVLRASGIGGALADTLAATGLPVIVAAFIISLGLRVAQGSATVALTTTAGLMAPTVEATAGLSSLDPAFIVIAIAAGATALSHVNDSGFWLVGRFLGMDVPTTLRTWTVMETLIGLVGFALAFLGYLVL

SEQ ID NO: 45402 - DNA, 1353 bp, Xanthobacter autotrophicus Py2
  CDS (1)..(1353): transl_table=11
atgctgggcatgagcaaggacacatttctactggtcgacgcggcggtgaccatcatcggcctcatcgtcctcatcacgcgcttcaaggtccaccccttcgtggcgttgatcctggccgccggcttcctggggctcagctccggcatgccggtggacctcatcatgaagtcgttccaggacggcttcggcggcgtgctcggcttcgtcggcatcgtgctcggcctcggcaccatgctgggcaagctgatggccgaatcgggcggcgcagaccagatcgcccagaccctcatcaatgccttcggcaaacagcgggtgcactgggccatcatgctcgccgccttcctggtgggcattcccctgttcttcgaaatcggcttcgtgctgctcatcccgcttgtcttcgtcatggcgagccgcaccggcgtgtcgctggtgaaggtgggcatttcgcttttggcgggtctctcggcggtgcacggcctggtgccgccccacccggggccgctgctggcggtgggtgtgttcggcgccgatatcggcaagaccatcttctacggcctcatcgtcggcctgcccgcggccgccatcgccggccccatgttcggctcgttcatttcgcggcgcatcccgggccatccgtctccggagctggtcgcccagttcgttcaggacgagcgcgcccacaccctgcccggcttcggcgtcaccctcgccaccatcctgctgccggtggtgctgatgctgctgaaggcgttcgccgatgtcgccttcgccgccggccatccggtgcgggcgtggctggacctcatcggccaccccatcaccgcgctgctcgcggcgctgctgctgtcgctctacaccttcggcagcgcgcgcggcttctcgcgcgaggtcatcggcaagcacctcaacgacagcctcctgccggtggcgggcatcatcctgatcgtcggcgccggcggcggcttcaagcagatgctggtggcgagcggcgtgggcgatgtcattggccatatggcggtgcaggcccatgtgaaccccatcctcctcgcctggctggtggcggcggtgatccgggtggccacgggctccgccacggtggcgaccatcaccggggccggcatcgtagccccggtcctcgccctgacgccgggcgtcaaccgtgagctgctggtgctggccaccggcgccggctcggtggtgctctcccacgtcaacgacgccggcttctggctggtgaagcagtatttcaacatgacggtggaggagaccttcaagacctggaccgccatggagacgatcctgtcggtggtggccctgggcctgatcatgctgctttcgctggtggtgtag

SEQ ID NO: 45403 - protein, 450 aa, Xanthobacter autotrophicus Py2
MLGMSKDTFLLVDAAVTIIGLIVLITRFKVHPFVALILAAGFLGLSSGMPVDLIMKSFQDGFGGVLGFVGIVLGLGTMLGKLMAESGGADQIAQTLINAFGKQRVHWAIMLAAFLVGIPLFFEIGFVLLIPLVFVMASRTGVSLVKVGISLLAGLSAVHGLVPPHPGPLLAVGVFGADIGKTIFYGLIVGLPAAAIAGPMFGSFISRRIPGHPSPELVAQFVQDERAHTLPGFGVTLATILLPVVLMLLKAFADVAFAAGHPVRAWLDLIGHPITALLAALLLSLYTFGSARGFSREVIGKHLNDSLLPVAGIILIVGAGGGFKQMLVASGVGDVIGHMAVQAHVNPILLAWLVAAVIRVATGSATVATITGAGIVAPVLALTPGVNRELLVLATGAGSVVLSHVNDAGFWLVKQYFNMTVEETFKTWTAMETILSVVALGLIMLLSLVV

SEQ ID NO: 45404 - DNA, 1371 bp, Bacillus halodurans C-125
  CDS (1)..(1371): transl_table=11
atggaagtttcaggagctcaaatgattttaggtcttgtcattgccattatggttttaatttttctagtcatcaaaacgaaagtgcatgtctttttagccctgatcatcgcggcttcaataaccggtctagtcggagggatggcaccgcctgatgttgtaagcgccatcacagaaggatttggaagcacgctcgggtctgtggcgatcattatcggtttcggtgtaatgatgggacgaatattagaagtatctggagcggccgaacgactagcttatacggtcgtcaaagtgttaggaaagcgcaaagaggagtgggcgatggctgttacgggctatatcgtatcgattcctatatttgtagattctgcctttattatattaagtacattagcgaaagcgctatcaaagaaaacagggaagtccattgttacgctcgccattgcccttgctggtggagcggtcgttatgcaccatgctgtaccaccgacacctgggccgctaggggttgcaggaatttttggtgtggacgttggcttaatgatcttatcggggttgatctttgggattccgattatcattgttaccgttttatatgcaaaatggatcgggaaaaaaatctatcagcttcccgatgatgacggcttaggatggattagaccagagcaagaggtgaacgtcgaggattggcttgaagagaaagaaaacaaagagctaccatcgttgcttcgctccgctgcaccgatcgtcgtaccgattctcttaattttcatgaatacgacggtaacggccatcggattagaaggaacgctcgtagagtacgttcaatttttcggttcccccgtgatcgctgttgggattgcagtcctccttgccatctatggattattcaaccacgtgaagcgctcggaagctcttgatcgaatggaggaagggattcagacagctgggataatcttgttagttacaggagcaggtggagcccttggttatgtgctacgccaaacaggagctggagattatatagccgaacttgtagttgatacaggaattcctgcgattttgcttccgtttgtgatcgcttcgctcgtccgcttgattcaaggaagcgggacggttgccatgataacggctgcgtcaatttctgcgccaatcttaacagggatggatgtgaaccttgtcctagccgcgcaagcagcggccctcggagcgatggtgttttcctacttcaatgatagtctgttttgggtcgtgaaccgcacgattgggattaaagacccgaaagagcaaatgctcgtttggtctgtcccaacaacgctcagctggttaacggcactcgtttgcttacttatcgccaatctcattttcggataa

SEQ ID NO: 45405 - protein, 456 aa, Bacillus halodurans C-125
MEVSGAQMILGLVIAIMVLIFLVIKTKVHVFLALIIAASITGLVGGMAPPDVVSAITEGFGSTLGSVAIIIGFGVMMGRILEVSGAAERLAYTVVKVLGKRKEEWAMAVTGYIVSIPIFVDSAFIILSTLAKALSKKTGKSIVTLAIALAGGAVVMHHAVPPTPGPLGVAGIFGVDVGLMILSGLIFGIPIIIVTVLYAKWIGKKIYQLPDDDGLGWIRPEQEVNVEDWLEEKENKELPSLLRSAAPIVVPILLIFMNTTVTAIGLEGTLVEYVQFFGSPVIAVGIAVLLAIYGLFNHVKRSEALDRMEEGIQTAGIILLVTGAGGALGYVLRQTGAGDYIAELVVDTGIPAILLPFVIASLVRLIQGSGTVAMITAASISAPILTGMDVNLVLAAQAAALGAMVFSYFNDSLFWVVNRTIGIKDPKEQMLVWSVPTTLSWLTALVCLLIANLIFG

SEQ ID NO: 45406 - DNA, 1350 bp, Pasteurella multocida subsp. multocida str. Pm70
  CDS (1)..(1350): transl_table=11
atgttaattttgattatgatcatcgcagtcttagtcttattgctgctgattatgaaattccgcgtgcatgcgttcgttgcactaattatcgtcagtttactgaccgcacttgcgacaggcgttccagttaataaaattctgcctacgctattgactggctttggtaatacccttgctgcggttgcattactcgttggtttaggcgctatgattgggcgattactcgaaattacaggcggcgccaaagtcttggcagatacgctcattaacaaattcggcgagaaaaaagcgccttttgccttaggggtcgcgtccttactgtttggtttcccaattttctttgatgcgggtttagtggtgatgttaccaatcattttcagtgtagctaaacaatttggtggctcaacattacgctatgccttaccttctgcgggtgcctttgccgtcatgcatgctttccttccgcctcatccgggtccagttgcatcgggtgatttattaggcgctaatatgggtttactcgtgattgttggtttaatttgcgcgattccaacatggtatatcgctgcttatttattcggtttatattccggtaagaaaatcaacttagcactgcctaaagcctttttatcaggtaatgctattcatgaaacggctgctcaaaatccaccgagtttcaaaaaagtgctatttattcttctgttacctatctgtttaattctatttgacacaggtttaaatacattaagtgttgccaaagtgattgatggctcacaagtgtgggtcgaaagcttacgcttattaggcaaaacccctatcgcactccttattactttgattgttgccatcattttattaaaagaacaacgtagctatgaacaaattgaaaaaatttgtgataacgctttaggcccaatttgtgccattgtcttggttaccggtgctggtgggatgtttggcggtgtattacgcgcgagcggcattggtaacgaattatccgcaatgctgtctgatacaggtttacctgttattgttgctgcatttattattgcacttgccttacgtgttgcccaaggttcagccactgttgccttaaccaccgcctctgcgctcattgcaccaactgttgctgcaacaactggactcagtcaactcgatttatgctttattgtgattgccattgcctctggtgcaacagctttatcacacgtcaatgactcaggtttctggcttgtgagccgtttcttagaaatggatgaaaaaaccacattaaaaacctggaccgtgatggaaaccttaattggtcttgttggtttcgctctggctgttattggtagtattctcttttaa

SEQ ID NO: 45407 - protein, 449 aa, Pasteurella multocida subsp. multocida str. Pm70
MLILIMIIAVLVLLLLIMKFRVHAFVALIIVSLLTALATGVPVNKILPTLLTGFGNTLAAVALLVGLGAMIGRLLEITGGAKVLADTLINKFGEKKAPFALGVASLLFGFPIFFDAGLVVMLPIIFSVAKQFGGSTLRYALPSAGAFAVMHAFLPPHPGPVASGDLLGANMGLLVIVGLICAIPTWYIAAYLFGLYSGKKINLALPKAFLSGNAIHETAAQNPPSFKKVLFILLLPICLILFDTGLNTLSVAKVIDGSQVWVESLRLLGKTPIALLITLIVAIILLKEQRSYEQIEKICDNALGPICAIVLVTGAGGMFGGVLRASGIGNELSAMLSDTGLPVIVAAFIIALALRVAQGSATVALTTASALIAPTVAATTGLSQLDLCFIVIAIASGATALSHVNDSGFWLVSRFLEMDEKTTLKTWTVMETLIGLVGFALAVIGSILF

SEQ ID NO: 45408 - DNA, 1317 bp, Escherichia coli O157:H7 EDL933
  CDS (1)..(1317): transl_table=11
  misc_feature (622)..(622): y is t or c
atgccattagtcattgttgctatcggtgtaatcttgttattactcctgatgatccgcttcaaaatgaacggcttcatcgctctcgtcctcgtggcgcttgcggttggattaatgcaagggatgccgctggataaagttattggctccatcaaagccggtgtcggcgggacgctcggtagccttgccctgatcatgggttttggcgcaatgctgggcaaaatgctggcagactgcggtggcgcacaacgtatcgccaccacgctgattgccaaatttggtaaaaaacacatccagtgggcggtggtactgaccggttttaccgttggttttgccctgttctatgaagtgggctttgtgctgatgctgccgctggtgtttaccatcgcggcttctgcgaatattccactgctgtatgttggtgtaccaatggcagctgcactgtctgtgacccacggcttcctgccaccgcatccgggtccgactgcgattgccaccattttcaatgccgatatgggtaaaaccctgctgtacggtactattctggcaatcccgaccgtgattctcgccggtccggtttacgctcgcgtgttgaaaggtatcgataagccaattccggaaggtytctacagcgcgaaaaccttcagcgaagaagagatgccgagctttggcgtcagcgtctggacctctctggtgccggtagtactgatggcgatgcgtgcgattgccgaaatgatcctgccgaaaggtcacgctttcctgccggtagcggagttcctcggtgacccggtaatggctacgctgattgccgtgctgattgcgatgttcacctttggtctgaaccgtggtcgttcaatggatcagattaacgacacgctggtttcttccatcaaaatcattgcgatgatgctgttgatcatcggtggtggcggtgcgttcaagcaggtgctggtagacagcggcgtggacaaatacattgcttccatgatgcacgaaaccaacatttctccgctgctgatggcctggtcgattgctgccgtactgcgtatcgcgctgggttccgcaaccgttgcggcaatcactgcgggtggtatcgcggcaccgctgattgcaacgacgggtgttagcccggagctgatggttattgcggtgggttccggtagtgtgattttctctcatgtgaacgatccgggcttctggctgttcaaagagtactttaacctgactatcggcgagaccatcaaatcctggtcgatgctggaaaccattatctcggtgtgcggtctggtaggctgtctgctgctgaatatggtgatttga

SEQ ID NO: 45409 - protein, 438 aa, Escherichia coli O157:H7 EDL933
  misc_feature (208)..(208): The Xaa at location 208 stands for Leu, or Phe.
MPLVIVAIGVILLLLLMIRFKMNGFIALVLVALAVGLMQGMPLDKVIGSIKAGVGGTLGSLALIMGFGAMLGKMLADCGGAQRIATTLIAKFGKKHIQWAVVLTGFTVGFALFYEVGFVLMLPLVFTIAASANIPLLYVGVPMAAALSVTHGFLPPHPGPTAIATIFNADMGKTLLYGTILAIPTVILAGPVYARVLKGIDKPIPEGXYSAKTFSEEEMPSFGVSVWTSLVPVVLMAMRAIAEMILPKGHAFLPVAEFLGDPVMATLIAVLIAMFTFGLNRGRSMDQINDTLVSSIKIIAMMLLIIGGGGAFKQVLVDSGVDKYIASMMHETNISPLLMAWSIAAVLRIALGSATVAAITAGGIAAPLIATTGVSPELMVIAVGSGSVIFSHVNDPGFWLFKEYFNLTIGETIKSWSMLETIISVCGLVGCLLLNMVI

SEQ ID NO: 45410 - DNA, 1317 bp, Clostridium acetobutylicum ATCC 824
  CDS (1)..(1317): transl_table=11
atgccattattaattgttgttattggcgtcgcattactattactacttatgattaaattcaaagtaaacggattcatatccctaattcttgtagctttggttgttggtatcgccgaaggtatgaatcctgcaaaagctgtttcttcaattcaaaacggtgttggaagcaccttaagcagtttggcactaattttaggttttggtgctatgtttggaaaattaatagctgattctggtgctgctcaaaggatttctagaagtttaattaataaatttggtgtaaaaaaaattcaatgggctgttgtattaacgggtttcatagttggcattgctatgttctatgaggtaggttttgttctacttatacctcttgtttttactattgctgaattcacagaacttcctcttttatacataggcgttcctatggctgcagctttatctgtcactcacggatttttacctcctcaccctggacctgttgcaatagctacaatatatggtgcaagcattagcatgactcttgtatatggaattgtaatagctatacctacagtaatagttgcaggacctgttttgactaagtttttaaaacgttttgatcataaatcttcaaaaaacctttttaaaactaaggtctttgatgaagatgaaatgccaagtttctcattaagcgtattaactgctattgttcctcctattcttatggccttttcagctgtttgtgaaatcacactaccaaaaacatctcctataagacattttgcagaattcgttggaagtcctatgatggcaatgtttatatcaatcattgtagctatctttactcttggtataatgcgcggaaagaaaatggaagaaataatgagaactttagctgaagccgcaagttccattgcaatgatccttttaatagtagctggaggtggtgccttcaagcaagtactaatagacagtggtgttggaaaatatatcgcttctattatggttggaagtaatatatctcctctaatcttggcttgggcgattgcagcaattttaagattatctcttggttctgccactgtttctgctatgactactgccggtatagtacttcctcttattccttcaacccatgcaaacccagcattaatggttttagcaactggcgcaggtagtcttattttctctcatgtaaacgatccaggtttctggatgttcaaagaatattttggacttagcataggagaaacaatggcttcatggtctactttagaaactataatttcaattatggggttaattggtgttttagctttaaatatggttggatag

SEQ ID NO: 45411 - protein, 438 aa, Clostridium acetobutylicum ATCC 824
MPLLIVVIGVALLLLLMIKFKVNGFISLILVALVVGIAEGMNPAKAVSSIQNGVGSTLSSLALILGFGAMFGKLIADSGAAQRISRSLINKFGVKKIQWAVVLTGFIVGIAMFYEVGFVLLIPLVFTIAEFTELPLLYIGVPMAAALSVTHGFLPPHPGPVAIATIYGASISMTLVYGIVIAIPTVIVAGPVLTKFLKRFDHKSSKNLFKTKVFDEDEMPSFSLSVLTAIVPPILMAFSAVCEITLPKTSPIRHFAEFVGSPMMAMFISIIVAIFTLGIMRGKKMEEIMRTLAEAASSIAMILLIVAGGGAFKQVLIDSGVGKYIASIMVGSNISPLILAWAIAAILRLSLGSATVSAMTTAGIVLPLIPSTHANPALMVLATGAGSLIFSHVNDPGFWMFKEYFGLSIGETMASWSTLETIISIMGLIGVLALNMVG

SEQ ID NO: 45412 - DNA, 1338 bp, Salmonella enterica subsp. enterica serovar Typhi str. CT18
  CDS (1)..(1338): transl_table=11
atgcacgctcaaatctgggtagtgagcacgctgctgatcagcatcgtgttaatcgtattgaccatcgtgaagtttaaattccaccccttcctggcgttactgctcgccagtttctttgtcggcgcgatgatgggcatagggccgctggagatggtcacggcgatagaaaacggaataggcggtacgctcggttttctggccgccgttatcggtcttggcaccatcctcggcaaaatgatggaggtttccggcgcggcggaacgcatcgggcttacgctccagcgctgccgctggctctctgctgacgtgatcatggtactggtggggctgatttgcggaatcacgttgttcgtggaagtgggcgtcgtgttgctcatcccactggcgttttctatcgctaaaaagacccatacctcgctgctgaagctggccattccgctgtgtaccgcgctgatggccgtccattgcgtggtaccgccgcatccggctgcgctgtttgtcgcaaataaactgggggcggatatcggctcggtgattgtctacggtctgctggtcggactgatggcctcattggtcggcggcccgctgttcttaaagtttctgggtaatcgtctgccgttcaagcccgtaccgacagagtttgcggatcttgaagtgcgtgccgaaaacaccctgccgtcgctgggcgcaacgctgtttaccgttctgctgccgattggcctgatgctggtgaaaaccgtcgctgaactgaatatggcgaaagacggcacgttgtatacgctgctggagtttatcggtaatccgatcaccgcgatgtttatcgctgtctttgtggcgtattacatactcggtctgcgccagcatatgggtatgagcgcgctacttacccacaccgaaaacggctttggcgccattgcgaacatcctgctgattatcggcgcgggcggcgcgttcaacgccattctcaaaagtagcggactggcggacacgctggcggtgatcctctcaaatatgcatatgcacccgattctgctggcatggctggtagcgctgattctgcacgcggcggtcggctctgcgacggtggcgatgatgggcgccaccgcgattgttgcgcccatgctgccgctctatcctgacgttagcccggagatcatcgctattgccatcggttccggcaccattggctgcacgatcgtgaccgattccctgttctggctggtcaagcagtattgcggcgctacgctgaatgaaacgtttaaatactatacgacggccacgtttatcgcatctgtcgttgcactggctggcacattcctgctttcctttatcatctga

SEQ ID NO: 45413 - protein, 445 aa, Salmonella enterica subsp. enterica serovar Typhi str. CT18
MHAQIWVVSTLLISIVLIVLTIVKFKFHPFLALLLASFFVGAMMGIGPLEMVTAIENGIGGTLGFLAAVIGLGTILGKMMEVSGAAERIGLTLQRCRWLSADVIMVLVGLICGITLFVEVGVVLLIPLAFSIAKKTHTSLLKLAIPLCTALMAVHCVVPPHPAALFVANKLGADIGSVIVYGLLVGLMASLVGGPLFLKFLGNRLPFKPVPTEFADLEVRAENTLPSLGATLFTVLLPIGLMLVKTVAELNMAKDGTLYTLLEFIGNPITAMFIAVFVAYYILGLRQHMGMSALLTHTENGFGAIANILLIIGAGGAFNAILKSSGLADTLAVILSNMHMHPILLAWLVALILHAAVGSATVAMMGATAIVAPMLPLYPDVSPEIIAIAIGSGTIGCTIVTDSLFWLVKQYCGATLNETFKYYTTATFIASVVALAGTFLLSFII

SEQ ID NO: 45414 - DNA, 1497 bp, Salmonella typhimurium LT2
  CDS (1)..(1497): transl_table=11
atgacaagtttaccgaccccaattatcggtctgatcgttgccgttttcgtgctggtatggctggtgttacgcacccgtgttcatgcgctgatcgcgatgctggcggcggcctgtattgccggtctgttggggggaatgggcattgataaaacgctctctgtcatcaccagcggattcggtacgacgctgggcagcattggcctggtgattggtctcggcgtaatgatggggcgcttgctggaggtttccggcgcggcggagcgtatcgcctggagctttatcaaatggctggggaaacgccgtgaagagtgggcgctggcgatcacgggttatattgtcagcatccccattttcgtcgattccgcttttgtcattctttatccggtggcgaaagcgctggcgaaaagcggtaagcgttcgctactgacgctgggcgtcgcgctggcgggcgggctggtggtcactcaccatacggtacctccgacgcccggtccgctgggggtagccgggatttttaacgtcgacatcggcgcaatgttattgaccgggatggcgctggcggtgccctgtgtgatcggcattgtgttctatgcgcagtggctggataaacgctaccctgatttcgtgccgcgcacgctgaacgccgatgaagtcaatgccgcgctggagcagtacaataaagagaaagagcaaaaggaactgccgagcctgacgctttctctgctgcctattgtggtgccgatcgtgctgatcttcctgaaggctatctgttccaccctcgccactgtagaaggatggtccggcctggcgacgcatccggtggtacaggcaatcaactttgtgggaagtccggtgatcgcgttggccatcagcgttctgctggcggtgtatacgctggtgccgcgcatggataaacataccaccgcagagcgtctggaagagggcttgcaaagcgccgggattatcttactggtcacgggcgctggcggcgcgttgggcgcgatcctgcgcgacagcggcgcggggcaacagctggcggagcaggttgccaacctgccgatctcgccgatcctgatcccgtttatcgtggcgacgttggtacgcctgattcagggatcggggacggtggcgatgatcactgccgcctcgatttccgcgccgatcctggcgcagatccccggcatcaatatgttgcttgccgctcaggccgcaacgatggggtcgctgttcttcggctacttcaacgatagcctgttctgggtggttaaccgcatgatgggtgtctctgatgtcaaacagcagatggtggtttggtctgtaccgacgaccattgcctgggcgattggcggcaccggcgtggtgctgattaacctgctgttcggttccggcggtagttggctcgatccgttactgccgattgttgttctggcggcaattatgctgtgggtgcgttggcaggcgcaggggatcaaagacaagctggtagttaaggattaa

SEQ ID NO: 45415 - protein, 498 aa, Salmonella typhimurium LT2
MTSLPTPIIGLIVAVFVLVWLVLRTRVHALIAMLAAACIAGLLGGMGIDKTLSVITSGFGTTLGSIGLVIGLGVMMGRLLEVSGAAERIAWSFIKWLGKRREEWALAITGYIVSIPIFVDSAFVILYPVAKALAKSGKRSLLTLGVALAGGLVVTHHTVPPTPGPLGVAGIFNVDIGAMLLTGMALAVPCVIGIVFYAQWLDKRYPDFVPRTLNADEVNAALEQYNKEKEQKELPSLTLSLLPIVVPIVLIFLKAICSTLATVEGWSGLATHPVVQAINFVGSPVIALAISVLLAVYTLVPRMDKHTTAERLEEGLQSAGIILLVTGAGGALGAILRDSGAGQQLAEQVANLPISPILIPFIVATLVRLIQGSGTVAMITAASISAPILAQIPGINMLLAAQAATMGSLFFGYFNDSLFWVVNRMMGVSDVKQQMVVWSVPTTIAWAIGGTGVVLINLLFGSGGSWLDPLLPIVVLAAIMLWVRWQAQGIKDKLVVKD

SEQ ID NO: 45416 - DNA, 1317 bp, Salmonella typhimurium LT2
  CDS (1)..(1317): transl_table=11
atgccattagtcatcgttgctatcggtgttatcttgttacttcttctgatgatccgcttcaaaatgaacggatttatcgcccttgtcctggtagcgctcgctgtcgggttgatgcagggaatgcctctggataaagtcatcggctccatcaaagccggtgtcggtggtacgcttggcagtctggccctgattatggggttcggcgccatgctgggcaaaatgcttgccgactgcggcggcgctcaacgtatcgccactaccctgatcgcgaaatttggtaaaaagcatattcagtgggccgtagtgttaaccggctttaccgtcggcttcgctctgttctatgaagtgggcttcgttctgatgctgccgctggtattcaccattgccgcagcggcgaatatcccgctactgtacgtcggcgtgccgatggccgcggcgctctccgtcacacacggcttcctgccgccgcacccgggtccaaccgcaatcgccacgattttccatgccgatatgggtaagacgctgctgtttggtacgattctggcgatcccgaccgtgatccttgccggaccggtttacgcccgtttcctgaaaggcatcgataagccgatcccagaaggcctgtacagcgcgaaaacttttacggaagaagagatgccgggctttggcgtcagcgtctggacgtcgctggttccggttattctgatggcgatgcgtgcgattgccgagatgattctgccaaaaggccacgctttcctgcccgttgccgagttcctgggcgacccggtaatggctacgttaattgccgtactgattgcgatgttcacctttggcctgaaccgcgggcgttccatggatcagattaacgatacgctggtctcttccatcaaaattatcgccatgatgctgctgatcatcggcggcggcggcgcattcaagcaggtgctggtcgatagcggcgtggataaatacatcgcttcaatgatgcatgaaaccaatgtctctccgctgttgatggcgtggtctatcgcggcggttctgcgtatcgcgctgggctctgcgactgtcgcggcgattaccgcaggcggcattgcggcgccgctgatcgccactaccggcgttagccctgaactgatggttatcgcggtcggttccgggagcgtgattttctctcacgtcaacgacccgggcttctggctgttcaaagagtatttcaatttgactatcggcgagaccattaaatcctggtcgatgctggaaacgatcatctccgtctgcggcctgatcggctgtctgctgttgggtatggtggtttaa

SEQ ID NO: 45417 - protein, 438 aa, Salmonella typhimurium LT2
MPLVIVAIGVILLLLLMIRFKMNGFIALVLVALAVGLMQGMPLDKVIGSIKAGVGGTLGSLALIMGFGAMLGKMLADCGGAQRIATTLIAKFGKKHIQWAVVLTGFTVGFALFYEVGFVLMLPLVFTIAAAANIPLLYVGVPMAAALSVTHGFLPPHPGPTAIATIFHADMGKTLLFGTILAIPTVILAGPVYARFLKGIDKPIPEGLYSAKTFTEEEMPGFGVSVWTSLVPVILMAMRAIAEMILPKGHAFLPVAEFLGDPVMATLIAVLIAMFTFGLNRGRSMDQINDTLVSSIKIIAMMLLIIGGGGAFKQVLVDSGVDKYIASMMHETNVSPLLMAWSIAAVLRIALGSATVAAITAGGIAAPLIATTGVSPELMVIAVGSGSVIFSHVNDPGFWLFKEYFNLTIGETIKSWSMLETIISVCGLIGCLLLGMVV

SEQ ID NO: 45418 - DNA, 1341 bp, Salmonella typhimurium LT2
  CDS (1)..(1341): transl_table=11
gtgagtacattaacactggttttaaccgccgtcggttccgtcttactgctgctgtttttggtgatgaaggcgcgtatgcacgccttcgtcgcgttaatggtcgtctcgatgggcgcggggcttttttcagggatgccgcttgataaaatcgccgcgaccatggaaaaagggatgggcggcacgctgggattcctggcgattgtggtcgcgctgggggcgatgttcggcaagattctgcacgagaccggcgcggtcgatcagattgccgtcaagatgctgaaatctttcggtcatagccgcgcgcattatgccattggcctggccggtctgatttgcgcgctaccgctgttctttgaagtggcgattgtgctgctgataagcgtggcgttctcaatggcgcgccacaccggaacgaacctggtgaagctggtcattccgctgtttgcgggcgtggcggctgccgcagcgttcctgctgccgggacctgcgccgatgctgctggcatcccaaatgcacgctgactttggctggatgatcctgattggcctgtgcgcagccattccgggcatgattatcgccgggccgctgtggggcaatttcatcagccgttacgttgaactgcatgtaccggaagacattaccgagccgcatctgggcgaaggcaaaatgccttctttcggcttcagcctgtcgctgatcctgctgccgttggtgctggtagggctgaaaacgatcgccgcgcgttttgtgccggaaggttccaccgcttacgaatggtttgagtttatcggtcaccccttcactgcgattctggtcgcttgtctggtagcgatttatggcctggcgatgcgtcaggggatgccgaaagacaaagtgatggaaatctgtggccacgcgctgcaaccggcgggcattatcctgctggtgattggcgcaggcggggtgttcaaacaggtactggttgactccggcgtcggcccggcgctgggcgaagcgttaaccggtatgggactgccgattgccattacctgctttgtgctggcggcggcagtgcgcatcattcagggttccgcgaccgtggcgtgtttaaccgcggtcggtctggtgatgccggtcatagagcaactgaatttctccggcgcgcagatggctgcgctctctatctgtatcgccggcggttcaattgtggtttctcatgttaacgacgctggcttctggctgttcggtaaatttaccggcgcgaccgaagcgcagacgttaaaaacctggacgatgatggaaactatcctcggtacggtcggcgcgattgtcgggatgattgctttccaactgctgagctga

SEQ ID NO: 45419 - protein, 446 aa, Salmonella typhimurium LT2
MSTLTLVLTAVGSVLLLLFLVMKARMHAFVALMVVSMGAGLFSGMPLDKIAATMEKGMGGTLGFLAIVVALGAMFGKILHETGAVDQIAVKMLKSFGHSRAHYAIGLAGLICALPLFFEVAIVLLISVAFSMARHTGTNLVKLVIPLFAGVAAAAAFLLPGPAPMLLASQMHADFGWMILIGLCAAIPGMIIAGPLWGNFISRYVELHVPEDITEPHLGEGKMPSFGFSLSLILLPLVLVGLKTIAARFVPEGSTAYEWFEFIGHPFTAILVACLVAIYGLAMRQGMPKDKVMEICGHALQPAGIILLVIGAGGVFKQVLVDSGVGPALGEALTGMGLPIAITCFVLAAAVRIIQGSATVACLTAVGLVMPVIEQLNFSGAQMAALSICIAGGSIVVSHVNDAGFWLFGKFTGATEAQTLKTWTMMETILGTVGAIVGMIAFQLLS

SEQ ID NO: 45420 - DNA, 1338 bp, Salmonella typhimurium LT2
  CDS (1)..(1338): transl_table=11
atgcacgctcaaatctgggtagtgagcacgctgctgatcagcatcgtgttaatcgtattgaccatcgtgaagtttaaattccaccccttcctggcgttactgctcgccagtttctttgtcggcgcgatgatgggcatggggccgctggagatggtcacggcgatagaaaacggaataggcggtacgctcggttttctggccgccgttatcggtcttggcaccatcctcggcaaaatgatggaggtttccggcgcggcggaacgcatcgggcttacgctccagcgctgccgctggctctctgctgacgtgatcatggtactggtggggctgatttgcggtatcacgttgttcgtggaagtgggcgtcgtgttgctcatcccactggcgttttctatcgctaaaaagacccatacctcgctgctgaagctggccattccgctgtgtaccgcgctgatggccgtccattgcgtggtaccgccgcatccggctgcgctgtttgtcgcaaataaactgggggcggatatcggctcggtgattgtctacggtctactggtcgggctgatggcatcattggtcggcggtccgctgttcttaaagtttctgggtaatcgtctgccgttcaagcccgtaccgacagagtttgcggatcttgaagtgcgcgccgaaaacaccctgccgtcgctgggcgcaacgctgtttaccgttctgctgccgattggcctgatgctggtgaaaaccgtcgctgaactgaatatggcgaaagacggcacgttgtatacgctgctggagtttatcggtaatccgatcaccgcaatgtttatcgctgtctttgtggcgtattacatactcggtctgcgccagcatatgggtatgggcacactacttacccacaccgaaaacggctttggcgccattgcgaacatcctgctgattatcggcgcgggcggcgcgttcaacgccattctcaaaagtagcgggctggcggacacgctggcggtgatcctctcaaatatgcatatgcacccgattctgctggcatggctggtagcgctgattctgcacgcggcggtcggatctgcgacggtggcgatgatgggcgccaccgcgattgttgcgcccatgctgccgctctatcctgacgtcagcccggagatcattgcgattgccattggttccggcgccattggctgcacgatcgtgaccgattccctgttctggctggtcaagcagtattgcggcgctacgctgaatgaaacgtttaaatactatacgacggccacgtttatcgcatctgtcgttgcactggctggcacattcctgctttcctttatcatctga

SEQ ID NO: 45421 - protein, 445 aa, Salmonella typhimurium LT2
MHAQIWVVSTLLISIVLIVLTIVKFKFHPFLALLLASFFVGAMMGMGPLEMVTAIENGIGGTLGFLAAVIGLGTILGKMMEVSGAAERIGLTLQRCRWLSADVIMVLVGLICGITLFVEVGVVLLIPLAFSIAKKTHTSLLKLAIPLCTALMAVHCVVPPHPAALFVANKLGADIGSVIVYGLLVGLMASLVGGPLFLKFLGNRLPFKPVPTEFADLEVRAENTLPSLGATLFTVLLPIGLMLVKTVAELNMAKDGTLYTLLEFIGNPITAMFIAVFVAYYILGLRQHMGMGTLLTHTENGFGAIANILLIIGAGGAFNAILKSSGLADTLAVILSNMHMHPILLAWLVALILHAAVGSATVAMMGATAIVAPMLPLYPDVSPEIIAIAIGSGAIGCTIVTDSLFWLVKQYCGATLNETFKYYTTATFIASVVALAGTFLLSFII

SEQ ID NO: 45422 - DNA, 1320 bp, Salmonella typhimurium LT2
  CDS (1)..(1320): transl_table=11
atgccattaataattattgcggcaggcgttgcgctgctgttggttttaatgattggctttaaagttaacggctttatcgcccttgttctggttgccgccgtggtgggatttgccgaagggatgggcgcgcaagacgtcctgcactccatacaaaacggaattggcggtactctgggcggactcgccatgatcctcggttttggcgcgatgctgggaagattaatttccgataccggcgccgcgcagcgcattgcgacgacgctcattaatacgttcggcaaaaaacgcgtgcaatgggcgctggtgatcaccgggcttatcgtcggcctggcaatgttttttgaagtcggattcgtactgctgttgccgctcgtttttacgattgtggcctcatcgggactgcccttgctgtatgtcggggttccaatggtcgccgccttatccgttacgcactgcttcctgccgccgcatcccggccctactgctattgcgacaatttttgaggcaaatctcggtacgaccctgctgtatgggttaatcattaccataccgaccgtgattgttgccggccctctgttttcaaaattgctggcgcgctttgagaaagcgccgcctgaaggattatttaatcctcacctattcagtgaagaggagatgccgtcattctggaacagtatttttgccgccgtgatcccggtcattctgatggccatcgcagcggtatgtgaaatcacgctgccaaaaacgaatgccgtgcgggttttcttcgaatttatcggtaatccagcagtggcgttgtttattgccattatcatcgccatttttacgctgggccgacgcaacggacgtacggttgagcaggtgatggatatcgtcggcgagtccattggcgctattgcgatgattgtttttatcatcgcgggcggcggcgcgtttaagcaagtgctggtggatagcggcgtgggtcaatatatctcgcaattaatgaccggcacctcgctatctccgttattaatgtgctggacggtagccgccgtgctgcgtattgcgctaggttccgcgaccgtggctgcgataaccacagcgggcgtcgtattgccgattattaacgtaacccacgccgatccggcgttaatggtactggcgacaggcgcgggaagcgttattgcatcacatgttaacgatcccggtttttggctgtttaaagggtattttaatcttagcgtcggggaaaccctacgcacctggaccgttatggaaacattgatttctgtcatggggttgctgggcgtactggcgctgaatgcggttctgcattaa

SEQ ID NO: 45423 - protein, 439 aa, Salmonella typhimurium LT2
MPLIIIAAGVALLLVLMIGFKVNGFIALVLVAAVVGFAEGMGAQDVLHSIQNGIGGTLGGLAMILGFGAMLGRLISDTGAAQRIATTLINTFGKKRVQWALVITGLIVGLAMFFEVGFVLLLPLVFTIVASSGLPLLYVGVPMVAALSVTHCFLPPHPGPTAIATIFEANLGTTLLYGLIITIPTVIVAGPLFSKLLARFEKAPPEGLFNPHLFSEEEMPSFWNSIFAAVIPVILMAIAAVCEITLPKTNAVRVFFEFIGNPAVALFIAIIIAIFTLGRRNGRTVEQVMDIVGESIGAIAMIVFIIAGGGAFKQVLVDSGVGQYISQLMTGTSLSPLLMCWTVAAVLRIALGSATVAAITTAGVVLPIINVTHADPALMVLATGAGSVIASHVNDPGFWLFKGYFNLSVGETLRTWTVMETLISVMGLLGVLALNAVLH

SEQ ID NO: 45424 - DNA, 1392 bp, Corynebacterium glutamicum ATCC 13032
  CDS (1)..(1392): transl_table=11
atggacacctgggaacaaacccttggaacagggccactgctaggcattgcagccggcgccattgccctcatcttggttctcgtcatcgtttttaaactccatgcttttctcaccctaatactggtttcaattgttaccgcacttgctgccggcattcccgtcaccgcagtagtggacactctccttgacggttttggtaaaacactcgcctcggtcgccctattggtaggcctgggtgccatgcttggtcgattggttgaaacatccggtggcgcaaaatctctagccgacactatggtgcgaatcttcggtgaaaaacgagcagctttcgcactcggtgtcgcatcgctgatcatgggattccctatcttcttcgatgctggcctcgtggtcatgctcccagtgatcttcgcagtagctcgacgcctcaacggctccgtccttacttttggtatccctgcagctggcgccttctctgtcatgcacgtgttcgtcccacctcacccaggcccaattgcagcctctgaattcttcggcgcacaagttggatacgtactaatcgctggcatcatcgttgcactacccacctggtatttaaccggttacctgctaggtaagttcttaggccgaaagttcccccttcccgtacccgatctactcagtggtggagcacaggaagatgatcagcctcagaacccagctaacgcagtgtcgatcattgtcattttgctcattcctatgctccttatttttggcaataccggaacatcaatggcagtttccgccggcctcctagatgcagaatccaccatggtgaaaattctaggattcctcggcgaaacaccagtggcactgctcattaccttgatcattgccctgttcttcctaggcaaccgacgtggcattaatggttctgctctagagaaaaccatcgaaggcgcactcggcccaatctgttcagtcgtattaatcactggcgccggtggcatgttcggtggagtgctacgcacgtctggaattggaggagcgcttgcagactccatggcagatctaggacttccagttatcgcaggttgtttcatcgtggcagccgtccttcgtgtcgcgcagggttctgccaccgttgcgctaaccaccgccgcagcactcatggcacctgctgttgccgctgctgactttaacgaattccagcttgctgccatcgttatttccactgccgctggttctgttattgccagccacgtcaacgactccggattctggctcgttggtcgactcatgaacgccgacgtacccaccacgctaaaaacttggaccgtaaaccaaacctgcattgcgattgtgggatttgtgatggcctatgcaatgttcggattggcatcgcttgcatag

SEQ ID NO: 45425 - protein, 463 aa, Corynebacterium glutamicum ATCC 13032
MDTWEQTLGTGPLLGIAAGAIALILVLVIVFKLHAFLTLILVSIVTALAAGIPVTAVVDTLLDGFGKTLASVALLVGLGAMLGRLVETSGGAKSLADTMVRIFGEKRAAFALGVASLIMGFPIFFDAGLVVMLPVIFAVARRLNGSVLTFGIPAAGAFSVMHVFVPPHPGPIAASEFFGAQVGYVLIAGIIVALPTWYLTGYLLGKFLGRKFPLPVPDLLSGGAQEDDQPQNPANAVSIIVILLIPMLLIFGNTGTSMAVSAGLLDAESTMVKILGFLGETPVALLITLIIALFFLGNRRGINGSALEKTIEGALGPICSVVLITGAGGMFGGVLRTSGIGGALADSMADLGLPVIAGCFIVAAVLRVAQGSATVALTTAAALMAPAVAAADFNEFQLAAIVISTAAGSVIASHVNDSGFWLVGRLMNADVPTTLKTWTVNQTCIAIVGFVMAYAMFGLASLA

SEQ ID NO: 45426 - DNA, 1359 bp, Fusobacterium nucleatum subsp. nucleatum ATCC 25586
  CDS (1)..(1359): transl_table=11
atggaacaacaaattttaattggtttattagttggtattatttgtttaatttttatgatagtaaaaactaaaattcatacttttttagctttgatagttgcaactattatagttggaattgttggaggaatagaatatcctcaaattattggtagtattacaaaaggttttggtggaaccttaggaagtattggaatcataataggttttggagttatgatgggacaactttttgaagtttctggggctgcaaaaaaaatggctctatgcttcttaaaaatttttggaaaaggtaaagaagaattagcaatggctataacaggttttctagtttctatccctatattttgtgattcaggttttgttattttaactccattgataaaagctatttctaaggaaactaaaaaatcaattgtatctttggggctagctcttgcatcaggactggtaatcactcactctcttgttccacctactcctggtccagttggtgttgctggaatctttggtgtcagtgtttcaagtattattttatatggaattataatttcaatcccaatggttttagcttgcttagtatttgcaaaatatgcaggaaataaaatttggcaaatacctactagtaatggaaaatggacaagagataaaaattatgtagatgatttaaaaacttcaagtgtttatgatgaatctaacttaccttctgcatttttatctttttctccaatcgtagttcctattattttaattttattaggaactgttacagatacaatgaaacttgagggaaagattatatcatttattcaattcataggaactcctgtaatagcagtaggaattggcttgcttattacaatttatggtttaacaagaagtttagataaacaaaaagttttagaagaagttgaaattggaataaaatcagctggaacaattattttaattactggtgctggtggagcttttggaatgttaatcagagatagtggtgtaggagatgttatcgctaaatcattagttgatacagcattaccacctattttattaccttttataattgcaactttaattcgttttattcaaggaagtggtactgttgctatgattacagcagcttctattactgctccaatcattacaaaattaaatgttaatcctgttctcgctgctcttgcagcctgtgtaggttctcttttcttctcatatttcaatgatagtttcttctgggttatcaatcgttcaataggaattacagaaggaaaagaacaattaagactttattctgttgcaagtacaattgcttgggcagtaggaattattattttattaatacttaatatatttattaaataa

SEQ ID NO: 45427 - protein, 452 aa, Fusobacterium nucleatum subsp. nucleatum ATCC 25586
MEQQILIGLLVGIICLIFMIVKTKIHTFLALIVATIIVGIVGGIEYPQIIGSITKGFGGTLGSIGIIIGFGVMMGQLFEVSGAAKKMALCFLKIFGKGKEELAMAITGFLVSIPIFCDSGFVILTPLIKAISKETKKSIVSLGLALASGLVITHSLVPPTPGPVGVAGIFGVSVSSIILYGIIISIPMVLACLVFAKYAGNKIWQIPTSNGKWTRDKNYVDDLKTSSVYDESNLPSAFLSFSPIVVPIILILLGTVTDTMKLEGKIISFIQFIGTPVIAVGIGLLITIYGLTRSLDKQKVLEEVEIGIKSAGTIILITGAGGAFGMLIRDSGVGDVIAKSLVDTALPPILLPFIIATLIRFIQGSGTVAMITAASITAPIITKLNVNPVLAALAACVGSLFFSYFNDSFFWVINRSIGITEGKEQLRLYSVASTIAWAVGIIILLILNIFIK

SEQ ID NO: 45428 - DNA, 1479 bp, Streptomyces coelicolor A3(2)
  CDS (1)..(1479): transl_table=11
atgtcctactcgtccctccgtcttgccgccgccgaggccccaccccacaccggcggtctgctcaccctgatcgacggcaccgccggtctgctgaccgtcgccgccatcggcatcgcgctgctgctcttcctcatcatcaaggtgcggcttcagcccttcgtcgcgctgctcgccgtctccatagccgtcggcctgctcgccggcctgtcggtcaccgaactcttcggcaccgtgcagaagtcggacgccgtctcgaccatcgagtccggcatgggcggcatcctcggccacgtcgccatcatcatcggcctgggcaccatgctcggcgcgatcctcgaagtcagcggcggcgcccaggtgctggcctcccgcctgctcggcctcttcggggagaagcgggccccgctcgccatgggcctcaccggtctgatcttcggcatcccggtcttcttcgacgtgggcatcttcgtcctcgcgcccatcgtctacgccgccgccaagcgctccggcaagtcgatcctgctctactgcctgccgctgctggccggcctgtccatgacccacgccttcctgccgccgcaccccggcccggtggccgccgccggactgctgaacgtcaagctcggctggatcatcctcatgggcatcgtctgcggcatccccgccgtcctcgccgcctgggtgttctccgcctggatcggccgccgcatcttcgtgcccgtgccgcaggacatggtcgaggcgtccgaggaggccaagcaggccgtcatcgaggagcagcgcaaggccggcgtcgcgccgaacgagagccccgtcgcgctcggcaccgtcctcggcatcatcggcaccccgttggtcctgatcctcgccgcgaccttctcctccatcgccctggacccgtccaccctccgctcggtgatcgagttcttcggcaacccgttcgtcgcgctgaccatcgccctgctcctcgcctactacctgctcggcatccggcgcggctggtcccgcaagtccctggagaccgtctcgacggcctcgctgaagccggtcggcaacatcctgctggtggtcggcgcgggcggggtcttcggcgccgtcctcaaggccagcggcgtcgcccaggcactctccgacaccttcaacgacgtcggcctgccggtgatcgtcctcgcctacctgatctccgtggtgctgcgggtcgcgcagggctcggcgacggtggccatcgtgacgacggcgggcatcgtggcgccgctgctggccgagggcgaccactcgcaggcgttcgtcgcgctggtcatcatggccatctcggcgggctccatcttcgcctcgcacgtcaacgacggcggcttctggatggtcgccaagtacttcggcatcagcgagcgggacacgctcaagacgtggaccgtgctggagagcgtcctgtccgtcgccgggttcgtggtggccgcggtggtgagcctgttcgtgtag

SEQ ID NO: 45429 - protein, 492 aa, Streptomyces coelicolor A3(2)
MSYSSLRLAAAEAPPHTGGLLTLIDGTAGLLTVAAIGIALLLFLIIKVRLQPFVALLAVSIAVGLLAGLSVTELFGTVQKSDAVSTIESGMGGILGHVAIIIGLGTMLGAILEVSGGAQVLASRLLGLFGEKRAPLAMGLTGLIFGIPVFFDVGIFVLAPIVYAAAKRSGKSILLYCLPLLAGLSMTHAFLPPHPGPVAAAGLLNVKLGWIILMGIVCGIPAVLAAWVFSAWIGRRIFVPVPQDMVEASEEAKQAVIEEQRKAGVAPNESPVALGTVLGIIGTPLVLILAATFSSIALDPSTLRSVIEFFGNPFVALTIALLLAYYLLGIRRGWSRKSLETVSTASLKPVGNILLVVGAGGVFGAVLKASGVAQALSDTFNDVGLPVIVLAYLISVVLRVAQGSATVAIVTTAGIVAPLLAEGDHSQAFVALVIMAISAGSIFASHVNDGGFWMVAKYFGISERDTLKTWTVLESVLSVAGFVVAAVVSLFV

SEQ ID NO: 45430 - DNA, 1347 bp, Oceanobacillus iheyensis HTE831
  CDS (1)..(1347): transl_table=11
atgccattaattattgtagcattagctgtagtattactattgctactcataatgaaatggaatttaaatacatttatttcattgattattgtatcattcctaactgccttggctttagggatgccattaggagaaattgttacatcgattgaaggtggacttggcggtacattaggtgacattgccctcatctttggttttggtgcaatattagggaaactagttgcagatgctggtggggcacagcgaattgctctgacattgattcacaaatttggagaaaaacgaatccaatgggcggtagtaattgcatcattcattattggtgtagcgttattcttcgaagtagggttagttctactaataccgattatataccaaattgcaaaagaaattaaaatacctttattatatttaggtttaccaatgacggcagcgttatccgtaacgcatggttttttaccaccacatccgggtccaacagtaattgctcagcaatacggagcaaatattggaatggtacttatttatgggattattattgcggttccaacggttattttagctgggccactatttactaaagttgctaagaaaattgttccagatgcattttcaaaagttggtaatcttggatcacttggtggggcaaaatcatttccagaagaggaaacaccgagctttgcagttagtgcattaaccgcactattccctgtaattttaatggcaattacaacagtagttgatttactgcaagatatcggtgatgtgtcggataatattctttttgaaattatgcgcatgattggacaaccaacaacagcattattgatttctttattacttgcaatctatacaatgggtattgctcgtaaaataccgatgaaacaattgatgacatctgcagaagaatctgttcgcgctataggtatgatgttacttattattggtggtggcggagccttaaaacaagtcttaattgatggcggggtcggtgactctgttgctgctttatttgatggaacgagtatgtccccaatatttcttgcttggttgattgctgcaatcttaagaattgcacttggttctgcaactgtagcagcattaacaactgtaggtatggtaatcccattaatggaaggtacagatgtaaaccttgccttaatggtgttagcaactggtgcaggtagcttgattgcgtcccacgtaaatgatacaggattctggatctttaaagaatactttaatttatccatgaaagaaaccttcgcaacatggacgttacttgaaacagtaatttcagtcgcaggtctagtgtttacactagcgttaagtttaattgtataa

SEQ ID NO: 45431 - protein, 448 aa, Oceanobacillus iheyensis HTE831
MPLIIVALAVVLLLLLIMKWNLNTFISLIIVSFLTALALGMPLGEIVTSIEGGLGGTLGDIALIFGFGAILGKLVADAGGAQRIALTLIHKFGEKRIQWAVVIASFIIGVALFFEVGLVLLIPIIYQIAKEIKIPLLYLGLPMTAALSVTHGFLPPHPGPTVIAQQYGANIGMVLIYGIIIAVPTVILAGPLFTKVAKKIVPDAFSKVGNLGSLGGAKSFPEEETPSFAVSALTALFPVILMAITTVVDLLQDIGDVSDNILFEIMRMIGQPTTALLISLLLAIYTMGIARKIPMKQLMTSAEESVRAIGMMLLIIGGGGALKQVLIDGGVGDSVAALFDGTSMSPIFLAWLIAAILRIALGSATVAALTTVGMVIPLMEGTDVNLALMVLATGAGSLIASHVNDTGFWIFKEYFNLSMKETFATWTLLETVISVAGLVFTLALSLIV

SEQ ID NO: 45432 - DNA, 1317 bp, Shigella flexneri 2a str. 301
  CDS (1)..(1317): transl_table=11
atgccattagtcattgttgctatcggtgtaatcttgttgttgctcctgatgatccgcttcaaaatgaacggcttcatcgctctcgtcctcgtggcgcttgctgttggattaatgcaaggaatgccgctggataaagttattggctccatcaaagccggtgtcggcgggacgctcggtagccttgccctgatcatgggttttggcgcaatgctgggcaaaatgctggcagactgcggtggcgcacaacgtatcgccaccacgctgattgccaaatttggtaaaaagcacatccagtgggcggtggtgttaaccggttttaccgttggttttgccctgttctatgaagtgggcttcgtgctgatgctgccgctggtgtttaccatcgcggcttccgcgaatattccattgctgtatgttggtgtaccaatggcggctgcactgtctgtgacccacggcttcctgccaccgcatccgggcccgactgcgattgccaccattttcaatgccgatatgggtaaaaccctgctgtacggtactattctggcaatcccgaccgtgattctcgccggtccggtttacgctcgcgtgttgaaaggtatcgataagccaatcccggaaggtctctacagcgcgaaaaccttcagcgaagaagagatgccgagctttggcgtcagcgtctggacctctctggtgccggttgtgctgatggcgatgcgtgcgattgccgaaatgatcctgccgaaaggtcacgctttcctgccggtagcggagttcctcggtgacccggtaatggcaacgctgattgccgtgctgattgcgatgttcacctttggtctgaaccgtggtcgttcaatggatcagattaacgacacgctggtttcttccatcaaaatcattgcgatgatgctgttgatcatcggtggtggcggtgcgttcaagcaggtgctggtagacagcggcgtggacaaatacattgcttccatgatgcacgaaaccaacatttctccgctgctgatggcctggtcgattgctgccgtactgcgtatcgcgctgggttccgcaaccgttgcggcaatcactgcgggtggtatcgcggcaccgctgattgcaacgacgggtgttagcccacagctgatggttattgcggtgggttccggtagtgtgattttctctcatgtgaacgatccgggcttctggctgttcaaagagtactttaacctgactatcggcgagaccatcaaatcctggtcgatgctggaaaccattatctcggtgtgcggtctggtaggctgtctgctgctgaatatggtgatttga

SEQ ID NO: 45433 - protein, 438 aa, Shigella flexneri 2a str. 301
MPLVIVAIGVILLLLLMIRFKMNGFIALVLVALAVGLMQGMPLDKVIGSIKAGVGGTLGSLALIMGFGAMLGKMLADCGGAQRIATTLIAKFGKKHIQWAVVLTGFTVGFALFYEVGFVLMLPLVFTIAASANIPLLYVGVPMAAALSVTHGFLPPHPGPTAIATIFNADMGKTLLYGTILAIPTVILAGPVYARVLKGIDKPIPEGLYSAKTFSEEEMPSFGVSVWTSLVPVVLMAMRAIAEMILPKGHAFLPVAEFLGDPVMATLIAVLIAMFTFGLNRGRSMDQINDTLVSSIKIIAMMLLIIGGGGAFKQVLVDSGVDKYIASMMHETNISPLLMAWSIAAVLRIALGSATVAAITAGGIAAPLIATTGVSPQLMVIAVGSGSVIFSHVNDPGFWLFKEYFNLTIGETIKSWSMLETIISVCGLVGCLLLNMVI

SEQ ID NO: 45434 - DNA, 1344 bp, Shigella flexneri 2a str. 301
  CDS (1)..(1344): transl_table=11
atgcatgtgcttaacattctctgggtggtattcggcattggcctgatgctgatactgaatttgaagttcaaaatcaattcaatggtggctttgttggtggcggcgctgtccgtcgggatgctggcaggcatggatttgatgtcgctgctgcacaccatgaaagcgggcttcggcaacacgctgggagaactggctatcatcgtggtgttcggtgcggtcatcggtaaattgatggtcgactccggcgcggctcaccagatagcacatacgctgctggcgcgtctcggtctgcgctatgtacagctgtcggtgattatcatcggccttattttcggtctggcgatgttctatgaagtggcctttatcatgttagcgccgctggttattgttattgccgccgaagctaaaattccgttcctgaaactggcgatcccggcagtagcagctgccactaccgcacattcactgttcccaccgcagccgggtccggtggcgctggtgaatgcttatggcgcggatatggggatggtttatatctatggcgtactggtgacgatcccaagtgtaatctgcgcaggtctgatcctgccgaagttcctcggcaatcttgagcgcccaacgccatcattcctgaaagcagatcaaccggtagatatgaataatctgccctctttcggcgtttcgattctggtgccgctgatcccggcgatcattatgatctctaccaccatcgccaatatctggctggtaaaagatacccctgcctgggaagtggttaactttattggttcctcgccgattgcgatgtttattgcgatggtggttgcattcgtactctttggcaccgcgcgtggtcatgacatgcagtgggtgatgaacgcttttgaaagcgcggtgaagagtattgcaatggtgattctgatcatcggtgcgggtggcgtgctgaagcagaccatcatcgacaccggcattggcgacaccatcggcatgttgatgtcccacggcaatatctcgccctacattatggcatggctgatcactgtgctaattcgtctggcgacgggtcagggtgtcgtttcggcgatgaccgccgccgggattatcagtgctgcaatccttgatccagcaaccggtcagctggttggcgtgaatccggcgctgctggtactggcgacggctgcgggttccaacaccctcacccacattaatgatgcatctttctggttgttcaaaggttactttgacctgtcagtaaaagacacgttgaaaacctggggtctgctggagctggtcaactccgtggttgggctgattattgtgctgattattagcatggtagcgtaa

SEQ ID NO: 45435 - protein, 447 aa, Shigella flexneri 2a str. 301
MHVLNILWVVFGIGLMLILNLKFKINSMVALLVAALSVGMLAGMDLMSLLHTMKAGFGNTLGELAIIVVFGAVIGKLMVDSGAAHQIAHTLLARLGLRYVQLSVIIIGLIFGLAMFYEVAFIMLAPLVIVIAAEAKIPFLKLAIPAVAAATTAHSLFPPQPGPVALVNAYGADMGMVYIYGVLVTIPSVICAGLILPKFLGNLERPTPSFLKADQPVDMNNLPSFGVSILVPLIPAIIMISTTIANIWLVKDTPAWEVVNFIGSSPIAMFIAMVVAFVLFGTARGHDMQWVMNAFESAVKSIAMVILIIGAGGVLKQTIIDTGIGDTIGMLMSHGNISPYIMAWLITVLIRLATGQGVVSAMTAAGIISAAILDPATGQLVGVNPALLVLATAAGSNTLTHINDASFWLFKGYFDLSVKDTLKTWGLLELVNSVVGLIIVLIISMVA

SEQ ID NO: 45436 - DNA, 1398 bp, Streptomyces coelicolor A3(2)
  CDS (1)..(1398): transl_table=11
gtgaccagactcagcgtcgagatgctggcagcggaccccgtcgagccgatcacctcggcgggccacgcccagctgggcatcgccgtgctcctgggcatcgccgtcatcgtcctgctcatcaccaagttcaagctgcatgccttcctgtcgctgaccatcgggtcgctggcgctcggcgcgttcgccggtgcgccgctggacaaggtcatcaccagcttcaccgccggactcggctccaccgtcgcgggcgtcggcgtcctgatcgccctcggtgcgatcctcggcaagatgctcgccgactccggcggcgccgaccagatcgtggacaccatcctggcgaaggccacgccccgttcgatgccgtggacgatggtgctgatcgcctcggtcatcggactgccgctgttcttcgaggtcggcatcgtgctgctgatcccggtcgtcctgatggtcgccaagcgcggcaactactcgctgatgcggatcggcatcccggcgctggccggtctgtccgtgatgcacggcctggtcccgccgcaccccggcccgctggtcgccatcgacgcggtggacgccaacctcggtgtgaccctggcgctgggcgtgctgatcgcgatccccaccgtgatcatcgccggtccggtcttctcgaagtacgcggcccgctgggtggacgtcccggcccccgaccgcatgatcccgcagcgcgcctccgagcggctggacaagcgtccgagcttcggcgccacgctggccacgatcctgctgccggtcgtgctgatgctgctcaaggccctggtcgacatcatcatcgacgaccccgacaacgtggtgcagcgcaccttcgacgtcatcggcaacccgctgatcgccctgctggtctcggtgatcgtcggcatcttcacgctgctgcggcccgccgggttcggcaaggaccgtctctccggcctggtcgagaaggggctggcgcccatcgccggcatcctcctgatcgtcggcgcgggcggcggcttcaagcagacgctgatcgactcgggcgtgggccagatggtcctggacatctccaaggactggtcgatcccggcgctgctgctcgcctggctgatcgcggtggtgatccggctggcgaccggttcggcgacggtggcgaccgtctcggcggccggtctggtcgcgccgctggcggccgacatgtcgaccacgcacgccgccctgctggtcctggccatcggcgccggttcgctcttcttcagtcacgtcaacgacgccggcttctggctggtgaaggagtacttcgggctgaacgtggggcagaccatcaagacctggtccgtcatggagacgatcatctcggtggtcgccggtgccctggtcctgctgttgtccctggtcatatag

SEQ ID NO: 45437 - protein, 465 aa, Streptomyces coelicolor A3(2)
MTRLSVEMLAADPVEPITSAGHAQLGIAVLLGIAVIVLLITKFKLHAFLSLTIGSLALGAFAGAPLDKVITSFTAGLGSTVAGVGVLIALGAILGKMLADSGGADQIVDTILAKATPRSMPWTMVLIASVIGLPLFFEVGIVLLIPVVLMVAKRGNYSLMRIGIPALAGLSVMHGLVPPHPGPLVAIDAVDANLGVTLALGVLIAIPTVIIAGPVFSKYAARWVDVPAPDRMIPQRASERLDKRPSFGATLATILLPVVLMLLKALVDIIIDDPDNVVQRTFDVIGNPLIALLVSVIVGIFTLLRPAGFGKDRLSGLVEKGLAPIAGILLIVGAGGGFKQTLIDSGVGQMVLDISKDWSIPALLLAWLIAVVIRLATGSATVATVSAAGLVAPLAADMSTTHAALLVLAIGAGSLFFSHVNDAGFWLVKEYFGLNVGQTIKTWSVMETIISVVAGALVLLLSLVI

SEQ ID NO: 45438 - DNA, 1386 bp, Pseudomonas putida KT2440
  CDS (1)..(1386): transl_table=11
atgactcccttagatatacagctattactgacggcattggccagtgttctggtgctggtggcgctcatcgtttcgcgcctgaaaatgcacccgctgctggccttgctggtggtgtccattggcgtgggcttcgcgacgcatatggcgccaggcagcatcgtctcccacctgctcaccggcgccggcaagacactgggcgcagtgggggtggtgattgcgctgggtgcgatgctcggcaagatcctggctgacgctggcgtcacggagcaggtcgcggatgtcatcctcaagcgcacccccgaccgcatgatcccttgggccatgatgctggttgcctttgtcattggcatccccatgtttttcgaagtcggcctggtgatcatgctgccgctgatattcagcgtggcgcgcaaactggaaagcaaggcgcgcttcaaaggctcggcgtacgtgtatgtaggtgtgccggtcatttcggcgcttgccgccatgcacggcatggtaccgccgcacccaggccccctgaccgccattgccgtgctcaagacctcggtggggcccaccatgctctatggcttccttgccgccattccggcaatgatcctgggcggcccgctgtacggcatgttcatttcaccgcgcatgaacacgcggcccgatcaggcattgctggaccagttcacactggctgaaaaagccgatggccaaccccgccccggggtaatggtcggcatgctggccgcattgctgccggccatcctgatgctggtgcatgccgtcgccgagatgctgctgcccaaaggcaatgcgctgctggagatggccagcttcctgggcaacccgctgatcgccatgctgctgggcgtgctgttcgccggcgccagcctggtgcttgcgcgcggcggcgacgccgaacagctgcgcgatgcactgggcaaaagcctcaagccgatcgcctcgatcatcatgatcattgccggtggcggtgcctttcaagagatgctgaccagcgccaaggtaggcgatgccattgtgcacctgacccagcaatctgccttccctcccctgattctggggtggctgatcgcgatgctgctctcggtgtctaccggttccgccacggtcggtatcgtaggggctgccggcttgctggcgccgctggcaggtgcagacccaagccttaacctgcctttgctggccctgtccatcggctgcggttcgctgttcttcaactatgcgaaccatgcaggcttctggatggtgaaagaatcctttggcatgaccatgggcgaagccaccaagaccatttcggtggtgcagtccatcgtggcggtggttgggctgatggtggtgttgatgttgaatgcggccatcaccataggttga

SEQ ID NO: 45439 - protein, 461 aa, Pseudomonas putida KT2440
MTPLDIQLLLTALASVLVLVALIVSRLKMHPLLALLVVSIGVGFATHMAPGSIVSHLLTGAGKTLGAVGVVIALGAMLGKILADAGVTEQVADVILKRTPDRMIPWAMMLVAFVIGIPMFFEVGLVIMLPLIFSVARKLESKARFKGSAYVYVGVPVISALAAMHGMVPPHPGPLTAIAVLKTSVGPTMLYGFLAAIPAMILGGPLYGMFISPRMNTRPDQALLDQFTLAEKADGQPRPGVMVGMLAALLPAILMLVHAVAEMLLPKGNALLEMASFLGNPLIAMLLGVLFAGASLVLARGGDAEQLRDALGKSLKPIASIIMIIAGGGAFQEMLTSAKVGDAIVHLTQQSAFPPLILGWLIAMLLSVSTGSATVGIVGAAGLLAPLAGADPSLNLPLLALSIGCGSLFFNYANHAGFWMVKESFGMTMGEATKTISVVQSIVAVVGLMVVLMLNAAITIG

SEQ ID NO: 45440 - DNA, 1353 bp, Pseudomonas putida KT2440
  CDS (1)..(1353): transl_table=11
atgttcggactggctactgataccttcctgctgctcgacgcgctggttaccatcgtcgggctgatcctgctgatcacccacttcaaggttcaccccttcgtcgccctcaccctcgcggccggcttcctgggcctgacttccggcatgccggtggccaaggtcatgaaatcgttccaggacggttttggcggcgtactcggcttcgtcggtatcgtgctcgccctgggcaccatgctcggcaagctgatggccgactccggtggtgccgaccagatcgcgcaaaccctcatccgcgccttcggcaagaagaacgtgcattgggcgatgatgttcgccgccttcctggtgggcatcccgctgttcttcgaaatcggctttgtgctgctgattccactggtgttcatcgtcgcccggcgctcgggcgtctcgttggtgaaaatcggcattccgctgctggccggcctgtcggtggtgcacggtctggtgccaccacacccgggccccttgctggcgatcggcattttccacgctgacattggcaagaccatcttctacggcctgatcgtcgcactgcccaccgcgatcatcgccggccctctgttcggtaacttcatttcccgctacatcccgggcaacccgtcccaggagctgatggaccagatcgccaaggactccgatcagggcaacctgccaagcttcagcattaccctggtcactgtactgctgccggtcgcgttgatgctgctgaaaacgttcgccgacgtggtgctgcctgccgagcacatcgtgcgccagtggatggacctgatcggtcacccgatcaccgccctgctcgccgccctgttactggccttctacaccttcggctcggcccgcggcttcaaccgccagcagatcatgaagatgctcgaccagagcctggcaccgactgccgccatcgtgctgatcgtcggcgctggcggtggcttcaagcaaatgctggtggataccggcgtaggcaacgtgatcgggcagatggctgtccaggcagaaatttcgccgatcatgctggcatggctggtggcggcggtgatccgcatcgcgaccggctccgccacggtcgccaccatcaccggcgcgggtatcgtggcaccggtgatcgacctcgtgccgggggtgaaccgtgagctgttggtactggccaccggtgccggctcgctgatcctgtcgcatgtgaacgatgccggtttctggctggtgaagcagtacttcaacatgaccgtggcagaaaccttcaagacctggagcatgatggagacgatcctgtccatcgtcggcatcattttcatcatgttgctgtcgctggtggtgtga

SEQ ID NO: 45441 - protein, 450 aa, Pseudomonas putida KT2440
MFGLATDTFLLLDALVTIVGLILLITHFKVHPFVALTLAAGFLGLTSGMPVAKVMKSFQDGFGGVLGFVGIVLALGTMLGKLMADSGGADQIAQTLIRAFGKKNVHWAMMFAAFLVGIPLFFEIGFVLLIPLVFIVARRSGVSLVKIGIPLLAGLSVVHGLVPPHPGPLLAIGIFHADIGKTIFYGLIVALPTAIIAGPLFGNFISRYIPGNPSQELMDQIAKDSDQGNLPSFSITLVTVLLPVALMLLKTFADVVLPAEHIVRQWMDLIGHPITALLAALLLAFYTFGSARGFNRQQIMKMLDQSLAPTAAIVLIVGAGGGFKQMLVDTGVGNVIGQMAVQAEISPIMLAWLVAAVIRIATGSATVATITGAGIVAPVIDLVPGVNRELLVLATGAGSLILSHVNDAGFWLVKQYFNMTVAETFKTWSMMETILSIVGIIFIMLLSLVV

SEQ ID NO: 45442 - DNA, 1356 bp, Lactobacillus plantarum WCFS1
  CDS (1)..(1356): transl_table=11
atgccatttgttgttcttacactcggcatcctactactattactattaattattaaattcaagctgaatacttatattgcactgattgttacggccgtcgtcgtcggaatcggactagggatgccattaactaagattgctactagtattcagaacgggattggcagtcaactgggtgagttagcactagtcttcggcttcggtgccatgctcggccgcttagtagccgatgctggtggtgcttacacgatttccacgacactattggatattttcgggcgcaaacggctacaaattgccatcgtagtcgcctcatttatcatcgggattgccctcttcttcgaagttgggatcgtcttgttgattccaatcgtctttgccattgcgatcgaagcacaagttcccgttctctatctggggattcccatgggcgccgcattatctgttactcacggattcttaccaccgcacccggcaccaactgcaattgcgacgacgctaaatgcgaacgtgggtcatgtgctactattcgggatcattattgcgattccaactgtttatatcgcaggaccgctcttttcacgctgggcgcaaaagatggttcctgacgcattcaccggtaaaccacacctgccacttagcagtaacaaacgtcaattcaaagtatctgaagcacccgggtttggactcagtgtcttaacggcgctcttccccgtgattctgatgacaatcaccaccgtctacgaattagtcgttgatcacggtgtgacacctaaaaacccgtcgacccttgaccaaatcattcgtttgattggggcacccggaattgccatgttaatttcactattattcgccctctggtcaatggggattcaccaacacaagaccaataaggccatcacggccaccatcgaagatgccactaagtcaattgccatgttattactaatcatcggtgggggtggcgccttcaaacagatcttaattgatgggggtgttggtaaggccgtggcccagttgttcagtggcagcagcatctcaccactgattcttggctggctagtcgctgtcatcttacgggtctcactcggctccgctaccgtagcggccctcacggcagccggcctagttgcgccgttaatgacgcaagctggtatcgaccccgccctgatggtaattgccatcggctctgggagtgtcgccgcttctcacgtgaacgacgctggtttctggatgttccgggaatacttcgacctgaccgtcaagcaaacgctgcttacatggacaatgttagaaacgatcatcgctgtctgcggtctcggaggcgtgttggcgctcaacgccatcttccattaa

SEQ ID NO: 45443 - protein, 451 aa, Lactobacillus plantarum WCFS1
MPFVVLTLGILLLLLLIIKFKLNTYIALIVTAVVVGIGLGMPLTKIATSIQNGIGSQLGELALVFGFGAMLGRLVADAGGAYTISTTLLDIFGRKRLQIAIVVASFIIGIALFFEVGIVLLIPIVFAIAIEAQVPVLYLGIPMGAALSVTHGFLPPHPAPTAIATTLNANVGHVLLFGIIIAIPTVYIAGPLFSRWAQKMVPDAFTGKPHLPLSSNKRQFKVSEAPGFGLSVLTALFPVILMTITTVYELVVDHGVTPKNPSTLDQIIRLIGAPGIAMLISLLFALWSMGIHQHKTNKAITATIEDATKSIAMLLLIIGGGGAFKQILIDGGVGKAVAQLFSGSSISPLILGWLVAVILRVSLGSATVAALTAAGLVAPLMTQAGIDPALMVIAIGSGSVAASHVNDAGFWMFREYFDLTVKQTLLTWTMLETIIAVCGLGGVLALNAIFH

SEQ ID NO: 45444 - DNA, 1353 bp, Pseudomonas syringae pv. tomato str. DC3000
  CDS (1)..(1353): transl_table=11
atgttcggtatgacccatgagacgttcctgctcgtcgatgcgttggtgaccatcgtcggccttgtgctactgatcaccaccttcaaggttcaccctttcgtcgcgctgacactggcggcaggctttcttggcctgacgtcgggaatgccagtagaaaaagtcatgaagtccttccaggagggcttcggcggcgtgctgggtttcgtcggtatcatccttggcctgggcaccatgctcggcaagctgatggccgattcggggggtgcggaccagattgcgcagaccctgatccgcacctttggtaaacagaaagtgcattgggcaatgatgttctccgcgtttctggtgggcatcccgctgttcttcgagatcggttttgtgctgctgatcccgctggtgttcatcgtcgcccgtcgtaccggcgtgtccatcgtcaagatcggcatcccgttgctggctggcctgtcggccgtacacggcctggttccaccgcacccgggcccgctgctggccatcggcatttttggtgctgatatcggcaagaccattttttatggcctgatcgtcgcgctgccaaccgccatcatcgcgggtcccatctacggcaactggatctccaagcgcatccccggtacgccgtcgcaggagttgatggaccagatcgccaaggagtcgagcactgaaaacctgccgggctttggcatcacgctgatcaccatcctgctgcctgtgttcctgatgctgctcaagacctttgctgacgtggtgttgccggaaaacaacatgttccgcatctggatggacctgatcggtcacccgatcactgccctgctggcagcgctgttgctggcgttctacacctttggtgcggcacgcggctttgaccgcaccaaaatcatgaaactgctggaccagagccttgcaccggttgcagccatcgtcctgatcgtcggcgcaggtggcggcttcaagcagatgctggtggccagcggtgtgggtgatgtcatcgggcacatggccgtacaggcacagatcaacccgatcatgctggcttggctggtggcggcggtgattcgcattgcgactggttcggctaccgtggcgaccattaccggtgcagggattgtggcgccagtggttggcctgattccaggcgtcaatcgcgagctgctggtgctggccacgggtgccggctcgttgatcctgtcgcacgtcaacgatgccggtttctggctggttaaacagtatttcaacatgaccgttgccgaaacgttcaagacctggacagtgatggaaaccatcctgtcggtggtcggcctgatcttcatcatgctgttgtcgatggcactttaa

SEQ ID NO: 45445 - protein, 450 aa, Pseudomonas syringae pv. tomato str. DC3000
MFGMTHETFLLVDALVTIVGLVLLITTFKVHPFVALTLAAGFLGLTSGMPVEKVMKSFQEGFGGVLGFVGIILGLGTMLGKLMADSGGADQIAQTLIRTFGKQKVHWAMMFSAFLVGIPLFFEIGFVLLIPLVFIVARRTGVSIVKIGIPLLAGLSAVHGLVPPHPGPLLAIGIFGADIGKTIFYGLIVALPTAIIAGPIYGNWISKRIPGTPSQELMDQIAKESSTENLPGFGITLITILLPVFLMLLKTFADVVLPENNMFRIWMDLIGHPITALLAALLLAFYTFGAARGFDRTKIMKLLDQSLAPVAAIVLIVGAGGGFKQMLVASGVGDVIGHMAVQAQINPIMLAWLVAAVIRIATGSATVATITGAGIVAPVVGLIPGVNRELLVLATGAGSLILSHVNDAGFWLVKQYFNMTVAETFKTWTVMETILSVVGLIFIMLLSMAL

SEQ ID NO: 45446 - DNA, 1377 bp, Vibrio parahaemolyticus RIMD 2210633
  CDS (1)..(1377): transl_table=11
atggagcaattaacccaagccccagatcctacgttcctactgacgattgcaggccttgccattgcagcgttactcgttctgatcattaaactgaaagtccatgcttttgcttcccttactatggtgagtttaggcacagcaatcgccactggcgttccttctgagaaagtcgtatcgaccatgatgggcggcttcggcggcacactggcttccgtggcattgctggttggtcttggtgcgatgatcggtaaaattcttgaagtgactggcggtgcgaaagtgctggcagacactttgattggtcgctttggtaaagagcgcgcaccatttgctttgggcgtcgcttcattactgtttggcttcccaatcttcttcgatgctggccttgtagtgatgatgccaatcatcctaagtgtggcggctcgttttggtggctcaccaattaaatacgcgttgcctgcagctggtgcttttgcggttatgcacgcgtttgttccaccacacccaggtccggttgcagcggcagaattccttggcgcaaacatcggtctgctattggtggtgggtattttggttgctattccaacttggtaccttggcgcttacctatttggtttgtacgcgggcaaaaaattcgatatcccactatctaaagccttctttaatggcgaagcaatggtggatgagcgcaacgcaccaaaatttggcacggttatgaccatccttgtgctgccagtcctgctaatctgtttggatacggtattgaacacactggcggttgcaggtttgattgatggcaaaacggcactggttgagttcctacgtatgctaggtaaaactccagtcgcgttgctgattactttgattgtctgtctggctgtgtttgccaaagactacggcatggcaaaactagaaaaattgtgtggtgagtcattggctccaatctgtggcgttatccttgtaacgggtgctggtggcatgtttggcggcgtactgcgttcaagcggcatcggtgatgcactggctgacgttcttacagacacaggtatgcctgtgattgtggcggcgtttgtgatttcaacctgtttgcgtgttgctcaaggctcggcaaccgtagcgctaaccactacggcggctcttatcgcgccagttgtggctgcatcaacaggtttgagtgaactagacctttgctttatcgtaatcgcgattgcgggtggtgcaacggtactgtctcacttcaatgactctggtttctggttggtatctcgtctgcttgagatggatgagaaaaccacattaaaaacttggacggtaatggaaacgttacttggcggtatcgcgtttattatcgtcgcaacattaagctttattctttag

SEQ ID NO: 45447 - protein, 458 aa, Vibrio parahaemolyticus RIMD 2210633
MEQLTQAPDPTFLLTIAGLAIAALLVLIIKLKVHAFASLTMVSLGTAIATGVPSEKVVSTMMGGFGGTLASVALLVGLGAMIGKILEVTGGAKVLADTLIGRFGKERAPFALGVASLLFGFPIFFDAGLVVMMPIILSVAARFGGSPIKYALPAAGAFAVMHAFVPPHPGPVAAAEFLGANIGLLLVVGILVAIPTWYLGAYLFGLYAGKKFDIPLSKAFFNGEAMVDERNAPKFGTVMTILVLPVLLICLDTVLNTLAVAGLIDGKTALVEFLRMLGKTPVALLITLIVCLAVFAKDYGMAKLEKLCGESLAPICGVILVTGAGGMFGGVLRSSGIGDALADVLTDTGMPVIVAAFVISTCLRVAQGSATVALTTTAALIAPVVAASTGLSELDLCFIVIAIAGGATVLSHFNDSGFWLVSRLLEMDEKTTLKTWTVMETLLGGIAFIIVATLSFIL

SEQ ID NO: 45448 - DNA, 1398 bp, Streptomyces avermitilis MA-4680
  CDS (1)..(1398): transl_table=11
gtgaccagactcagcgtcgagaagctggcagcggacaccgtcgaaccgatcacctcggcgggccacgctcaactcggcatcgcggtactggcgggcatcgccgtcatcgtgctgctcatcaccaagttcaagcttcacgcgttcctcgccctgaccatcggttcgctcgcgctcggcgcgttcgccggggcgccgctcgacaagaccatcgtcagcttcacggccgggctcggctcgaccgtcgccggtgtgggcgtcctgatcgcgctgggcgccatcctcggcaagctgctcgccgactccggcggcgccgaccagatcgtcgacacgatcctcgcgaaggcgggcgggcgggccatgccgtgggcgatggtgctgatcgcctccgtgatcggcctgccgctgttcttcgaggtgggcatcgtgctgctcatcccggtcgtgctgatggtcgccaagcgcggcaactactcgctgatgcggatcggcatcccggcgctcgcgggcctgtccgtgatgcacgggctgatcccgccgcaccccggcccgctggtcgcgatcgacgcggtcaaggcgaacctcggcctcacgctggcgctcggtgtcctcgtcgccatcccgacggtgatcatcgcgggcccggtgttctcgaaatacgcagcccgctgggtggacgttccggctcccgaccgcatgatccccacccgcgcttccgaggacctggacaagcgccccggcttcggcgccaccctcgccaccatgctgctgccggtcgtgctgatgctggcaaaggccctggtcgacatcatcgtcgacgaccccacgcaccaggtgcagcgcgtcttcgacgtcatcggcgcaccgctgatcgcgctgctcgcggccgtgatcgtcggtatgttcacgctgggccgcgcggccggcttcaccaaggagcgcctctcgacgaccgtcgagaagtccctcgccccgatcgcgggcatcctgctgatcgtcggcgcgggcggtggcttcaagcagacgctgatcgactccggtgtgggccagatgatcctggagatctccaaggactggtcgatcccggcgctgctgctggcctggctgatcgcggtggcgatccggctcgcgaccggttcggcgacggtcgcgaccatctccgcggccggtctcgtcgcgcccctcgcggccgacatgtcgaccgcgcacacctcgctcctcgtgctggcgatcggggcgggctcgctcttcttcagccatgtgaacgatgccgggttctggctggtcaaggagtacttcggtctgagcgtcggccagacggtcaagacctggtcgatcatggagaccatcatctcggtggtcgccggcggactggtcctgctgctgtccctcgtgatctag

SEQ ID NO: 45449 - protein, 465 aa, Streptomyces avermitilis MA-4680
MTRLSVEKLAADTVEPITSAGHAQLGIAVLAGIAVIVLLITKFKLHAFLALTIGSLALGAFAGAPLDKTIVSFTAGLGSTVAGVGVLIALGAILGKLLADSGGADQIVDTILAKAGGRAMPWAMVLIASVIGLPLFFEVGIVLLIPVVLMVAKRGNYSLMRIGIPALAGLSVMHGLIPPHPGPLVAIDAVKANLGLTLALGVLVAIPTVIIAGPVFSKYAARWVDVPAPDRMIPTRASEDLDKRPGFGATLATMLLPVVLMLAKALVDIIVDDPTHQVQRVFDVIGAPLIALLAAVIVGMFTLGRAAGFTKERLSTTVEKSLAPIAGILLIVGAGGGFKQTLIDSGVGQMILEISKDWSIPALLLAWLIAVAIRLATGSATVATISAAGLVAPLAADMSTAHTSLLVLAIGAGSLFFSHVNDAGFWLVKEYFGLSVGQTVKTWSIMETIISVVAGGLVLLLSLVI

SEQ ID NO: 45450 - DNA, 1338 bp, Photorhabdus luminescens subsp. laumondii TTO1
  CDS (1)..(1338): transl_table=11
gtggattcacaaccttgggtgattggtacgttactcacaagtattgcgttaattgtatttacgataattaaattaaaaattcacccttttcttgctctattgttagccagtttttatgtcggtgccttaatgggaatgaaccctgttgaaatggtgaacgccattcaagggggaatcggagatacgctaggttttttagccgtagtgattggtctggggaccattcttggtaagatgatggagatatccggcgcggcagagcggattggtatcacattgcaaaaatgccgatggctatcacctgatatcattatggtactgattggtttggtttgtggtattacgctgtttgttgaagtcggggtggtattgttaattccattggcattttctattgccaggaaaaccaatacatcattgctgaaattagcgatcccattatgtacagcgttgatggcggttcactgtattattcctccgcacccggctgcattatttgtgacgaataaactgggtgcggatattggctcggtgattgtttatgggttgatagttggcctgtttgccgctttggtgggggggccattatttctgaaatttctcggtagccgtctgccttttaaatcggttccggctgaattttctgaaattgcagttcgtcaagaagaggatttaccctctttaggcatgacattgtttactgtgttattgccaattgggttaatgttgactaaaacggctgctgaattaaatatggaaaaaggtaccacgttttatacggtgctggaatttattggtaatcctattacagccatgttcattgccgcgtttgttgcctattacaccttgggcattaagcaaaatatgggaatgagtacactgttgacgaagacggaagattgtttctcttctatcgccaatattttattaattatcggcgcgggcggggcatttaatagtattttaaaagtcagtggccttagtgatacgttggccgttattttgtcgagtctggatatgcacccaattcttttgtcttggttggttgccattattttgcatgcggcggttggttcagcaacggtcgcaatgatgggggcaacagcgattgtttcgcctatgttgccgttatatccagatattagccctgaaatcattacattggcgattggttctggtgctatcggctgtactattgtgacggattcactgttttggttggttaagcaatattgcggaacaacgctcagtgaaacttttaagtattatacaaccgcaacatttattgcctctgtggttgcgttggttgggacgtttcttctttctaccatcgtgtag

SEQ ID NO: 45451 - protein, 445 aa, Photorhabdus luminescens subsp. laumondii TTO1
MDSQPWVIGTLLTSIALIVFTIIKLKIHPFLALLLASFYVGALMGMNPVEMVNAIQGGIGDTLGFLAVVIGLGTILGKMMEISGAAERIGITLQKCRWLSPDIIMVLIGLVCGITLFVEVGVVLLIPLAFSIARKTNTSLLKLAIPLCTALMAVHCIIPPHPAALFVTNKLGADIGSVIVYGLIVGLFAALVGGPLFLKFLGSRLPFKSVPAEFSEIAVRQEEDLPSLGMTLFTVLLPIGLMLTKTAAELNMEKGTTFYTVLEFIGNPITAMFIAAFVAYYTLGIKQNMGMSTLLTKTEDCFSSIANILLIIGAGGAFNSILKVSGLSDTLAVILSSLDMHPILLSWLVAIILHAAVGSATVAMMGATAIVSPMLPLYPDISPEIITLAIGSGAIGCTIVTDSLFWLVKQYCGTTLSETFKYYTTATFIASVVALVGTFLLSTIV

SEQ ID NO: 45452 - DNA, 1389 bp, Corynebacterium diphtheriae NCTC 13129
  CDS (1)..(1389): transl_table=11
atggaagattgggttcccacccttagtgctggccccttattggggatcgccgccgcggcgattgcactcattttggtcctcgtcattgtgttcaagctccacgctttcctcacactgatcatcgtttccgcagctaccggactcgccgccggcatcccactggagggcatcgtgcccaccatgaccaaaggcttcggaagtacactcgcctcagttgccctcctcgtcggcctcggagcaatgctcggccggcttgtcgaaacctccggcggtgcaaaaagcctcgccgaaaccctcgtcgcccgcttcggtgaacaacgcgcccccttcgccctcggcgtagcctccctgctgatgggtttccccatcttcttcgacgccggcctgatcgtcatgctgcccgtcatcttcgccgtggcacgccgactcaacggccccgtcctggcctacggcatccccgccgccggcgcgttctccgtcatgcacatctacctgccaccgcacccagggccaatctcagctgcagaattctacagcgcagacatcggcctcgtcatgctcctcggcctaatcatcgcgatccctacctggctgatctccggcctctggctcggtaaaaccctcggccgccgctacccactgccagttcctgacatcctagccggtggcccccaagcaaccgacgtgaaaaaccccgccacaccagggcttatcgtctccctcttgttgcttcctatgctgctcatcttcggcaacaccagcatgggccttgccacctccgcaggctgggtagacaagagctcgagcctcgtgcgcgccctacaattcgtgggcagcacccccattgccttgctgatctcaaccctcgtggcgctgtacttcctcggcattcgtcgcggccagcccaaagctgacctagaaaagcttctcgacggtgccctcggacccatctgctccgtcgtattgatcaccggtgccggtggcatgttcggtggcgtactgcgcacctccggcatcggcgacgccctagccgactccatgtccgacctcggtgtccccgtcgtcctcggctgttggctcgtcgccgccatcctgcgcctcgcccaaggctcggccaccgtggcactgaccaccgccgcagcactgatggcacccgccgtcgccgccggcggctacagcgaattccaaatcgcactcatggtgctggcctccgcagccggctccgttttcgcaggccacgtcaacgactctggcttctggctcgtcggccgcctcatgggtatggacgttgccacgaccctgcgcacctggacactcaaccaagcgctcgttggagccgtgggctttgtattcgtcctcgtcttctacggagtcagctttgccttctaa

SEQ ID NO: 45453 - protein, 462 aa, Corynebacterium diphtheriae NCTC 13129
MEDWVPTLSAGPLLGIAAAAIALILVLVIVFKLHAFLTLIIVSAATGLAAGIPLEGIVPTMTKGFGSTLASVALLVGLGAMLGRLVETSGGAKSLAETLVARFGEQRAPFALGVASLLMGFPIFFDAGLIVMLPVIFAVARRLNGPVLAYGIPAAGAFSVMHIYLPPHPGPISAAEFYSADIGLVMLLGLIIAIPTWLISGLWLGKTLGRRYPLPVPDILAGGPQATDVKNPATPGLIVSLLLLPMLLIFGNTSMGLATSAGWVDKSSSLVRALQFVGSTPIALLISTLVALYFLGIRRGQPKADLEKLLDGALGPICSVVLITGAGGMFGGVLRTSGIGDALADSMSDLGVPVVLGCWLVAAILRLAQGSATVALTTAAALMAPAVAAGGYSEFQIALMVLASAAGSVFAGHVNDSGFWLVGRLMGMDVATTLRTWTLNQALVGAVGFVFVLVFYGVSFAF

SEQ ID NO: 45454 - DNA, 1350 bp, Bacillus cereus ATCC 10987
  CDS (1)..(1350): transl_table=11
atggtagttggaatcgtactagcggcagttgtcatactacttttacttattacggtagtaaaatggcatccgtttgtcgcgttaattttaacagcaattggtgtagggctagcaatgggaatgccattgattggaacttcaccaaaagatccagggattattgattctattaaactagggcttggtaatacgttagggtttttagcgatagttttagcattaggaacgatgcttggaaaaatgatggccgaatctggcggtgctgaacgaattgctaacacattaattgatcgttttgggaagaaacgtgttcactgggcaatgatgtttgttgcatttttagtagggattccggtatttttccaagttggatttgtactactaattccattggtatttacaattgcattagaaacaggggtatcacttattacaatcggtattccactagtagcaggattatccgttgtacacggactagtgccaccgcatccagcagcgatggcagcggtaggtatttttaaagcagatgtagggaagacaattttatatgcgttaattgtcggacttccaactgcaattatttcaggtccactttatggaaaatggattggtgctcgtatacataaggaagtaccattagagatagcagagcaatttgttgaaaaagataataaaaaagagcttcctagctttgggaatacattgtttacaattttacttccagtatttcttatgcttggtgcatcaatagcggaagttgcattaaataaaacgagtcaactagcacaagtattacactttattggagatccgattgtcgctttattaattgcaaccatttactctttctttagtcttggatatgcaaaaggtttctcaaaagataaagtattacaatttacaaatgattgccttgggccaattgcaaacatattgttagtgattggtgcaggcggagcatttaataaagtattattagattctggaattggaacgacaattgcagatatggcgaaagaatcgcatatttcaccaatattattagggtggggaattgcggcactaatccgaatcgcaactggatcggcaactgtttctatgatgacagcagctggtattgttgcaccgattgcagcaagtacaccaggtgtaaatgtagaattattagcacttgcaacaggtgcagggtcattaattttatcacatgtaaatgattctggattttggatgattaaagaatatttcgggatgactgtgaaagaaacattattaacatggacggcaatggagacaatattatctgttgtagcacttggactcatttcgttattaaatatatttgtatag

SEQ ID NO: 45455 - protein, 449 aa, Bacillus cereus ATCC 10987
MVVGIVLAAVVILLLLITVVKWHPFVALILTAIGVGLAMGMPLIGTSPKDPGIIDSIKLGLGNTLGFLAIVLALGTMLGKMMAESGGAERIANTLIDRFGKKRVHWAMMFVAFLVGIPVFFQVGFVLLIPLVFTIALETGVSLITIGIPLVAGLSVVHGLVPPHPAAMAAVGIFKADVGKTILYALIVGLPTAIISGPLYGKWIGARIHKEVPLEIAEQFVEKDNKKELPSFGNTLFTILLPVFLMLGASIAEVALNKTSQLAQVLHFIGDPIVALLIATIYSFFSLGYAKGFSKDKVLQFTNDCLGPIANILLVIGAGGAFNKVLLDSGIGTTIADMAKESHISPILLGWGIAALIRIATGSATVSMMTAAGIVAPIAASTPGVNVELLALATGAGSLILSHVNDSGFWMIKEYFGMTVKETLLTWTAMETILSVVALGLISLLNIFV

SEQ ID NO: 45456 - DNA, 1284 bp, Yersinia pestis biovar Microtus str. 91001
  CDS (1)..(1284): transl_table=11
atgctgctattactgatgatccgttacaaacttaacggatttatctcgctgatactggtcgcgttagcggtaggtatcatgcaagggatgccaatcgataaagttgtcggctcgatcaaagcgggtgtcggcggaacattaggtagcctggccttgattatgggcttcggggccatgctcggtaaattgctggccgattgtggcggcgctcaacgtatcgcgaccaccttgattgagaaatttggtcaaaaacatattcaatgggcggtggtactgaccggctttactgtgggttttgccctgttttatgaagtgggttttgtgctgttattgccactggtattcagcattgcggcctctgcccgcatccccttgctatatgtgggtgttcccatggcggcggcgctttctgtcactcatggttttctgccacctcacccaggcccgaccgccattgccaccattttcaacgccgatatgggcaaaacgctgctgtacggcacgttgctggcaatcccaaccgtgattttggcaggcccggtgtacgcccgctttctaaaaggaattgataagcctgttcctgaagggttgtataacccgaaaatctttaccgataaagagatgccaagctttggggtcagtgtcagtacggcgctggtaccggttattttgatggcattgcgggccgtagcagagatgattttgcctaaaggccattcgctgctcccctatgccgagttctttggtgatcctgtaattgctacgctgattgccgtgttaattgcaattttcacctttggtctaaaccggggccgctcagtggaatcggtcatggagaccctgtctgattccatcaagatcatcgcaatgatgctgttagttattggagggggcggtgctttcaagcaggttttagtcgatagcggcatagagcaatatattgctggcatgatgggcaatagcggggcatcacctattctgatggcatggtccatcgccgccttactgcgtatcgccctgggttctgcgacggtggcagcgatcaccgctgggggcattgtcgcaccgttaatcgcgaccaccggtgccagccctgagttgatggtcattgccgttggttccggtagcgtgatcttctctcacgtgaatgaccctggcttctggctattcaaggagtatttcaacctaaccattatggaaaccattaaatcgtggtcagtactggaaaccattatttcagtctgcgggttgatcggctgtttgttgctgtctctggttatttag

SEQ ID NO: 45457 - protein, 427 aa, Yersinia pestis biovar Microtus str. 91001
MLLLLMIRYKLNGFISLILVALAVGIMQGMPIDKVVGSIKAGVGGTLGSLALIMGFGAMLGKLLADCGGAQRIATTLIEKFGQKHIQWAVVLTGFTVGFALFYEVGFVLLLPLVFSIAASARIPLLYVGVPMAAALSVTHGFLPPHPGPTAIATIFNADMGKTLLYGTLLAIPTVILAGPVYARFLKGIDKPVPEGLYNPKIFTDKEMPSFGVSVSTALVPVILMALRAVAEMILPKGHSLLPYAEFFGDPVIATLIAVLIAIFTFGLNRGRSVESVMETLSDSIKIIAMMLLVIGGGGAFKQVLVDSGIEQYIAGMMGNSGASPILMAWSIAALLRIALGSATVAAITAGGIVAPLIATTGASPELMVIAVGSGSVIFSHVNDPGFWLFKEYFNLTIMETIKSWSVLETIISVCGLIGCLLLSLVI

SEQ ID NO: 45458 - DNA, 1359 bp, Staphylococcus aureus subsp. aureus MRSA252
  CDS (1)..(1359): transl_table=11
atgtttaacgaaatatggccgttaatcagtgttgttttaggtataattattttattagtattaatcattgggtttaaattaaatacatttatttcattaattatcacatcgatgattacagcgttaatgctaggtataccattgactaaaattatggagacgattgagaaagggatgggcagtacgctcggccacattgcactgatattcggtttaggtgccatacttgggaaattacttgctgatggtggtggtgcaactcgaattgcagacacgttgattcaaaaatttggtcaaaaacatgtacaatgggcaatgcttgttgcagcatttatcgtcgggattgcattgttctttgaagtaggtttagtcttactgattccattagtatttacagtagcaaaacgcgcaaatgtttcagtgttaaaactaggattacctatggtaacagctttatcagtgacacatggctttttaccaccacatccaggaccggtagtcatcgcaaaagaattaaaggcgaatgtaggagatgtattactatacggtatgattattgccattccagttacactcattgcaggacctatatttaacaaagttgcacaaaaaatgattccgtctgcgtatacacgagaaggcgatatttcagcgttaggtgcacaaaaagaatttacggatcaagagatgccaggatttggtatgagtttattaacagcaacattaccagtcatattaatgttagtgtctacgataacgcaacttgtaaccgggcacgacaaacctacaaatctatttgaatctatcatttatatgatcggaacagcagggacagccatgctaatagcagtattatttgcaatcgttacgatgggattaatgagaaaacgtaagatgaatcatattatggaatcagtgacgaatgcgatttatccaatcggaatgatgttattgattattggcggtggcggtacatttaaacaagtattaattgacggtggtgtcggaaatacaattgctaaaatgtttgaaggtacagagatgtctccgattttactagcttggattgttgcagctgtgctacgtatcgcattaggttcggctacagtagctgcgatttcaactacaggtattgtcttaccattattacaatcatcagatgtaaatgttgcattagttgtactagcgattggtgcaggtagtgtgattttgtctcatgttaatgacgcaggattctggatgtttaaagaatattttggtttaactgtaaaagaaacattcctaacatggtcattattagaaacgattatttccgtttcaggtatcatcttcattttattcatcagcttatttgtttaa

SEQ ID NO: 45459 - protein, 452 aa, Staphylococcus aureus subsp. aureus MRSA252
MFNEIWPLISVVLGIIILLVLIIGFKLNTFISLIITSMITALMLGIPLTKIMETIEKGMGSTLGHIALIFGLGAILGKLLADGGGATRIADTLIQKFGQKHVQWAMLVAAFIVGIALFFEVGLVLLIPLVFTVAKRANVSVLKLGLPMVTALSVTHGFLPPHPGPVVIAKELKANVGDVLLYGMIIAIPVTLIAGPIFNKVAQKMIPSAYTREGDISALGAQKEFTDQEMPGFGMSLLTATLPVILMLVSTITQLVTGHDKPTNLFESIIYMIGTAGTAMLIAVLFAIVTMGLMRKRKMNHIMESVTNAIYPIGMMLLIIGGGGTFKQVLIDGGVGNTIAKMFEGTEMSPILLAWIVAAVLRIALGSATVAAISTTGIVLPLLQSSDVNVALVVLAIGAGSVILSHVNDAGFWMFKEYFGLTVKETFLTWSLLETIISVSGIIFILFISLFV

SEQ ID NO: 45460 - DNA, 1338 bp, Acinetobacter sp. ADP1
  CDS (1)..(1338): transl_table=11
atgttgcttatttatactgtagtcgcgattgttgctttggtcgtgatgatcgcgaagtttagaatttatccatttctggttcttattattgtctcgcttggtttggctttagctgttgggatgccaatgggtgatatcgttaaatcatacgaagctggtactggtaaaaccttgggccatcttgcaattgtaattgcactcgggaccatgctcggaaagatgatggcagagtcgggcggggcagaacgcattgcgattaccttaattcaatggtttggagagaaaaatatccattgggccatgatgtttattggtcttgtggttgggttacctgtgttttttgaagtgggttttgtgctgctcattccaattgtatttaacattgctaaacgtacaggtaagtcattattaatcgtgggtttgccaatgctggcaggcttgtcggtagtgcatggtttaattccgccccatccagcagcgctgctcgctgtacaggcctacaatgctgatattggaacaacgattgcctacagcctcttggtgggggtgccaaccgccgttgttgcagggccgttatatgcactctggatcaataaatacgtcaaattgcctgaaaataatccattagcaaagcagtttgttgaagcagatacaaacagaaatcgtgagctacccagctttagaattactttattcacgatcatgttgcctgtggtcttgatgttggtggggagctgggcagatttattctttgcaccccaaacctttgccaatgatttgctgcgttttattggcacctctgatatcgcgttgttaattgcagtactggtgagctttgttacctttgggactatgcaaggttttacccgtgtacaaattgaaaaattctgtggtggctgcttggcttcgattgctggaatcatgctgattgtgggtgctggtggtggttttgggggtattttacgtgatagcggtatttctgatgagattgtttctacagccttaaaggccaatctatcgccgttattgctgggctggtttgttgcagcattgattcgtttggcaacaggttcggcaactgttgcgatggccacagcctgtagtattgtcgcaccgattgcggcgacagcgggcgtcgttgttagaccagaactcttggtacttgccacaggttcaggctcactggtgttttcgcatgtcaatgatgcaggcttttggctgatcaaagaatatttcggtatgacggtgggacaaacacttaaaacctggtctgtactggaaaccattatttcggtgctgggtttgtcttttacgctgctactgagcgctatcttataa

SEQ ID NO: 45461 - protein, 445 aa, Acinetobacter sp. ADP1
MLLIYTVVAIVALVVMIAKFRIYPFLVLIIVSLGLALAVGMPMGDIVKSYEAGTGKTLGHLAIVIALGTMLGKMMAESGGAERIAITLIQWFGEKNIHWAMMFIGLVVGLPVFFEVGFVLLIPIVFNIAKRTGKSLLIVGLPMLAGLSVVHGLIPPHPAALLAVQAYNADIGTTIAYSLLVGVPTAVVAGPLYALWINKYVKLPENNPLAKQFVEADTNRNRELPSFRITLFTIMLPVVLMLVGSWADLFFAPQTFANDLLRFIGTSDIALLIAVLVSFVTFGTMQGFTRVQIEKFCGGCLASIAGIMLIVGAGGGFGGILRDSGISDEIVSTALKANLSPLLLGWFVAALIRLATGSATVAMATACSIVAPIAATAGVVVRPELLVLATGSGSLVFSHVNDAGFWLIKEYFGMTVGQTLKTWSVLETIISVLGLSFTLLLSAIL

SEQ ID NO: 45462 - DNA, 1335 bp, Erwinia carotovora subsp. atroseptica SCRI1043
  CDS (1)..(1335): transl_table=11
atgccattaatcatcgtagcaattggggttgccctgctgctgctgctgatgatccgttgtaaattgaacgggttcatttcattgattctggtgtcgctggccgtcggcttggcgttgggttacaccactcaggggggatttaacgtcaatggcgtgatcacttctatcaaaaatggggttggcggcacgctgggcagcctggccctgatcatggggtttggcgccatgttgggcaaactgctagcagattgcggcggcgcccagcgtattgcgacgacgcttatcgataaatttggtaaggaccgtatccagtgggcagtggtcttaaccggttttactgtcggttttgcgctgttttatgaagttggttttgtgttgctgctgccgctggtgtttaccattgctgccgcagcgcaaattccattgctgtttatcggtgtgccgatggctgccgcgttatcggtaacccatgcgttgttgcctccgcatccgggcccgaccgctatcgctattctgttcaaagccgatatgggtaaaaccctgctttacggaaccttgattgctatccctactgtgattttggcggggccggtctatgcgcgtttcctgaaaagtatcgataaacctattcctgctggattgcacaatccaaaagtgtttgccgaccatgagatgccgagctttggtatcagcgtattcactaccctgattccggttattctgatgacgggccgtgcagtggcagaaatgacgctgcaaaaaggccacccggtgctgggttacgcggagtttttgggcgacccggttatggcgaccctgatttccgttatcgtggcgatctttaccttcgggcttaatcgcggtcgtagcatggatcaggtaatggataccgttagcgattccatcaagatcatcgccatgatgttgatggttatcggtggcggcggtgcgttcaaacaaattctggtggacggtggcgttgcgaagtatatcgaaacgctgatggcgggcagtacgctgtcgccgttactgatgggatgggcgattgccgcggcattgcgtctggctctgggctcagcgaccgttgcggccatgaccgcaggcgggattgttgcgccgttgctgaccatcactggggtgagtcctgagctgatggtgctggctgtgggttccggcagcgtgattttctctcacgtgaacgatccgggtttctggctgtttaaagagtatttcaacctgactattgtcgaaaccatgaagtcctggtctgcgttggaaaccattattgcggtgtgtggcctgattggctgtctgctgctgaatatggtgatttaa

SEQ ID NO: 45463 - protein, 444 aa, Erwinia carotovora subsp. atroseptica SCRI1043
MPLIIVAIGVALLLLLMIRCKLNGFISLILVSLAVGLALGYTTQGGFNVNGVITSIKNGVGGTLGSLALIMGFGAMLGKLLADCGGAQRIATTLIDKFGKDRIQWAVVLTGFTVGFALFYEVGFVLLLPLVFTIAAAAQIPLLFIGVPMAAALSVTHALLPPHPGPTAIAILFKADMGKTLLYGTLIAIPTVILAGPVYARFLKSIDKPIPAGLHNPKVFADHEMPSFGISVFTTLIPVILMTGRAVAEMTLQKGHPVLGYAEFLGDPVMATLISVIVAIFTFGLNRGRSMDQVMDTVSDSIKIIAMMLMVIGGGGAFKQILVDGGVAKYIETLMAGSTLSPLLMGWAIAAALRLALGSATVAAMTAGGIVAPLLTITGVSPELMVLAVGSGSVIFSHVNDPGFWLFKEYFNLTIVETMKSWSALETIIAVCGLIGCLLLNMVI

SEQ ID NO: 45464 - DNA, 1371 bp, Propionibacterium acnes KPA171202
  CDS (1)..(1371): transl_table=11
atgcccgtcatcctcgaaaccgcagccagtaccggccaactgattatggccaccctcatcggcttcgccaccatcgttgcccttataaccaagttcaaactccaccccttcctctccttgacgatcggttctttagttgtcggagctatcgcaaagctgtccctgtcggagatattggcgtcctattccaaaggagtcgggtcgacggtcgcttctgtcggagtcctcatcgccctaggagcgattatcggcaagttgttagcagattccggtggcgccgacgaaatcgtcgacaccctagtctctcaggcttctcccgccaccttgccatgggcgatggccctcattggcgctgtcattggactgcccatgttcttcgagatcggtctcgtcctgctcgttccggtcatcctgctggtaacccgccgttccaagctgcccctcatgagagtagctatcccggccctggctggcctatcgacgatgcatgcccttgttccacctcatccgggcccattggccgccattgggctgctcaaagcagacctcggcatcaccctcgggttcggtgtccttattgccataccgacggttattgctgctggcccgctgttctcgcggctcgcagctcggtgggtgcccgttgatgcgcctgacctcttccttaattctgacgagaatggccgttgcggtattgcccctggtcgcccaaggttctccgtcaccttgatgaccgtcctgctacctgtcgtcctcatgatgggcaaggccctcgccgatatcttcgctctcaaaggcaccgccgtccgcagtatcttggatttccttggcgagccgatgtttgctttgctgctgacaaccctgctggcgatctttaccctgggcaaggcttccggcatcaaccgggacgctatgaacaacagtgtgggggcagcgctgcccccaatcgctggcatcttactcatcgtcgccgccggcggtgggtttaagcagatcctcgtcgacactggtattgccaagctactaggcaacggcattacccagtcctcgatctccccgctactgatggcctggctcgtcgctgtcgtcatccggttggcgaccggctcagcgacggtggcaaccgtcaccgcggccggcatcctggaaccggtggcagccagcttgccgcccgcccatgcggcattgctggttctagcgatcggctgcggttcggttttcttctcacacgtcaatgacgccggtttctggctcatcaaggaatacttcggtatctcggtgggacaaaccattaagagttggtcgctcatggagacggcgctgtcagtctgcggagtgctcctggtgctgctggtctccgtcatcgtctga

SEQ ID NO: 45465 - protein, 456 aa, Propionibacterium acnes KPA171202
MPVILETAASTGQLIMATLIGFATIVALITKFKLHPFLSLTIGSLVVGAIAKLSLSEILASYSKGVGSTVASVGVLIALGAIIGKLLADSGGADEIVDTLVSQASPATLPWAMALIGAVIGLPMFFEIGLVLLVPVILLVTRRSKLPLMRVAIPALAGLSTMHALVPPHPGPLAAIGLLKADLGITLGFGVLIAIPTVIAAGPLFSRLAARWVPVDAPDLFLNSDENGRCGIAPGRPRFSVTLMTVLLPVVLMMGKALADIFALKGTAVRSILDFLGEPMFALLLTTLLAIFTLGKASGINRDAMNNSVGAALPPIAGILLIVAAGGGFKQILVDTGIAKLLGNGITQSSISPLLMAWLVAVVIRLATGSATVATVTAAGILEPVAASLPPAHAALLVLAIGCGSVFFSHVNDAGFWLIKEYFGISVGQTIKSWSLMETALSVCGVLLVLLVSVIV

SEQ ID NO: 45466 - DNA, 1317 bp, Yersinia pseudotuberculosis IP 32953
  CDS (1)..(1317): transl_table=11
atgccattaatcatcgtcgcggttggcgttgccatgctgctattactgatgatccgttacaaacttaacggatttatctcgctgatactggtcgcgttagcggtaggtatcatgcaagggatgccaatcgataaagttgtcggctcgatcaaagcgggtgtcggcggaacattaggtagcctggccttgattatgggcttcggggccatgctcggtaaattgctggccgattgtggcggcgctcaacgtatcgcgaccaccttaattgagaagtttggtcaaaaacatattcaatgggctgtggtactgaccggctttactgtgggttttgccctgttttatgaagtgggttttgtgctgttattgccgctggtattcagcattgcggcctctgcccgcattcccttgctatatgtgggtgttcccatggcggcggcgctttctgtcactcatggttttctgccacctcacccaggcccgacagccattgccaccattttcagcgccgatatgggcaaaacgctgctgtacggcacattgctggcaatcccaaccgtgattttggcaggcccggtctacgctcgctttctaaaaggaattgataagcctgttcctgaagggctgtataacccgaaaatctttaccgataaagagatgccaagctttggagtcagtgtcagtacggcgctggtaccggttattttgatggcattgcgggccgtagcagagatgattttgcctaaaggccattcgctgctcccctatgccgagttctttggtgatccagtaattgctacgctgattgccgtgttaattgcaattttcacctttggtctaaaccggggccgctcagtggaatcggtcatggagaccctgtctgattccatcaagatcatcgcaatgatgctgttagttattggaggcggcggtgctttcaagcaggttttagtcgatagcggcatagagcaatatattgctggcatgatgggcaatagcggggcatcgcctattctgatggcatggtccatcgccgccttactgcgtatcgccctgggttctgcgacggtagcagcgatcaccgctgggggcattgtcgcaccgttaatcgcgaccaccggtgccagccctgagttgatggtcattgccgttggttccggtagcgtgatcttctctcacgtgaatgaccctggtttctggctattcaaggagtatttcaacctaaccattatggaaaccattaaatcgtggtcagtactggaaaccattatttcagtctgcgggttgatcggctgtttgttgctgtctctggttatttag

SEQ ID NO: 45467 - protein, 438 aa, Yersinia pseudotuberculosis IP 32953
MPLIIVAVGVAMLLLLMIRYKLNGFISLILVALAVGIMQGMPIDKVVGSIKAGVGGTLGSLALIMGFGAMLGKLLADCGGAQRIATTLIEKFGQKHIQWAVVLTGFTVGFALFYEVGFVLLLPLVFSIAASARIPLLYVGVPMAAALSVTHGFLPPHPGPTAIATIFSADMGKTLLYGTLLAIPTVILAGPVYARFLKGIDKPVPEGLYNPKIFTDKEMPSFGVSVSTALVPVILMALRAVAEMILPKGHSLLPYAEFFGDPVIATLIAVLIAIFTFGLNRGRSVESVMETLSDSIKIIAMMLLVIGGGGAFKQVLVDSGIEQYIAGMMGNSGASPILMAWSIAALLRIALGSATVAAITAGGIVAPLIATTGASPELMVIAVGSGSVIFSHVNDPGFWLFKEYFNLTIMETIKSWSVLETIISVCGLIGCLLLSLVI

SEQ ID NO: 45468 - DNA, 1377 bp, Symbiobacterium thermophilum IAM 14863
  CDS (1)..(1377): transl_table=11
atggcgtcagcagtctcgggctcccagatgctcctggccctgctgatcggcatcgtcgtcctcgtcttcctgatcctgaagaccaagatccacgccttcccggccctgatcatcgccgccgccctgatcggcctcgtcggcggcatggacccggtggacgtcagctccgcgatcacgaccggattcggcaacaccctcgccagcatcggcatcgtcatcggcttcggcgtgatgatggggcgcatcctggagatctccggcgccgcggagcgcatggccaccttcttcctgaagcacctgagccgccggcgcccggagtgggccctggccatcaccggctacttcacctcgatccccatcttctgtgactccggctacgtcatcctggccccgctggccaaggcgctctcccggcagagcggcaagtccgtggtgaccctgggcatctccctggccgtgggcctcgtctccacccaccacctggtgccgccgaccccgggcccgctgggcaccgccggcatcttcggggcggacatcggcaagatgatcctctggggcatcctcttcgccgttccggtcaccatcgtcggcgtcctctacgccgtctggctgggccggaggatctaccaggtgcccgccgccgacggcgagggctgggagcgcaaggagtggaaggcggagctggagcaggccatcgagatcgtcgagcggaaggacctgcccggcaccgcgctctccttcgcgccgatcctggtgcccatcctgctgatcctgctcaacaccaccctgtctgccgtcggcgccggcggcgcctgggcccggttcctgatcttcctgggccagcccatcatcgccgtgctggtcggcctgctgatcgccatctacggcctgggcgccaagatgacccggccggaggtcttgaaggagatggagaagggcgtccagtccgcgggcatcatcatgctggtcaccggcgccggcggcgccctgggccaggtgatccgggccagcggcgcgggcgactacgtggcccaggccctggcgaacagcgccctgccggcgatcctgctgcccttcgtgatcgccaccggcctgcggctgatccagggctccggcaccaccgccatgctgaccgccgcgtccatcaccgccccgatcctggccccgctgggcatcgacccggtcttcgcggccatgtccgcctccatgggcgccttcgtcttcagctacttcaacgactccttctactgggtcgtcaaccgtttcatcggcatcgaggacgtgaaggagcagatccaggtctggtcggtgcccacgaccctggcctggctcaccccgggcatctgcctggtgatcgccaacaccctgttcggatag

SEQ ID NO: 45469 - protein, 458 aa, Symbiobacterium thermophilum IAM 14863
MASAVSGSQMLLALLIGIVVLVFLILKTKIHAFPALIIAAALIGLVGGMDPVDVSSAITTGFGNTLASIGIVIGFGVMMGRILEISGAAERMATFFLKHLSRRRPEWALAITGYFTSIPIFCDSGYVILAPLAKALSRQSGKSVVTLGISLAVGLVSTHHLVPPTPGPLGTAGIFGADIGKMILWGILFAVPVTIVGVLYAVWLGRRIYQVPAADGEGWERKEWKAELEQAIEIVERKDLPGTALSFAPILVPILLILLNTTLSAVGAGGAWARFLIFLGQPIIAVLVGLLIAIYGLGAKMTRPEVLKEMEKGVQSAGIIMLVTGAGGALGQVIRASGAGDYVAQALANSALPAILLPFVIATGLRLIQGSGTTAMLTAASITAPILAPLGIDPVFAAMSASMGAFVFSYFNDSFYWVVNRFIGIEDVKEQIQVWSVPTTLAWLTPGICLVIANTLFG

SEQ ID NO: 45470 - DNA, 1386 bp, Mannheimia succiniciproducens MBEL55E
  CDS (1)..(1386): transl_table=11
atggaaactgcagctagtatgtcgcaaatgcttatcggtttggctatcggtattgcacttctcttaatactggcaatgaagacaagaatccatgtctttgttgctttaattctcgcctcgttaaccaccggtctgataggcggtttaccttttgccgaagtgattagttcagtcactaaaggtttcggtagtacgctgggcagtaccggtattattatcggtctcggcgtcatgatgggcgcaattttagaaaaatccggcgctgccgaacaaatggctttctctattatcaaattgattggtaaagccaaggaagaatgggctttagccttaacaggctatgtggttgccattcccgtttttgccgattccggtttgattattttaaccccgcttgccagatccttatcccgtatgactggtaaaagcgttatcgggctcggtttagccatggcaaccggtctgcaattagcgcacgtatttattccgccgacaccgggtccgttagcggttgccggtattttagatatcgatatggggatgatgattatttgggggatgatattaacggttccgactttggtaatgtctacgctatacgcaaaatggctcggtaaaaaaatctatcagattcctaacgaagacggtaccgactttgaacgcaaggaatttaaagaggaatacattaaatccattgaaaatgtagaacagatttataaagataagaatctgccgggtgccggactgtcattttcacctatcgtaattcctttaattttgattttaggtaataccaccgttaatttcctgaaaatcgaaaatggttttgccgatttgttaaaaatagtaggccatccaattattgcattgatcatcggtcttttaatcgctctttatggtttaggtcgccgtctttctaaagcggaaaccaacaaagccattgaagacggagtaaaatccacaggtatgattttattcatcaccggtgcgggcggtgcgttaggttatgttgtgcgcgatgccggtatcggtaatgccttaggtgaagcggttctgaccgtcggtatcccgggtattttgattccatttgtaattgccgcgctaatgcgtattgcgctgggtagcgccaccgtcgctttaattacagccgcaaccctggccgccccgcttgtaccgcaattaggtttaaatccgactttagttgccatgtcaacctgtgccggtgcggtatctttcagttacttcaatgacagcggtttctgggtattcaatggtctatacggtttgaaagaagtaaaagatcaatttatggctaaaaccatggtttcgtttatcggtgctttctcctgtttggcgctggtactgatctttaatatctttatgtaa

SEQ ID NO: 45471 - protein, 461 aa, Mannheimia succiniciproducens MBEL55E
METAASMSQMLIGLAIGIALLLILAMKTRIHVFVALILASLTTGLIGGLPFAEVISSVTKGFGSTLGSTGIIIGLGVMMGAILEKSGAAEQMAFSIIKLIGKAKEEWALALTGYVVAIPVFADSGLIILTPLARSLSRMTGKSVIGLGLAMATGLQLAHVFIPPTPGPLAVAGILDIDMGMMIIWGMILTVPTLVMSTLYAKWLGKKIYQIPNEDGTDFERKEFKEEYIKSIENVEQIYKDKNLPGAGLSFSPIVIPLILILGNTTVNFLKIENGFADLLKIVGHPIIALIIGLLIALYGLGRRLSKAETNKAIEDGVKSTGMILFITGAGGALGYVVRDAGIGNALGEAVLTVGIPGILIPFVIAALMRIALGSATVALITAATLAAPLVPQLGLNPTLVAMSTCAGAVSFSYFNDSGFWVFNGLYGLKEVKDQFMAKTMVSFIGAFSCLALVLIFNIFM

SEQ ID NO: 45472 - DNA, 1341 bp, Burkholderia mallei ATCC 23344
  CDS (1)..(1341): transl_table=11
atgctgctgatttacaccgtgatcgcgatcgcggtgctgatcctgatgatcgcgcgctacaaggtgtatccgttccttgtgctgatcatcgtgtcgctcggtctcggcctcgcggtcggcatgccgatggacaagatcgtgaaatcgttcgaggggggcacgggcggcacgctcggccacatcgcgatcgtcgtcggcctcggcacgatgctcggcaagatgatggccgaatcgggcggcgccgagcggatcgcgaccacgctgatcgactggttcggcgagaagaacatccactgggcgatgatgttcgtcgcgatcatcgtcgggctgccggtgttcttcgaagtcggcttcgtgctgctgatcccgatcgcgttcaacgtcgcgaaacgcaccggcaagtcgctgctcgtcgtcgggctgccgatggtggcgggcctgtcggtcgtgcacgggctgattccgccgcacccggcggcgctcctcgccgttcagcaatacggcgccgacatcggcaagacgatcgcgtacggcctcatcgtcggcgtgccgaccgcgatcgtcgcggggccgctgttcgcgctcacgatctcgaagttcgtgaagctgccggagcacaatccgctcgcgtcgcagttcgtcgagacgcgcgcggcgggcgagacgcgcgcgctgccgagcttcggcatcacgctgttcacgatcctgctgcccgtcgtgctgatgctcgtcggcagctgggccgatctcgtgttcgcgccgaaatcgctgccgaacagcctgctgcgcttcgccggcaattcggatgtcgcgctcctgatcgctgtgctcgtgagcttcttcacgttcggcaagctgcagggcttcaatcgcgagcagatccagaagttctgcggcgattgcctcgcgccgatcgcgggcatcacgctgatcgtcggcgcgggcggcggcttcggcggtattctgcgcgacagcggcatctcgcagcagatcgtcgcgaccgcgacgcacgcgcatctgtcgccgctgctgctcggctggttcgtcgcggcgctgatccgtctcgccacgggttcggccaccgtcgcgatgacgaccgcctgcgggatcgtcgcgccgatcgccgcggcctcgggcgtcacggtgcgcccggagctgctcgtgctcgcgacgggctcgggctcgctcatcttctcgcacgtgaacgacggcggcttctggctgatcaaggaatatttcgggatgaccgtggggcagacgttcaagacgtggacgctgctcgaaacgatcatctcggtgctcggtctcaccttcacgctggcgctgagcgcggttctgtaa

SEQ ID NO: 45473 - protein, 446 aa, Burkholderia mallei ATCC 23344
MLLIYTVIAIAVLILMIARYKVYPFLVLIIVSLGLGLAVGMPMDKIVKSFEGGTGGTLGHIAIVVGLGTMLGKMMAESGGAERIATTLIDWFGEKNIHWAMMFVAIIVGLPVFFEVGFVLLIPIAFNVAKRTGKSLLVVGLPMVAGLSVVHGLIPPHPAALLAVQQYGADIGKTIAYGLIVGVPTAIVAGPLFALTISKFVKLPEHNPLASQFVETRAAGETRALPSFGITLFTILLPVVLMLVGSWADLVFAPKSLPNSLLRFAGNSDVALLIAVLVSFFTFGKLQGFNREQIQKFCGDCLAPIAGITLIVGAGGGFGGILRDSGISQQIVATATHAHLSPLLLGWFVAALIRLATGSATVAMTTACGIVAPIAAASGVTVRPELLVLATGSGSLIFSHVNDGGFWLIKEYFGMTVGQTFKTWTLLETIISVLGLTFTLALSAVL

SEQ ID NO: 45474 - DNA, 1386 bp, Neisseria gonorrhoeae FA 1090
  CDS (1)..(1386): transl_table=11
atggacggccggacacagacgctgtccgcgcaaaccttgttgggcatttcggcggcggcaatcatcctcattctgattttaatcgtcaaattccgcatccgcgcgctgctgacactggtcatcgccagcctgctgacggctttggcaaccggtttgcccacaggcagcatcgtcaacgacgtactggtcaaaaacttcggcggcacgctcggcggcgtggcgcttctggtcggtctgggcgcaatgctcggacgtttggtagaaacatccggcggcgcacagtcgctggcggacgcgctgatccggatgttcggcgaaaaacgcgcaccgttcgctccgggcgttgcctcgctgattttcggcttcccgattttcttcgatgccggactaatcgtcatgctgcccatcgtattcgccaccgcacggcgcatgaaacaggacgtactgcccttcgcgcttgcctccgtcggcgcattttccgtcatgcacgtcttcctgccgccccatccgggcccgattgccgcttccgaattttacggcgcgaacatcggccaggttttgattttgggtctgccgaccgccttcatcacatggtatttcagcggctatatgctcggcaaagtgttggggcgcgccatccatgttcccgttcccgaactgctcagcggcggcacgcaagacagcgacccgccgaaagaacctgccaaagcaggaacggtcgtcgccgtcatgctgattcccatgctgctgattttcctgaataccggcgtatcagccctcatcagcgaaaaactcgtaagtgcggacgaaacttgggttcagacggcaaaaatgatcggttcgacacctgtcgcccttctgatttccgtattggccgcactgttggtcttgggacgcaaacgcggcgaaagcggcagcacgttggaaaaaaccgtggacggcgcactcgcccccgcctgttccgtgattctgattaccggcgcgggcggtatgttcggcggcgttttgcgcgcttccggcatcggcaaggcactcgccgacagcatggcggatttgggcattcccgtccttttgggctgcttccttgtcgccttggcactgcgtatcgcgcaaggttcggcaaccgtcgccctgaccacagccgccgcgctgatggctcctgccgttgccgccgccggctttaccgactggcagctcgcctgtatcgtattggcaacggcggcaggttcggtcggttgcagccacttcaacgactccggcttctggctggtcggccgcctcttggatatggacgtaccgaccacgctgaaaacctggacggtcaaccaaaccctcatcgcattcatcggctttgccttgtccgcactgctgtttgccatcgtctga

SEQ ID NO: 45475 - protein, 461 aa, Neisseria gonorrhoeae FA 1090
MDGRTQTLSAQTLLGISAAAIILILILIVKFRIRALLTLVIASLLTALATGLPTGSIVNDVLVKNFGGTLGGVALLVGLGAMLGRLVETSGGAQSLADALIRMFGEKRAPFAPGVASLIFGFPIFFDAGLIVMLPIVFATARRMKQDVLPFALASVGAFSVMHVFLPPHPGPIAASEFYGANIGQVLILGLPTAFITWYFSGYMLGKVLGRAIHVPVPELLSGGTQDSDPPKEPAKAGTVVAVMLIPMLLIFLNTGVSALISEKLVSADETWVQTAKMIGSTPVALLISVLAALLVLGRKRGESGSTLEKTVDGALAPACSVILITGAGGMFGGVLRASGIGKALADSMADLGIPVLLGCFLVALALRIAQGSATVALTTAAALMAPAVAAAGFTDWQLACIVLATAAGSVGCSHFNDSGFWLVGRLLDMDVPTTLKTWTVNQTLIAFIGFALSALLFAIV

SEQ ID NO: 45476 - DNA, 1353 bp, Pseudomonas syringae pv. syringae B728a
  CDS (1)..(1353): transl_table=11
atgttcggtatgacccatgagacgttcctgctcgtcgatgcgttggtgaccatcgtcggcctggtgctgctgatcaccaccttcaaggtgcaccctttcgtcgcgttgaccctggcggcaggctttcttggcctgacctcgggaatgccggtggaaaaagtcatgaaatccttccaggacggcttcggcggcgtactgggcttcgttggtatcatcctcggcctgggcaccatgctcggcaagctgatggccgactcgggcggcgcggaccagattgcgcaaacgctgatacgcaccttcggcaaacagaaagtgcactgggcaatgatgttctctgcctttctggtgggcatcccgctgttcttcgagatcggttttgtcctgctgatcccgctggtgttcatcgtcgcgcggcgcaccggcgtgcccatcgtcaagatcggcattccgctgctggcaggcctgtcggccgtacacggtctggttcctccgcatccaggtccgttgctggccatcggcatcttcggggctgacatcggcaaaaccattttctacggactgatcgttgcgctgccgacggccatcatcgctggcccgatcttcggtaactggatttccaaaagcatccccggcacaccgtccaaggaactgatggatcagatcgccaaggagtcgagcactgaaaacctgccaggcttcggcatcacgctggtgaccatcctgctgccggtcttcctgatgctgctcaagacctttgccgacgtggtgttgccggaaaacaacatgttccgcatctggatggacctgatcggtcacccgatcaccgccctgcttgccgcgctgttgctggcgttctacacctttggtgccgcgcgtggtttcgaccgcagcaagatcatgaagctgctggaccagagtctggccccggtggcggcaatcgtgctgattgtcggcgcaggcggtggcttcaagcagatgctggtcgccagtggcgtaggtgacgtgatcgggcacatggccgtgcaggcgcagatcaacccgatcatgctggcctggctggttgcggcggtcatccgcgtcgcaacaggttcggcgacggtggcaaccattaccggtgctggcatcgtagcgccggtggtcggcctgattccaggggtcaatcgcgagctgctggtgctggcaaccggcgccggctcgttgatcctgtcgcacgtcaatgacgccgggttctggctggtgaagcagtacttcaacatgaccgttgccgagaccttcaagacctggacggtgatggagaccatcctctcggtcgtcggcctgatcttcatcatgctgttgtcaatggcggtgtaa

SEQ ID NO: 45477 - protein, 450 aa, Pseudomonas syringae pv. syringae B728a
MFGMTHETFLLVDALVTIVGLVLLITTFKVHPFVALTLAAGFLGLTSGMPVEKVMKSFQDGFGGVLGFVGIILGLGTMLGKLMADSGGADQIAQTLIRTFGKQKVHWAMMFSAFLVGIPLFFEIGFVLLIPLVFIVARRTGVPIVKIGIPLLAGLSAVHGLVPPHPGPLLAIGIFGADIGKTIFYGLIVALPTAIIAGPIFGNWISKSIPGTPSKELMDQIAKESSTENLPGFGITLVTILLPVFLMLLKTFADVVLPENNMFRIWMDLIGHPITALLAALLLAFYTFGAARGFDRSKIMKLLDQSLAPVAAIVLIVGAGGGFKQMLVASGVGDVIGHMAVQAQINPIMLAWLVAAVIRVATGSATVATITGAGIVAPVVGLIPGVNRELLVLATGAGSLILSHVNDAGFWLVKQYFNMTVAETFKTWTVMETILSVVGLIFIMLLSMAV

SEQ ID NO: 45478 - DNA, 1353 bp, Pseudomonas fluorescens PfO-1
  CDS (1)..(1353): transl_table=11
atgtttggcatgtcccatgacgcctacctgctgctcgatgcagtggttacggtgatcggactcatcgtcctgatcaccaagttcaagattcaccccttcattgccctgaccatcgccgccgcgttccttggcctgacgtccggcatgccgatcggcacgatcatcaaggcgttccaggacggcttcggtggcgtgctcggttttgtcggcatcatcctcgccctgggcacgatgctcggcaagatgatggccgaatccggtggtgccgatcagatcgcccagaccctgatccgcgccttcggcaaggacaaggtgcagtgggcgatgatgttcgccgcgttcctggtgggcattccgctgttcttcgaaatcggcttcgtgttgctgattccgctggtgttcatcgtggctcgccgcactggtgtgtcgatcatcaagatcggtatcccgctgctcgccggtctgtccgccgtgcacggcttggtgccgccgcacccgggcccgctgctggccatcggcgtgttcggtgccgacatcggcaagaccattctgtacggtctgatcgtcgcgctgccgaccgccatcatcgccggcccgatcttcggtacgttcatcgccaagcacattcccggtacgccgaaccaggaactggtcgatcaactggcccgtgaaaacgattcggccaacctgccgagcttcagcatcaccctggtcaccgtgctgctgccggtgttcctgatgctgctgaaaaccttcgctgacgtggccctgccggacggtcatttcttccgcacctggatggacatgatcggtcacccgatctcggcactgctgctggcattgctgctgtcgctgtacaccttcggtcacaagcagggcatcggttctcagcagatgctcaaatggctggacgcgagcctggcgccgaccgcggcaatcattctgatcatcggcgccggcggtggcttcaagcagatgctggtgaccagcggcgtgggcgacgtgatcggccacatggcggtcagcgcgcagatctcgccgatcctgctggcgtggctggtggcggcggtgatccgcatcgcgaccggttcggccaccgtggcgaccatcactggcgcgggcatcgtggtgccggtggtggggatgatcccgggcgtgaaccgtgagctgctggtgctggccaccggtgccggttcgctgatcctgtcccacgtcaacgacgccggtttctggctggtgaagcagtacttcaacatgaccgtggccgagaccttcaagacctggacggcgatggaaaccatcctgtcggtggtggggctgggctttattctgttgttgtcgctgttcgtttaa

SEQ ID NO: 45479 - protein, 450 aa, Pseudomonas fluorescens PfO-1
MFGMSHDAYLLLDAVVTVIGLIVLITKFKIHPFIALTIAAAFLGLTSGMPIGTIIKAFQDGFGGVLGFVGIILALGTMLGKMMAESGGADQIAQTLIRAFGKDKVQWAMMFAAFLVGIPLFFEIGFVLLIPLVFIVARRTGVSIIKIGIPLLAGLSAVHGLVPPHPGPLLAIGVFGADIGKTILYGLIVALPTAIIAGPIFGTFIAKHIPGTPNQELVDQLARENDSANLPSFSITLVTVLLPVFLMLLKTFADVALPDGHFFRTWMDMIGHPISALLLALLLSLYTFGHKQGIGSQQMLKWLDASLAPTAAIILIIGAGGGFKQMLVTSGVGDVIGHMAVSAQISPILLAWLVAAVIRIATGSATVATITGAGIVVPVVGMIPGVNRELLVLATGAGSLILSHVNDAGFWLVKQYFNMTVAETFKTWTAMETILSVVGLGFILLLSLFV

SEQ ID NO: 45480 - DNA, 1359 bp, Rhodospirillum rubrum ATCC 11170
  CDS (1)..(1359): transl_table=11
atgcaccccgatacaacgctgatccttatcgcagccgcctcgatcgttcttctggtgctgctggttacccgcctgaagcttcacccctttttggccctgatggtcgccgccgcctttcttgggctggccagcggcctcgcgccgaccgatgcggtcaagaccttccagaagggctttggcaatatcctgggctcggtcggcctggtcgtcggccttggcagcatgttgggcggcctgttgctcaacaccgggggtgccgatcgcatcgccaacgccttcgtcggtcgcggttcgacggtgtggctgcccacatcgatctgcgcggcggccttgctgatcggcatgccccatctgtttgatgtcagcttcgtcatgctggtgccgctggtcttcgccatcgccaagcgcaccggcagccatctgatgcgtgtcggcctgccgatggcggcggggctttacgtctcgcacggcttcttgctgccccatccctcgccgaccttggctttggccatctatcatggcgacgccgggcgggcgatcctctttggtttcctgctggcgatcccgacggccatcctctcgggcccgctgctcacctcctttgccatgcgttggttcaaggatccgatcgacatcacccatagcccgatcatgacggcggccggacggagcgatgtcaccacgcttgataacgccccccgactgccggtggttctgctgaccgtcctgctgccgcccggtttgatgctgttgcgcaccctgttggccgaccatgttcccgaaggcgccgcccgggcctttctcgatggcatcggcaatcccatcgtctcgctggccatcgccgtgttgtttgccatctgggcccttggggtgcgctcgggccgttcgctgggcgagatccagaagctgctcggcaaaagcctggccccggccgccggggtgatcctgatcgtcggcgccggtggcggtctcaaggaaatgctgctcggcacccatatcggcgacatgatcgccagcggcgcggcgcaatgggcgatctcgcccctggtgctggcctgggtgatcgccgccctgatgcgcatcgccgtcggctcggccaccgtcgccacggtcaccgccgccgggttgatggcgccggtgcaggcgctccaccccgaaatcagccccgaattgatgaccatctcggtcgccaccggcgggctgatgctctcccacctcaacgacagcggcttctggctgttcaaggaatacttccaactcaccgtcgcccagacgctgaaaagctggacgttgatggtctcggtccagtcggcgcttggtctggccggtgttctgctgatcgacgcggtgatccgctaa

SEQ ID NO: 45481 - protein, 452 aa, Rhodospirillum rubrum ATCC 11170
MHPDTTLILIAAASIVLLVLLVTRLKLHPFLALMVAAAFLGLASGLAPTDAVKTFQKGFGNILGSVGLVVGLGSMLGGLLLNTGGADRIANAFVGRGSTVWLPTSICAAALLIGMPHLFDVSFVMLVPLVFAIAKRTGSHLMRVGLPMAAGLYVSHGFLLPHPSPTLALAIYHGDAGRAILFGFLLAIPTAILSGPLLTSFAMRWFKDPIDITHSPIMTAAGRSDVTTLDNAPRLPVVLLTVLLPPGLMLLRTLLADHVPEGAARAFLDGIGNPIVSLAIAVLFAIWALGVRSGRSLGEIQKLLGKSLAPAAGVILIVGAGGGLKEMLLGTHIGDMIASGAAQWAISPLVLAWVIAALMRIAVGSATVATVTAAGLMAPVQALHPEISPELMTISVATGGLMLSHLNDSGFWLFKEYFQLTVAQTLKSWTLMVSVQSALGLAGVLLIDAVIR

SEQ ID NO: 45482 - DNA, 1386 bp, Moorella thermoacetica ATCC 39073
  CDS (1)..(1386): transl_table=11
atgggaggcatttccggaattcagataattattggtctgattgttggtatctttgtgcttgtatatttaatactgaggaccaaaattcatgcttttcctgctcttatcattgcggcttccgtaatcgggttaattggtggtatgtcaccatctacaggtgatattaaccttgctaaatcaatcactactggctttggtaatactttagcaagtatcggtctcgtaattggttttggcgtaatgatgggacgattgctggaggtatccggggctgccgaacgtatggcttatactttcttaaagtatctaggacgtggaaaagaagaatgggcgctggccgcaacgggatatgtcatttctattcctattttctgcgattcgggttttgttattttaacacccctggttaaagcgttatcacgtagaaccaaaaaatccgtacttgctcttggtgtcgctctggcagccggtctagtggctacccatagtgcagtaccaccaacaccgggacctctggcagtagcaggcatttttaaagttgatgtaggtatggtaattatttccgggcttatatttaccataccaataactatagctggggttttgtacggcaaatggttgggtaaaaaaatatatcaattacccagtgaagatggtcagagctggatacgaccaccttaccaatcttctcagattgccgaagaagcattgcctgaaaatggcaacctgccttccgcttttatatcctttgcccctgttgttattcctttaattttaatctttgtcaatacgttgctgacagctatgaaaataaaccaactatgggcgcgctacctagttttcctgggtaatccggtaatagcggttggtattggtcttattattgctatttatggtctggctccgaaactttctcggtctgaagtactaaaaaagatggaagaaggggtttcttcagctggtataattatcttaattacaggtgctggtggcgcattaggccaggtgttaagggacagtggtgtcggtaattatgtagctcaacttattgcttctagccctctgcctccatttttgttacccttttttgttgctacttttgtacgattagtccagggaagcggtacagtagccatgattacctctgcttccattactgcaccaattttggccaatctttccgttaatccaatcattgctgttcaagcagccaatttaggttcattgatatattcttatttcaatgacagttttttctgggtagtcaatagatttttaggtgtcgatgacattaaggaacaaacactgacgtggtcggttccgactacaattgcttggggcgtttctttgattatgttatacattgccaacgccattttaagctaa

SEQ ID NO: 45483 - protein, 461 aa, Moorella thermoacetica ATCC 39073
MGGISGIQIIIGLIVGIFVLVYLILRTKIHAFPALIIAASVIGLIGGMSPSTGDINLAKSITTGFGNTLASIGLVIGFGVMMGRLLEVSGAAERMAYTFLKYLGRGKEEWALAATGYVISIPIFCDSGFVILTPLVKALSRRTKKSVLALGVALAAGLVATHSAVPPTPGPLAVAGIFKVDVGMVIISGLIFTIPITIAGVLYGKWLGKKIYQLPSEDGQSWIRPPYQSSQIAEEALPENGNLPSAFISFAPVVIPLILIFVNTLLTAMKINQLWARYLVFLGNPVIAVGIGLIIAIYGLAPKLSRSEVLKKMEEGVSSAGIIILITGAGGALGQVLRDSGVGNYVAQLIASSPLPPFLLPFFVATFVRLVQGSGTVAMITSASITAPILANLSVNPIIAVQAANLGSLIYSYFNDSFFWVVNRFLGVDDIKEQTLTWSVPTTIAWGVSLIMLYIANAILS

SEQ ID NO: 45484 - DNA, 1314 bp, Saccharophagus degradans 2-40
  CDS (1)..(1314): transl_table=11
atggaaattttcggtgttttagcgtcaatcgtactgcttgtgggcctaattgtttggctaaaaattcacccctttttagcatttttggccacctctatattcgcaggtattattcttaatattccactgcaagatattccgcaggcgattgaaacaggcataggttcaacgcttagcggtttagtaatagttatttgcgtaggcgccatgtttggcaagctggtatcagaaagtggtgcagcacaaaaaatagcacaggtattgataggcgcattcggccccaagcgcatcacttgggcgcttatgctcacaggctttattgtcggtatcccactgttttacaacgtgggttttgtactgttagtgccactcgtattttctgttgtttaccaatctaagctgccagccgtttatttgggtatcccattacttgctgccttgtctgttacgcatggctttctaccgccgcatccatcgcctacagccatggtgcccatgttcaacgctgaattaagcacaacgcttatttacggtttaattgtggcaatacccaccatgattcttgcgggaccggtgtttgccaatgctttaaaaaatattaaatcgacaccgctagccacatttactcccaaagacctacctgataaccagctacctagcgccaccaatgcattcgctacagccctgctacccgttgttcttattgctggactatcgtttttgccgtcgcaggcagcaactggctcgcagctacacaacctattcacattcttagccaatccttcactcataatgcttgcagcacttgcggttgctacttacacgctgggcattcgccaaaacgtgaaaatacaaacacttatggaaaggtatgccgatgcgataaaagacatctccataattatgttaattgtggctggagcgggtgcgctaaagcaggtttttgttttgagtggcgtaagttcagatattggcgcactgatgcagaacttagccattaaccctctgttactgggttggtttattgccacagtgatacgaatttgcctggggtctgcaacggtggcaggcctaaccgctgccggcataatggcgccagttctgcccttgaccggcgccgacccgaacttaatgattcttgctattggcgcggggagcttgatgtgcagtcacgttaacgactcaggcttttggatgtttaaggagtacttcaatttaagcgtaaaagacacccttaaatcctggacattaatggaaaccatcgtaggtattggtggaattacagcggtactcattcttgacgtttttgtgtaa

SEQ ID NO: 45485 - protein, 437 aa, Saccharophagus degradans 2-40
MEIFGVLASIVLLVGLIVWLKIHPFLAFLATSIFAGIILNIPLQDIPQAIETGIGSTLSGLVIVICVGAMFGKLVSESGAAQKIAQVLIGAFGPKRITWALMLTGFIVGIPLFYNVGFVLLVPLVFSVVYQSKLPAVYLGIPLLAALSVTHGFLPPHPSPTAMVPMFNAELSTTLIYGLIVAIPTMILAGPVFANALKNIKSTPLATFTPKDLPDNQLPSATNAFATALLPVVLIAGLSFLPSQAATGSQLHNLFTFLANPSLIMLAALAVATYTLGIRQNVKIQTLMERYADAIKDISIIMLIVAGAGALKQVFVLSGVSSDIGALMQNLAINPLLLGWFIATVIRICLGSATVAGLTAAGIMAPVLPLTGADPNLMILAIGAGSLMCSHVNDSGFWMFKEYFNLSVKDTLKSWTLMETIVGIGGITAVLILDVFV

SEQ ID NO: 45486 - DNA, 1398 bp, Burkholderia xenovorans LB400
  CDS (1)..(1398): transl_table=11
atggaagctgtccacggcagcatgctgctggtcttcgcggcgatcgccatcgcattgctgatcctgctgatcacgcgctacaaggtttacccgttcctcgttctgatcatcgtgtcgctgctgctgggtctcgcatccggcatgccgatcggcaccatcgtcaaatcgttcgaaacgggcaacggcaatacgcttggccacatcgcgatcgtggtcggcctcggcacgatgctcggcaagatgatggccgaatccggcggcgcggagcgcatcgccaccacgctgatcgacttcttcggcgagaagaacatccactgggcgatgatgatcgtcgcgatcatcgtgggcttgccggtgttcttcgaagtcggcttcgtgctgctgattccgatcgctttcaacgtcgcgaagcgcaccaacaagtcgttgctgctggtcggcttgccaatggtcgcgggtctgtccgtcgtgcacgggctgcttccgccgcacccggccgcgatgctcgcggtgcaggcatatcacgcggatatcggcaggaccatcgcctatggcctgattgtcggcgtgccgaccgcgatcgtcgcgggtccgttgtttgcgttgatgatcagccgctatatcaagctgccgaaagacaacgcgctcgcctcgcaatttctcggcgccgatgaaaccggtgcggcgaacaacggcaacggcgagcaaaagaccgcgcccaggcgcgaactgccgagcttcggcgtgacgctgttcacgatcctgttgccggttatcctgatgctggtgggcagttgggccgacctcgtgttcacgccgaagaccctcgcgaacgatctgctgcgtttcgtcggcaattcggatgtggcgctgctggtcgcggtgctggtcagtttctggacctttggtgcgagccgtggcttcgatcgcgagcagatccagaaattctgcggcgaatgtctcgcgccgatcgcgggcattacgctgattgtcggcgcgggcggcggctttgggcgcgtgctgatggatagcggcatttcgaaggagatcgtcaacgcggcgacgtcggcgcatctgtcgccgctgctgttcggctggctggtcgcggcgctgattcgcctggccaccggctcggcgacggtcgcgatgaccaccgcttgcggcatcgtcgcgccgatcgcggcggcgggcgcggtgcaggtgaagccggaactgctggtgctggccacgggttcgggctcgctgatcttttcgcacgtgaacgacggcggtttctggctgatcaaggaatacttcgggatgacggtggggcagaccttcaagacatggtcgctcctcgaaaccatcatctcgctgatgggtctgggtttgaccttcgcactcgcgacggtcgtgtaa

SEQ ID NO: 45487 - protein, 465 aa, Burkholderia xenovorans LB400
MEAVHGSMLLVFAAIAIALLILLITRYKVYPFLVLIIVSLLLGLASGMPIGTIVKSFETGNGNTLGHIAIVVGLGTMLGKMMAESGGAERIATTLIDFFGEKNIHWAMMIVAIIVGLPVFFEVGFVLLIPIAFNVAKRTNKSLLLVGLPMVAGLSVVHGLLPPHPAAMLAVQAYHADIGRTIAYGLIVGVPTAIVAGPLFALMISRYIKLPKDNALASQFLGADETGAANNGNGEQKTAPRRELPSFGVTLFTILLPVILMLVGSWADLVFTPKTLANDLLRFVGNSDVALLVAVLVSFWTFGASRGFDREQIQKFCGECLAPIAGITLIVGAGGGFGRVLMDSGISKEIVNAATSAHLSPLLFGWLVAALIRLATGSATVAMTTACGIVAPIAAAGAVQVKPELLVLATGSGSLIFSHVNDGGFWLIKEYFGMTVGQTFKTWSLLETIISLMGLGLTFALATVV

SEQ ID NO: 45488 - DNA, 1362 bp, Ralstonia metallidurans CH34
  CDS (1)..(1362): transl_table=11
atgggtgccgttacaggaaccacgctcttggtctatgcgctgatcgccgtgatcgcgctggtgatcctgatcgccaaattcaaactgaacccattcatcacgctcgtggtggtctcggtggcgctgggcttcgccgtggggatgccgatgggcgacatcatcaagtcgttcgaagcgggtgtcggcggcacgctcgggcatatcgcgctcgtgatcgggctcggcacgatgcttggcaagatgatggccgaatcgggcggcgccgagcgcatcgcgctgacgctggtcgacttcttcggcgagaagaacgtgcactgggcgatggtggtcatcgccttcatcgtcggcctgccggtgttcttcgaggtaggcttcgtgctgctcgtcccgatcgccttcaacgtcgccaagcgcaccaatacctcgatggtgctggttggcatcccgatggtcgccggcctctcggtggtgcacgggctgattccgccgcaccctgccgcgctgctggctgtgcaggcctacggcgctgacatgggcaagacgatcatgtacgcgctgatcgtcggtgtcccgacagccgccatcgctggcccgctgttcgccaagctgatcgaccgccacgtgaagctgcccgaggtcaacccgctggccgcgcagttcaccgaagaagccgagaacatcaaggccacgcgccaattgccaggcttcggcatcactgtcttcacgatcctgctgccggtgattctgatgctgattggtagctgggcggacctgattgccacgccgaagaccttcgccaacgacttcctcaagctgatcggtaactcggtcatggcactgctgatcgccgcgctggtcagcttctataccttcggcaaggcccgcggcttcggtcgcgatgcgatcctgaagttcaccaacgagtgcgtggcgccgaccgccatcatcaccctcgtggtgggtgccggcggtggcttcggccgcatcctgcgcgactccggcatctccaccgccatcgtcgacgtggcaacccacgcaaacgtctcggtgctggtattgggctggctggtggccgtgatgatccgcatcgccaccggctcggccaccgtggccatgaccaccgccgccggcatcgtcgccccgatcgccgccagcgtgccgggcacgcgccccgaactgctggtgctgacgaccggcgccggttcgctgatcctgtcgcacgtcaacgacggcggcttctggctggtcaaggagtacttcaacatgaccgtgacccagaccttcaagacctggtcggtcgccgaaacgatcatttcggtcgtggcgttgctactgacgctgggactggcgacggtgacctga

SEQ ID NO: 45489 - protein, 453 aa, Ralstonia metallidurans CH34
MGAVTGTTLLVYALIAVIALVILIAKFKLNPFITLVVVSVALGFAVGMPMGDIIKSFEAGVGGTLGHIALVIGLGTMLGKMMAESGGAERIALTLVDFFGEKNVHWAMVVIAFIVGLPVFFEVGFVLLVPIAFNVAKRTNTSMVLVGIPMVAGLSVVHGLIPPHPAALLAVQAYGADMGKTIMYALIVGVPTAAIAGPLFAKLIDRHVKLPEVNPLAAQFTEEAENIKATRQLPGFGITVFTILLPVILMLIGSWADLIATPKTFANDFLKLIGNSVMALLIAALVSFYTFGKARGFGRDAILKFTNECVAPTAIITLVVGAGGGFGRILRDSGISTAIVDVATHANVSVLVLGWLVAVMIRIATGSATVAMTTAAGIVAPIAASVPGTRPELLVLTTGAGSLILSHVNDGGFWLVKEYFNMTVTQTFKTWSVAETIISVVALLLTLGLATVT

SEQ ID NO: 45490 - DNA, 1314 bp, Cytophaga hutchinsonii ATCC 33406
  CDS (1)..(1314): transl_table=11
atgtccttactttttattttactaacaatcatcacaacgttaatttttttaacggctgttcttaaaatatccccattcatatcgtttatccttgttaccattcttgccggtatactacttggtatgccattgggtaatatcgtacagtcttttcagaaaggtatcggcgatatgctcggaagtattctggttacattaactgccggcgccatgctcggtaagctggtggctgaaagcggtgcggcaacggttatcgcagataagatcattgctgtgtgcggtaaaaaatacctgcagtggggcttactgttaacaggtttgattattggtattccattgttttataatgtaggctttgtattgatcataccgattgtttttaccttgtcttaccggtataaattgcctgccgtgtatgtgggcattccgatgcttgcagccttgtctgtggcgcatagtctgttgccgccgcatccttctccggcatcactggtaggtacctttcaggcaagtatgatcaaaacattcttatacggtattgccgttgcagtgccggcaattattctggccggacctgtttttgcacgcacattaaggcatattcaaccgcagggagaacttcctctggttgagcacacggttgctgcccattccttaccgggtgtgtttaacagcattttctctgcgttgttgccggtatttctattactgacgacctttctgctttcgtttatcatagaaaacaaacaagtaattcaggtactttcattcataaaagagccgtctgtgcttatgctgctttcgttgttagttgtaagcattacattaggtacgcagcaacggactagcatgaagcacatcatgcgtacatatgaagcaggaataaaagatatcgccatgatcctgctgatcatcggagcatccggcgggttaaaacaagtactcattgatagtgaagcaagcatcgtccttgccggatatttccaatcgcttcagataaacccgctgatattaggctggctcattgccgctatcatccgtctgtgcctgggttcagccaccgtagccggtttaacagctgccggtattattgctccgctcatgccgcatataagtgcagatcccaacctgatgattcttgccataggcgcaggcagtattttctgttcgcatgtaaacgatacgggtttctggatgtttaaagaatactttaacgtatctataaaagatacgtttttatcctggacaatcatggaaagcattgtgtctgttgcgggcctggccggcgtactgcttttaagcatatggctttaa

SEQ ID NO: 45491 - protein, 437 aa, Cytophaga hutchinsonii ATCC 33406
MSLLFILLTIITTLIFLTAVLKISPFISFILVTILAGILLGMPLGNIVQSFQKGIGDMLGSILVTLTAGAMLGKLVAESGAATVIADKIIAVCGKKYLQWGLLLTGLIIGIPLFYNVGFVLIIPIVFTLSYRYKLPAVYVGIPMLAALSVAHSLLPPHPSPASLVGTFQASMIKTFLYGIAVAVPAIILAGPVFARTLRHIQPQGELPLVEHTVAAHSLPGVFNSIFSALLPVFLLLTTFLLSFIIENKQVIQVLSFIKEPSVLMLLSLLVVSITLGTQQRTSMKHIMRTYEAGIKDIAMILLIIGASGGLKQVLIDSEASIVLAGYFQSLQINPLILGWLIAAIIRLCLGSATVAGLTAAGIIAPLMPHISADPNLMILAIGAGSIFCSHVNDTGFWMFKEYFNVSIKDTFLSWTIMESIVSVAGLAGVLLLSIWL

SEQ ID NO: 45492 - DNA, 1395 bp, Rhodococcus sp. RHA1
  CDS (1)..(1395): transl_table=11
atgagtaccgcgtcactactcgcagcggccgacagtgccggccacgacgcgcggctgatcacggctgccgtcgtcggcgtcgccgtcatcatcgcgctgatcacctggctcaaactccacccgttcctcgcgctgtcgatcggcgccgtcggcgtcggtatcgccgcaggtctgggcgggcaagactcggtgaagtctttcgtcgagggcttcggggccacgatgggcagcgtcggaatcctcatcggattcggtgccatgttcggcaagctgctcgccgattccggtggcgccgaccgcgtcgtcgacaccctcgtcggacgggcaggtccgcggacgctgccgtggatgatggcgctggtcggcgcagtgatcggcctgccgatgttcttcgagatcggcctcgtgctgctgatgcccgtcatcatcctggtcgcgcggcgttcgggactgtcgctgatgcggatcgcgattcccacgctggcaggtctgtcggccatgcacggtctcgttccgccgcaccccgggcccctggtcgcggtggcggccctgaacgccaacctcggactcaccctcgcgctcggcgtcctcgtcgcgatccccaccgtcgtcatcgccggaccgctgttcagcaagctggcggcacgctgggtggacgtccccgtccccgagctctacgtgaccgtcgaagaccgggaaggcgccgaggctgccgccgagcgtcgccggcccagcttcgcggccaccctgtccgcgatcctgctgcctgtcgtcctgatgctgggcaaggcgatcgccgacgtcatcgccgccgactcggagtcgcccgcgaaggcgctgctcgacttcctcggtacaccggtcgtggccctcgggctcgcggtgctcgccgggatggcgcttctcggccgcggtggcggcatggaccgcaaggccatcgccgtctcgctggagagttcgctgcccccgatcgccggaatcctcctcatcgtcggcgccggcggcggattcaagcaggtcctgatcgacaccggcatcgccgatgtgatcgccgacgcgatcaaggacagcgccctgcccgttctgttcctcgcctggctcgtggccgtgctcatccgcgtcgccaccggatcggccaccgtcgcgacggtcaccgcgtccggcatcctcgcgcccgtcgccgccgaactgacctcgacgcacgtgtcgctgatggtgctggcgatcggctccggctcgctgttcctgtcgcacgtcaacgacgcgggattctggctggtgaaggaatacctcggcgtcacggtggtacagaacctgaagacgtggacggtgatggaatgcatcatctccgtcaccggtctcgccggggtcctcgcactgagcgtattcatctaa

SEQ ID NO: 45493 - protein, 464 aa, Rhodococcus sp. RHA1
MSTASLLAAADSAGHDARLITAAVVGVAVIIALITWLKLHPFLALSIGAVGVGIAAGLGGQDSVKSFVEGFGATMGSVGILIGFGAMFGKLLADSGGADRVVDTLVGRAGPRTLPWMMALVGAVIGLPMFFEIGLVLLMPVIILVARRSGLSLMRIAIPTLAGLSAMHGLVPPHPGPLVAVAALNANLGLTLALGVLVAIPTVVIAGPLFSKLAARWVDVPVPELYVTVEDREGAEAAAERRRPSFAATLSAILLPVVLMLGKAIADVIAADSESPAKALLDFLGTPVVALGLAVLAGMALLGRGGGMDRKAIAVSLESSLPPIAGILLIVGAGGGFKQVLIDTGIADVIADAIKDSALPVLFLAWLVAVLIRVATGSATVATVTASGILAPVAAELTSTHVSLMVLAIGSGSLFLSHVNDAGFWLVKEYLGVTVVQNLKTWTVMECIISVTGLAGVLALSVFI

SEQ ID NO: 45494 - DNA, 1338 bp, Haemophilus somnus 129PT
  CDS (1)..(1338): transl_table=11
atgaatactcaactttaccttgtcgcagttttaatatcaggtttggcacttattattttttctattttgaagttaaagcttcatccttttttagcattgttactgtcaggtttttatgttggaattttgatgggaatgaaaccattagaaatgctggatgctatagaaaacggtataggcggaacattggggttccttgctgctgttataggactgggaacaattttaggaaaaatgattgaggtatctggcggagctgaacggattggattgacacttcaaaaaattagatggctttcacctgatgtgataatggttttgatcggattgatttgtggtattacactttttgttgaagtcggcgtggttttattgattcctttagcattttcgattgccaaacgtactaaagtatcattattaactttagctattccgttatgtaccgctcttatggctgttcattgtattgttccccctcatcctgctgctctttatgtaaccaatgcgttaggtgcagatatgggaaaagtcattatttatggattacttattgggttatttacatcactattcgctggtcccgtgtttttacgtatgatgaaacgtcaagttccgtttaagaaagtcccagaggaattttcttctttaacggtacgtcaagaacatgaacttccgtctttatttgctacattatttacaattttgttaccgatagtattaatgctgtttaaaacgcttgctgaattgaccatagaaaaaaagactgttttttataccgcacttgaagtgattggcaatcctattactgctatgcttattggggcatttgttgcgtattatttgcttggtataaaacatcaccaaagtatggaatccttattaaaaaatactgaaaatggatttatggctattggtaatattttactgattataggtgccggaggggcatttaacagtattttaaaggcgagcggattaagtgatggattggctgagattttagcaaattttaatacacatcctattctattggcatggcttgttgctattgttttacatgccgcagtgggttctgcaacggtagcaatgatgggagcaacggcaatcgtgtcgccattacttgttacttaccctgatattagccccgaaattattgtccttgctattggttctggtgcgataggatgcactattgtaacggattctctcttttggttggtcaagcaatattgtggtgcaaccttgaatgacatttttaaatattataccggtgcaactttcatcgcttccgtattagcactcgggtttacatttttattatcaacagtgatttag

SEQ ID NO: 45495 - protein, 445 aa, Haemophilus somnus 129PT
MNTQLYLVAVLISGLALIIFSILKLKLHPFLALLLSGFYVGILMGMKPLEMLDAIENGIGGTLGFLAAVIGLGTILGKMIEVSGGAERIGLTLQKIRWLSPDVIMVLIGLICGITLFVEVGVVLLIPLAFSIAKRTKVSLLTLAIPLCTALMAVHCIVPPHPAALYVTNALGADMGKVIIYGLLIGLFTSLFAGPVFLRMMKRQVPFKKVPEEFSSLTVRQEHELPSLFATLFTILLPIVLMLFKTLAELTIEKKTVFYTALEVIGNPITAMLIGAFVAYYLLGIKHHQSMESLLKNTENGFMAIGNILLIIGAGGAFNSILKASGLSDGLAEILANFNTHPILLAWLVAIVLHAAVGSATVAMMGATAIVSPLLVTYPDISPEIIVLAIGSGAIGCTIVTDSLFWLVKQYCGATLNDIFKYYTGATFIASVLALGFTFLLSTVI

SEQ ID NO: 45496 - DNA, 1353 bp, Pediococcus pentosaceus ATCC 25745
  CDS (1)..(1353): transl_table=11
atggaaattatggtcttagttattggaataattttattgttaactttaattataaaatttaagatgaatacttatgtttcattgattattactgcggtggttgttggattaggtttagggatgccggctagccagattgccaccacgattcaaaatggaattgggagtcaattgggtgaactagcgttggtatttggctttggagctatgttgggtcgcttggttgccgacgcagggggagcctatcggattgctaataccttaatcgataaattcggacgccgcttcttacaaattgctgttgtagttgcttcgtttattattgggattgcacttttctttgaagtaggaatcgtgttattagtaccaattgtattcgcaattgcgatcgaagcaggggttccagttctttccttaggaattccaatggcagcagccttatcagttactcacggatttttgccaccacatccagctcctactgcaattgctgcagtcctgaatgctaatgctggaaaggttttactttacggagtgattattgcaattccaactgtttatattgcaggtgtattattttcaaaaattgctaaaaaatatcttccagaagcgtttaaaagaaatggtaatttaaaagctttaggacctcaaaaacaatttaaattagaggaaactccgggattcggtatttcggttttaactgctcttttcccagtcatcttaatggctatcacaacgatatatgaattgattgtccacgacggtgttacgcctaaaaatcctaatgcggttgacaatttttttggatttatcggttctcctagtatagctatgttaatttcattattgtttgcaatgtggttgatgggttatcaccgtaagattgctagtaaagatattatggctactttagaagatgcggtgaaatcaattgcaatgctccttctggtaattggtggtggaggtgcgtttaaacaagttttaattgatggtggtgttggagatgcggtcaaaaatatctttgcatcatctagtatctctcctctaattttaggatggttgatagcggtagtccttcgagtggctttaggatccgcaacggtggcatctctaactgctgccggtttagtattacccttaatgcaaggggcgggaattgatcctgcattaatggtgttatcagttggagcaggaagtttagctgcgagtcacgttaatgatgcaggcttctggatgttcaaagaatactttgatttatccgttaaagaaaccttactaacatggacagtactagaaacagtcatttcgattgttggattaattggcgtgttattattaagtttgattgtttaa

SEQ ID NO: 45497 - protein, 450 aa, Pediococcus pentosaceus ATCC 25745
MEIMVLVIGIILLLTLIIKFKMNTYVSLIITAVVVGLGLGMPASQIATTIQNGIGSQLGELALVFGFGAMLGRLVADAGGAYRIANTLIDKFGRRFLQIAVVVASFIIGIALFFEVGIVLLVPIVFAIAIEAGVPVLSLGIPMAAALSVTHGFLPPHPAPTAIAAVLNANAGKVLLYGVIIAIPTVYIAGVLFSKIAKKYLPEAFKRNGNLKALGPQKQFKLEETPGFGISVLTALFPVILMAITTIYELIVHDGVTPKNPNAVDNFFGFIGSPSIAMLISLLFAMWLMGYHRKIASKDIMATLEDAVKSIAMLLLVIGGGGAFKQVLIDGGVGDAVKNIFASSSISPLILGWLIAVVLRVALGSATVASLTAAGLVLPLMQGAGIDPALMVLSVGAGSLAASHVNDAGFWMFKEYFDLSVKETLLTWTVLETVISIVGLIGVLLLSLIV

SEQ ID NO: 45498 - DNA, 1500 bp, Oenococcus oeni PSU-1
  CDS (1)..(1500): transl_table=11
atgtcgtcacttgcagctattactgtcgatccgaaaaccggctttttttcttggctggttaacgggtttaatatttggcctttcctgattttagttttaggaatcgctttacttttaactttgattttaaaatttaaaatcaatacttttgttactttgatccttgtttcaattattgttgctttcgctttgggaatgaatccggccgggattgctgcggcaatacaaaacggaattggtggaaccttgggcgaattggttgttgtcttcggatttggttctatgatcggccgcttggtttccgattccggtggttcttatcgaattgccaaaactttgattgctaaattcggacggaaaaggctccaatgggcggttgcttttgcttcgtttattattggaatttccctgctgtttgaagttggattagttgttttgattccaatcgtctttgcgatcgccttggaagccgatgttcctttgctctatttgggtattccaatggcgaccgccttgtcggcggcccaaggctttctgcctcctcaaccatcaccgacggcggtcagcaatcttcttggtgccaacatgggaatggtcttgatttatggaattatcgtggcaattccggcgatgattatcgctggtcctgtgtttacgagaatagcccaaaaatatgtaccaaaagcttttaaaattaccaagcatctagacgctttgggaacagttaaggaatttaaattagaggataccccgtcatttggaatttctattttgacttccttgatggcagttatctttatggttattacaacaattattacgatggttgttaatggtggaaaacaggtttacaccggtacgatcggtgatgctgcatggaaggcaatgagaactgcggaccaaaaaggttatctgcttcatccaacaacttttcagaaaatcattgcttttcttggcaatcctttaattgcgatggtaattgctttattgtttgctctttggtcaatgggaccgcttcaggggcgttcgattaaagatgttaataatacattaaccgatgctatcaaatcgattgcgaatttgctgatggttattggtggtggagctgcctttaaaggtgtcctgacttccggtggaatttcaaccgcaattgctcaggcctttgctcactcgtcaatgtcgccgattctgtttgcctggttggttgctgtaataattcgtgtttcagttggttcggcgactgttgccggaatgacttcagctggtattgttgctccgattgtagcttcgcaaacagctattaacccggcatttgttgttttggctatcggtgccggttcgctagctgccagccatgttaacgatgctggtttctggatgttcaaggaattctttgatttggatgttaaagaaactttgaaaacctggactgtattggagactttgatttccgtagttggattattaatggttcttttgttgtcgacgattttccactga

SEQ ID NO: 45499 - protein, 499 aa, Oenococcus oeni PSU-1
MSSLAAITVDPKTGFFSWLVNGFNIWPFLILVLGIALLLTLILKFKINTFVTLILVSIIVAFALGMNPAGIAAAIQNGIGGTLGELVVVFGFGSMIGRLVSDSGGSYRIAKTLIAKFGRKRLQWAVAFASFIIGISLLFEVGLVVLIPIVFAIALEADVPLLYLGIPMATALSAAQGFLPPQPSPTAVSNLLGANMGMVLIYGIIVAIPAMIIAGPVFTRIAQKYVPKAFKITKHLDALGTVKEFKLEDTPSFGISILTSLMAVIFMVITTIITMVVNGGKQVYTGTIGDAAWKAMRTADQKGYLLHPTTFQKIIAFLGNPLIAMVIALLFALWSMGPLQGRSIKDVNNTLTDAIKSIANLLMVIGGGAAFKGVLTSGGISTAIAQAFAHSSMSPILFAWLVAVIIRVSVGSATVAGMTSAGIVAPIVASQTAINPAFVVLAIGAGSLAASHVNDAGFWMFKEFFDLDVKETLKTWTVLETLISVVGLLMVLLLSTIFH

SEQ ID NO: 45500 - DNA, 1335 bp, Leuconostoc mesenteroides subsp. mesenteroides ATCC 8293
  CDS (1)..(1335): transl_table=11
atgccattgttaacagttttgattggtgtcattttactcgtattcttgattactaaatttaagttgaacacttttttatcgttagtcattacagcgtttgttgtcggcttaattttaggtattccagtttctgatatttcaacaagtattgagacaggaataggtggtcagttaggccacttagcgattatatttggatttggatcgatgcttggaaagttaatttccgacgcaggtggtggctttcgaattgcgcaccagctcattgcgacttttggaaaaaaacgcattcaaattgctgttattattacgtcgtttattattggtttagctttgttttttgaagttggattagtcgtgttattgccaattatcttcgtcattgcacgtgaagtaaatatgcctcttttgtaccttggtattccaatggctgcgacattaaatgttgcacacggtttcttaccaccgcatcctgcaccgactgctgtatcacaggtgttgaatgcgcctttggggcacgttttactgattggtattttagtgtcaattcccacgatcattatttctggtccggtgttcaactattttttgcatcgagtatatccgcaagtttataaaaaagatattaatatttctgttttaggtgagtacaaagaattcgagttgaaagatacaccaaagtttggtattagtgttttgacagcattattaccagtaatattgattagtattgcaaccatcttatcatttgttttgccagctaagtcagttatttatcaaatcgtcacatttatcggtgcacctgatgtagctatgctcatatcattaattgttgcgattttcaccatgggtattttccgtggattgaatatcaaagaaattggtgacgcaatgtctgaatcggttaaacaaattgctatgatgttgttaatcattggtggtggtggtgccttcaaacaagtattagttgatggtggtgtttctaagtatattggcgatttattcggacaaactaatttgtccccaattcttgttgcttggttaatcgctgctttacttcgcgtcagcctaggatcatctactgttgcttcgataacagcagccagtttagttacttcagttgtgtccaactcaagtgtgagtcctgtattagtagttttggcaattggtgctggaagtatatttgctgatcatgttaatgatgctggattctggatgataaaagaatattttggtttaacattgaaagaaacgttcttatcttggacgacattaaccagtgtcatctccgtttcgggtctgttatcgattctactcgtgtcatgttttatgtag

SEQ ID NO: 45501 - protein, 444 aa, Leuconostoc mesenteroides subsp. mesenteroides ATCC 8293
MPLLTVLIGVILLVFLITKFKLNTFLSLVITAFVVGLILGIPVSDISTSIETGIGGQLGHLAIIFGFGSMLGKLISDAGGGFRIAHQLIATFGKKRIQIAVIITSFIIGLALFFEVGLVVLLPIIFVIAREVNMPLLYLGIPMAATLNVAHGFLPPHPAPTAVSQVLNAPLGHVLLIGILVSIPTIIISGPVFNYFLHRVYPQVYKKDINISVLGEYKEFELKDTPKFGISVLTALLPVILISIATILSFVLPAKSVIYQIVTFIGAPDVAMLISLIVAIFTMGIFRGLNIKEIGDAMSESVKQIAMMLLIIGGGGAFKQVLVDGGVSKYIGDLFGQTNLSPILVAWLIAALLRVSLGSSTVASITAASLVTSVVSNSSVSPVLVVLAIGAGSIFADHVNDAGFWMIKEYFGLTLKETFLSWTTLTSVISVSGLLSILLVSCFM

SEQ ID NO: 45502 - DNA, 1344 bp, Solibacter usitatus Ellin6076
  CDS (1)..(1344): transl_table=11
atgcccgccaatgggacttacctaatctgcattaccgtagcgaccctggcctgccttcttctcctcatcctggtcggaaaactgcacgcctttctggctctcctgatttcgtcgatgttcatgggcctcgccgccggaatggccccggaaaaggttctcaagtccatccagaccggcttcggcgatgctctcggattcatcgcggtggtgatcggcctcggcgccatgatcggccgtttcctcgagtactccggcggcggccgcgcgctcgccgactggctgctcgtcaagttcggcaagaaccacgccgcatgggccgtgctcattgcctctttcctcgtcggactcccgatcttcttcgaggtcggattcatcatcctcatccccatcgtctggagcctcacccgcgagaccaagcgctccctgcttttctacgggctgccgatggccgccgcgctcaccatgacgcattccctggtgccgccccaccccgctcccgcggccgccgcgcagttgatggggggcgatctcgcccacaccatcatctacggcgtgctgatgtcgatcccgatgaccctgattgccggcatcgtgtatgccacctgggtggcgcgccgcatctatatccccgtccccgaaatcgcagcctcgatgaccctaaaatccgccgagtcacccggcgcgccgccgcccgtggccgtcgtcgtcctgctcctgttgctcccggtcacgctcaccttcggcgcgactatggccagcttgcgcaatattcccttccgcggagtcgcagtcttcctcgggcatccgtacaccgcgctcaccgtcaccaccctgatcgccctctactgcttcggcctgcgccgcggattgtcgcgcgaccaggtgctcaaaatggccacggactcgctgctccccgtcggcggactgatgtgcatcatcggcggcggcggcgcgctgaaacaggtgatcgtggattccggcgttggaacttacgccggtaagctgctgatgaccagcgcgatctcgccgctgatcgtggtctggctgatcgccgcctgcatgcgcctcgcgcagggctccgcgactgtcgccatcatcacggccgccggcatcgccgcgccgctggtcaagggactgcccggctactcgcccgacgagttgatcctcgccctctgctgcggcggctcggccttttcccaggtcagcgattcgggcttctggatggtcaccaattacttcggcaccaccgtcgcccagacgctgaagacctggaccaccatgaagatcatcgcctccctgctggggctcgccatcatgctcaccgcgcatgcgctgctacgatag

SEQ ID NO: 45503 - protein, 447 aa, Solibacter usitatus Ellin6076
MPANGTYLICITVATLACLLLLILVGKLHAFLALLISSMFMGLAAGMAPEKVLKSIQTGFGDALGFIAVVIGLGAMIGRFLEYSGGGRALADWLLVKFGKNHAAWAVLIASFLVGLPIFFEVGFIILIPIVWSLTRETKRSLLFYGLPMAAALTMTHSLVPPHPAPAAAAQLMGGDLAHTIIYGVLMSIPMTLIAGIVYATWVARRIYIPVPEIAASMTLKSAESPGAPPPVAVVVLLLLLPVTLTFGATMASLRNIPFRGVAVFLGHPYTALTVTTLIALYCFGLRRGLSRDQVLKMATDSLLPVGGLMCIIGGGGALKQVIVDSGVGTYAGKLLMTSAISPLIVVWLIAACMRLAQGSATVAIITAAGIAAPLVKGLPGYSPDELILALCCGGSAFSQVSDSGFWMVTNYFGTTVAQTLKTWTTMKIIASLLGLAIMLTAHALLR

SEQ ID NO: 45504 - DNA, 1446 bp, Mycobacterium smegmatis str. MC2 155
  CDS (1)..(1446): transl_table=11
gtggacgccattgatccggcatacggcaccaccacccttctgctgatcgcggcagccgcggtggcggtgctgctgttcctcatcatcaaggtgaagctgcacgcgttcgtcgccctggtactggtgagcctgttgaccgcactggccgccggtatccccgtggccgatgtgccaagcgccctgtcatccgggttctccagcacgctcggctccgtggccctgctcgtcggtttcggtgtcatgatcgggcgtcttctcgaaaccaccgggggtgcacaggttctcgccgacacgctcatcggccggttcggcgagaagcgggctcccctcgcgctcggcgtggcggcgttgctgttcggtttcccgatcttcttcgacgccggcctggtcgtcttcctgccgatcatcatgacggtggcccgccgtttcggcggatcgctgctgctgtacgcattccccgcagcgggcgcgttcgcggccatgcacgccctggtaccgccgcatcccggtccggtcgcggcggccgaattgctcggtgccaacatcggtctgacgttgatcgtgggcgtccccgtggcggtggtgtcgtggtacgtcggcgcgttcctggtgtcccaggtgatcggtcggcgcgtgcacatcgacattcccacgtcactgttcggcgagatcaacggtgggcgcgatatcgacgccacgggcacggaggccgacgccgacggggccggcgccacaggggcctcgaggaccgccacccgggccacgccgtcgttcctgaccgtcctgggtgtgctgttgctgcccttcgtgctgatctcctgcaacacggtggtcgccaccctgcagaccgcaggggtgatccccgaagaggccacgtgggcggagtacctcaaactgatcggcaccacgtcgatcgccctgctgatcaccgtcatcgtcgccaccctggtactcggattgcgcggcaggtcgatggccaccgtcaccgacatcctcgacaacgcactcggcccgatctgcgcgatcatcctgatcaccggcgcgggcggcatgttcgggggtgtgctgcgcaccagcggcatcggtgacgccctgagcggttcgctgtccgacctcggaatctcgctgatcctgcaggccttcctcatctccacgctgctgcgcgtcgcacagggttcggcgacggtcgcattgaccaccaccgcgggtctcctcagcgcagccgtcgccgccgccggactgagcagcctgcagctgaccgcgctggtgatggcgatcgccgcgggcgccacggtgctctcgcacgtcaacgactccggcttctggttggtcagccggttcttcggcatggatgtcaagaccacgctcaagacctggacgctgctggagacgacgctgggcgtgacagcgttcgtgatcagcctcggcctgtgggccataggctga

SEQ ID NO: 45505 - protein, 481 aa, Mycobacterium smegmatis str. MC2 155
MDAIDPAYGTTTLLLIAAAAVAVLLFLIIKVKLHAFVALVLVSLLTALAAGIPVADVPSALSSGFSSTLGSVALLVGFGVMIGRLLETTGGAQVLADTLIGRFGEKRAPLALGVAALLFGFPIFFDAGLVVFLPIIMTVARRFGGSLLLYAFPAAGAFAAMHALVPPHPGPVAAAELLGANIGLTLIVGVPVAVVSWYVGAFLVSQVIGRRVHIDIPTSLFGEINGGRDIDATGTEADADGAGATGASRTATRATPSFLTVLGVLLLPFVLISCNTVVATLQTAGVIPEEATWAEYLKLIGTTSIALLITVIVATLVLGLRGRSMATVTDILDNALGPICAIILITGAGGMFGGVLRTSGIGDALSGSLSDLGISLILQAFLISTLLRVAQGSATVALTTTAGLLSAAVAAAGLSSLQLTALVMAIAAGATVLSHVNDSGFWLVSRFFGMDVKTTLKTWTLLETTLGVTAFVISLGLWAIG

SEQ ID NO: 45506 - DNA, 1386 bp, Neisseria meningitidis FAM18
  CDS (1)..(1386): transl_table=11
atggacggctggacacagacgctgtccgcgcaaaccctgttgggcatttcggcggcggcaatcatcctcattctgattttaatcgtcaaattccgcatccacgcgctgctgacactggtcatcgtcagcctgctgacggctttggcaaccggtttgcccacaggcagcattgtcaacgacgtactggtcaaaaacttcggcggcacgctcggcggcgtggcgcttctggtcggcctgggcgcaatgctcggacgtttggtcgaaacatccggcggcgcacagtcgctggcggacgcgctgatccggatgttcggcgaaaaacgcgcaccgttcgcgctgggcgttgcctcgctgattttcggcttcccgattttcttcgatgccggactaatcgtcatgctgcccatcgtgttcgccaccgcacggcgcatgaaacaggacgtactgcccttcgcgcttgcctccatcggcgcattttccgtcatgcacgtcttcctgccgccccatccgggcccgattgccgcttccgaattttacggcgcgaacatcggccaagttttgattttgggtctgccgaccgccttcatcacatggtatttcagcggctatatgctcggcaaagtgttggggcgcaccatccatgttcccgttcccgaactgctcagcggcggcacgcaagacaacgacctgccgaaagaacctgccaaagcaggaacggtcgtcgccatcatgctgattcccatgctgctgattttcctgaataccggcgtatcggccctcatcagcgaaaaactcgtaagtgcggacgaaacctgggttcagacggcaaaaataatcggttcgacaccgatcgcccttctgatttccgtattggtcgcactgtttgtcttgggacgcaaacgcggcgaaagcggcagcgcgttggaaaaaaccgtggacggcgcactcgcccccgtctgttccgtgattctgattaccggcgcgggcggtatgttcggcggcgttttgcgcgcttccggcatcggcaaggcactcgccgacagcatggcggatttgggcattcccgtccttttgggctgtttccttgtcgccttggcactgcgtatcgcgcaaggttcggcaaccgtcgccctgaccaccgctgccgcgctgatggctcctgccgttgccgccgccggctttaccgactggcagctcgcctgtatcgtattggcaacggcggcaggttcggtcggttgcagccacttcaacgactccggcttctggctggtcggccgcctcttggacatggacgtaccgaccacgctgaaaacctggacggtcaaccaaaccctcatcgcactcatcggctttgccttgtccgcactgctgttctccatcgtctga

SEQ ID NO: 45507 - protein, 461 aa, Neisseria meningitidis FAM18
MDGWTQTLSAQTLLGISAAAIILILILIVKFRIHALLTLVIVSLLTALATGLPTGSIVNDVLVKNFGGTLGGVALLVGLGAMLGRLVETSGGAQSLADALIRMFGEKRAPFALGVASLIFGFPIFFDAGLIVMLPIVFATARRMKQDVLPFALASIGAFSVMHVFLPPHPGPIAASEFYGANIGQVLILGLPTAFITWYFSGYMLGKVLGRTIHVPVPELLSGGTQDNDLPKEPAKAGTVVAIMLIPMLLIFLNTGVSALISEKLVSADETWVQTAKIIGSTPIALLISVLVALFVLGRKRGESGSALEKTVDGALAPVCSVILITGAGGMFGGVLRASGIGKALADSMADLGIPVLLGCFLVALALRIAQGSATVALTTAAALMAPAVAAAGFTDWQLACIVLATAAGSVGCSHFNDSGFWLVGRLLDMDVPTTLKTWTVNQTLIALIGFALSALLFSIV

SEQ ID NO: 45508 - DNA, 1347 bp, Exiguobacterium sibiricum 255-15
  CDS (1)..(1347): transl_table=11
atgccattagtcattgttgctatcgggattattctgttactcgttttaattatggggttaaaattaaacacgttcgtttctttaatcatcgtctcgttcgtcgtcgctttactgcttggaatgccgcttgatcaaatcgtcacgacgattgaagccggtctcggcggcacgcttggtcacctcgccttaatcttcggacttggtgccatgctcgggaaattgattgccgatgcaggcggtgcgcaacggatcgcgatgacgcttgtcgcgaagtttggggaaaagaacatccaatgggctgtcgttgtcgcctcattcatcatcgggattgcgttattctttgaagtcggcttggtgttgttgattccaatcgtcttcgccatctcacgtcagttacgcgtctcgatcttgtatctcgggattccgatggttgctgccctttccgtcacacacggctttcttccgcctcacccgggcccgaccgttattgccggagaatacggagctgaccttggtcaagttctcttatacggctttattgtagccgtaccgaccgtcatcatcgccggtccgatctttacgaaaatcgcgaaacgaatcgttccggattcattcaagaaaaccggcaacatcgcttcactcggggaacaaaaagaatttaatctcgacgagacaccaggattcggtatcagtgtcttcacagcgatgctgcctgtcctcctgatgtcgatcgcgacgattttaacgttattgcaaaaaacgcttggttgggaaagtaacagtgttttatctgccgttcaattcatcggaaacgcatcgacggcgatgctgatttccttgcttttcgctatctacacgatgggactggcgcgtcagattcccattaaaaccgtcatggattcttgtacgacggccatcacacaaatcggaatgatgctactgatcatcggcggcggcggtgcctttaagcaggtcctgattgacggtggtgtcggtaaattcgtcgctcagatgtttgaagatacgacattatcaccgattttactggcgtggatcatcgcagccatcttacggatttcacttggttcggcaaccgtcgcttcactgacgacagccggtctcgtcattccgttgctcggtcaatcggatgtcaatctggcgctcgtcgttctcgcaacaggagccggcagtttgatcgcttcacacgtcaacgacgccggattctggatgtttaaagagtatttcggattaaccatgaaagaaacttttgcgacgtggaccttgcttgagacaatcatttccgtcttcggacttggattcgtccttctgctcagtctcgtcgtctaa

SEQ ID NO: 45509 - protein, 448 aa, Exiguobacterium sibiricum 255-15
MPLVIVAIGIILLLVLIMGLKLNTFVSLIIVSFVVALLLGMPLDQIVTTIEAGLGGTLGHLALIFGLGAMLGKLIADAGGAQRIAMTLVAKFGEKNIQWAVVVASFIIGIALFFEVGLVLLIPIVFAISRQLRVSILYLGIPMVAALSVTHGFLPPHPGPTVIAGEYGADLGQVLLYGFIVAVPTVIIAGPIFTKIAKRIVPDSFKKTGNIASLGEQKEFNLDETPGFGISVFTAMLPVLLMSIATILTLLQKTLGWESNSVLSAVQFIGNASTAMLISLLFAIYTMGLARQIPIKTVMDSCTTAITQIGMMLLIIGGGGAFKQVLIDGGVGKFVAQMFEDTTLSPILLAWIIAAILRISLGSATVASLTTAGLVIPLLGQSDVNLALVVLATGAGSLIASHVNDAGFWMFKEYFGLTMKETFATWTLLETIISVFGLGFVLLLSLVV

SEQ ID NO: 45510 - DNA, 1365 bp, Escherichia coli B
  CDS (1)..(1365): transl_table=11
atgtccacaattacattgttatgcattgcgttaactggcgtaatcatgctgttgctgctggtcatcaaggcaaaggtacaaccattcgttgctctgctcctcgtcagcctgttagtcgcacttgcggcgggtataccggcgggcgaagtgggtaaagtgatgatcgccgggatgggcggtgtgcttggttccgtcactattattattggtctgggcgctatgctggggcgtatgatcgaacactctggtggtgcagagtcactggctaattatttcagtcgcaagttaggtgacaaacgaactatcgctgcgctgactctggcagcgttcttcctcggtattcccgtcttctttgatgtcggctttattattcttgcgccaatcatttacggttttgccaaggttgccaaaatatcgccactcaaatttggcctgcctgtcgctggggtcatgctcactgttcacgtggcggtaccgccgcatccaggccctgtcgccgcagcggggttactccacgcagacatcggctggctaaccatcatcggtattgcgatttctattcccgtaggggttgttggctactttgcagcgaaaataatcaataagcgccaatatgcgatgtcagtagaagtactggaacagatgcaactggctccggccagtgaggaaggcgcgacaaaattaagcgataaaataaatccaccgggcgtcgcgctggtcacctcgctaattgttattcctatcgcgattatcatggcgggtacggtttccgcaacactgatgccgccttcgcatcccctgcttggtacgctacagctgatcggctcaccaatggtagctctaatgattgcgctggtgctggcattctggttattggctttacgtcgcggctggagcttacaacacaccagcgacattatgggctcagcccttcccactgcggcggtagtgattttggttactggtgctggaggggtatttggcaaagtgctggtggaatcgggcgtcggcaaagcccttgccaacatgctacaaatgattgacctgcctctgttaccagccgcatttattatttcactggcgctgcgtgcatcgcaggggtcagcaaccgtagcaatcctgacaaccggcgggttactctcagaagcggtgatgggattgaatccgattcagtgcgtattggtgacgctggcagcctgctttggtgggcttggcgcgtcacatattaatgactcagggttctggattgtgaccaaatatctggggttgtcggtagcagacggtctgaaaacctggacagtgttaacgaccattctcggttttaccggattcttaattacctggtgcgtatgggcggtaatttga

SEQ ID NO: 45511 - protein, 454 aa, Escherichia coli B
MSTITLLCIALTGVIMLLLLVIKAKVQPFVALLLVSLLVALAAGIPAGEVGKVMIAGMGGVLGSVTIIIGLGAMLGRMIEHSGGAESLANYFSRKLGDKRTIAALTLAAFFLGIPVFFDVGFIILAPIIYGFAKVAKISPLKFGLPVAGVMLTVHVAVPPHPGPVAAAGLLHADIGWLTIIGIAISIPVGVVGYFAAKIINKRQYAMSVEVLEQMQLAPASEEGATKLSDKINPPGVALVTSLIVIPIAIIMAGTVSATLMPPSHPLLGTLQLIGSPMVALMIALVLAFWLLALRRGWSLQHTSDIMGSALPTAAVVILVTGAGGVFGKVLVESGVGKALANMLQMIDLPLLPAAFIISLALRASQGSATVAILTTGGLLSEAVMGLNPIQCVLVTLAACFGGLGASHINDSGFWIVTKYLGLSVADGLKTWTVLTTILGFTGFLITWCVWAVI

SEQ ID NO: 45512 - DNA, 1404 bp, Pseudomonas putida GB-1
  CDS (1)..(1404): transl_table=11
atggttgcaaaccaacaagaagctcgcacggaagcgatcagcgatagagataactacacgatgactccaacgttctcattaatcgttctgggcactgcaatactgctgatcgtggtcatgatcagcaagctcaaggtccaccccttcctggcactgctggccgcaagcctggtggtgggcattggtaccggcatgccgccgacggccatggttgccgcgttcgaaaaaggcatgggcagcacgctgggctttcttgccggcatcatcggcctgggcagtatcctcggcaaactgctggaagagtcgggtggggccaggcgcatcgccaccacgctgctgaacctgttgggtgaacgcaatgcttcatgggccatgatgctggtgggcttcatcgctggcatcccggtatttttcgaggtcggcttcgtgctgctcattccgctgatctacgtggttgcccggcaaacccgcatcagcatgctgtacctcggcgtcccgctggccacctcgctgatggtggtgcactgcattctgccgccacacccagctgctacggcgattaccggcatgctcaatgccgatatcggcacggtcatcctctatggcctgatcgttggcttgcccactgccatcatcgccggcccggtctgggtacgcttcgcctgcaagcgcggcgcaacacaagcgcaagataccttcctttcggcacgtaccgaggcccaggtcgatgaccagccgctgcctgctttcggcattaccctcgccaccgtactgctgccgttgctgctgatggtcggcaaaaccttggccgtcatggtgctggcaaagggctccacgctgtacgagtgggtggccttcgttggcaacccactgatcgccctggcgctgtcggttatgttcggctactgggcactgggcctgcgccgcggcctggacatggcgcagttgctcaacctgacccagcgctgcttcccgcccctggccggtattttgctgattatcggtgccggcggcgccttcaacgacatgctggtcggtagcggcatcggcaaggcgctggctgacgtgctcaaccagacccagctcaacccgatcatcctcgcctggctgatcgctgggatcatgcacttcgcggtcggttcggccacggtggcaatgatcagcgcagccggcatggtcatgccgatcctggaccaacaccccgaatacaaccgggaaatcctggtgatcgccatcggtgcaggcgccatcggctggacacacattaccgattcggcgttctgggtggtgaaggagtatctggggctgtcactcagcgatgcgttgaaaaaattcactgcggcgacagtgctggcctcggtgatcgccttgtgcctgaccctgctcctttcaaaaattgtctga

SEQ ID NO: 45513 - protein, 467 aa, Pseudomonas putida GB-1
MVANQQEARTEAISDRDNYTMTPTFSLIVLGTAILLIVVMISKLKVHPFLALLAASLVVGIGTGMPPTAMVAAFEKGMGSTLGFLAGIIGLGSILGKLLEESGGARRIATTLLNLLGERNASWAMMLVGFIAGIPVFFEVGFVLLIPLIYVVARQTRISMLYLGVPLATSLMVVHCILPPHPAATAITGMLNADIGTVILYGLIVGLPTAIIAGPVWVRFACKRGATQAQDTFLSARTEAQVDDQPLPAFGITLATVLLPLLLMVGKTLAVMVLAKGSTLYEWVAFVGNPLIALALSVMFGYWALGLRRGLDMAQLLNLTQRCFPPLAGILLIIGAGGAFNDMLVGSGIGKALADVLNQTQLNPIILAWLIAGIMHFAVGSATVAMISAAGMVMPILDQHPEYNREILVIAIGAGAIGWTHITDSAFWVVKEYLGLSLSDALKKFTAATVLASVIALCLTLLLSKIV

SEQ ID NO: 45514 - DNA, 1386 bp, Pseudomonas putida GB-1
  CDS (1)..(1386): transl_table=11
atgacccccttggatatacagctgctactgaccgctctggtcagtgtcctggtgctggtggcactcatcgtgtcgcgcctgaagatgcacccgctgctggccttgctggtggtgtccattggggtgggcttcgctacccgcatggagccaggcagcatcgtctcccacttgcttaccggcgctggaaaaaccctgggggccgtcggggtggtgattgcccttggcgcgatgctcggcaaaattctggctgacgctggcgtcaccgagcaggtcgctgatgtcatcctcaagcgcacctcggaccgcatgattccgtgggccatgatgttggttgccttcgtcattggcatccccatgtttttcgaagtgggcctggtgatcatgctgccgctgattttcagcgtggcgcgcaagctggaaagcaaggcccgcttcaagggctctgcatacgtgtatgtaggcgtgccggtgatttcggcgctggctgccatgcacggcatggtaccgccgcaccctggccccctgaccgccatcgcggtactcaagacctcggttgggcccaccatgctttacggcttcctggcggctatcccggcaatgatcctgggcggcccgctgtatggcatgttcatttcgccgcgcatgagcactcggcctgatcaggctttgctggaccagttcaccctggctgaaaaagccgacgatcaaccccgccccggcgtagcgatcggcatgctggccgcgttgctgccggcgattctgatgctggtgcatgccgtcgccgagatgctgctacccaagggcaacccgttgctggagctggccagtttcctcggcaacccgctgatcgccatgttgctgggcgtgctgttcgccggcgccagcctggtactggcgcgcggcggtgacgccgaacacctgcgcgatgcactgggcaaaagcctcaagcctatcgcctcgatcatcatgatcatcgccggcggcggggcttttcaggagatgctgaccagcgccaaggtgggtgatgccattgtgcacctgactcagcaatcggccttcccgcccttgatgctggggtggttgatcgcgatgttgctttcggtgtctaccggctccgccacggtaggtatcgttggggctgccggcttgctggcaccgctggcgggtgccgaccccagcctcaacctgccgttgctggccttgtccatcggctgtggctcgctgttcttcaactatgcgaaccatgcagggttctggatggtgaaagagtcctttgggatgaccatgggcgaagccaccaggaccatctcggtggtgcagtccatcgtggcggtggtcgggttgattgtggtgctggtcttgaatgcggcaattactgtgagttga

SEQ ID NO: 45515 - protein, 461 aa, Pseudomonas putida GB-1
MTPLDIQLLLTALVSVLVLVALIVSRLKMHPLLALLVVSIGVGFATRMEPGSIVSHLLTGAGKTLGAVGVVIALGAMLGKILADAGVTEQVADVILKRTSDRMIPWAMMLVAFVIGIPMFFEVGLVIMLPLIFSVARKLESKARFKGSAYVYVGVPVISALAAMHGMVPPHPGPLTAIAVLKTSVGPTMLYGFLAAIPAMILGGPLYGMFISPRMSTRPDQALLDQFTLAEKADDQPRPGVAIGMLAALLPAILMLVHAVAEMLLPKGNPLLELASFLGNPLIAMLLGVLFAGASLVLARGGDAEHLRDALGKSLKPIASIIMIIAGGGAFQEMLTSAKVGDAIVHLTQQSAFPPLMLGWLIAMLLSVSTGSATVGIVGAAGLLAPLAGADPSLNLPLLALSIGCGSLFFNYANHAGFWMVKESFGMTMGEATRTISVVQSIVAVVGLIVVLVLNAAITVS

SEQ ID NO: 45516 - DNA, 1344 bp, Marinobacter sp. ELB17
  CDS (1)..(1344): transl_table=11
atgcacatggtttttattttaatcgctcttattgcgttcattgtgttcgcaacgagcaaattgcgcctcaaccctttcattacacttttgctggcatcgttcattgccgcgttcgcatttggcctgccgctcgatgccatcgaatcaacgattcgcggtggttttggtaaaattctcggctacatcggcctggttatcgttttgggtaccatcatcggtgtcattcttgagcgcaccggtgccgctattgtgatggctgagacgatcattaaatgtttgggtaaaaaattccctaccatgacgatgtccatcgttggttttattgtgtctattccggtgttttgtgattccggttttgtcattctcaacagcctgaagcgctccatggcgagaacccttagcgtatcccccgtcgcaatgacggtggcactttctaccggtctatttgcaacccacacccttgtaccacccacgcccggcccgattgcggccgcaggcaacctggggttggaaaacaacttggggctggttatcggcgtcggccttgttttcgccataatcgcggcgatggcgggtttggtttgggcctatttctcacgaaacctgcccagtacagaactggatctaacagaagaagcgtttgaggaaggtaaagagcattacggtgaactgcctggcccatggaaagcctttgctcctatttttgtacccattgcccttatttgtttgggctcagtagccagttacccaaccgccccgctgggtgatgggtttctttatgaagcgctgaattttcttggtaagccgctaaatgctctgttgattggccttgggtttgcagtactgctgattcaaggtaatgagaaactcaaaggatttgcccgtcacaccgaaaaaggtctggttgtctcggcaccgattattctgattaccggtgcgggtggcgcattcggtgctgtgctggccgcgacaccgctgggtgatttccttggccagaacctgtctacattgggcttgggggttatcatgcctttcattgtggccgctgcgctcaaatcggcacaaggttcttcaaccgtcgccctggttaccgcttctgcgctggttgccccgttgttgccgcaattgggattggactcagatatgggccgcgtactaacggttatggccgttggtgctggcgcaatgaccgtctcccacgccaacgacagctatttttgggtggtatcccagttcagtaaaatggacgttgcaacggcgtatcgctcacacacagcggcgacactttttatgggcctggtaacaattactgccgtgtggctagcatccctggcagctctgtaa

SEQ ID NO: 45517 - protein, 447 aa, Marinobacter sp. ELB17
MHMVFILIALIAFIVFATSKLRLNPFITLLLASFIAAFAFGLPLDAIESTIRGGFGKILGYIGLVIVLGTIIGVILERTGAAIVMAETIIKCLGKKFPTMTMSIVGFIVSIPVFCDSGFVILNSLKRSMARTLSVSPVAMTVALSTGLFATHTLVPPTPGPIAAAGNLGLENNLGLVIGVGLVFAIIAAMAGLVWAYFSRNLPSTELDLTEEAFEEGKEHYGELPGPWKAFAPIFVPIALICLGSVASYPTAPLGDGFLYEALNFLGKPLNALLIGLGFAVLLIQGNEKLKGFARHTEKGLVVSAPIILITGAGGAFGAVLAATPLGDFLGQNLSTLGLGVIMPFIVAAALKSAQGSSTVALVTASALVAPLLPQLGLDSDMGRVLTVMAVGAGAMTVSHANDSYFWVVSQFSKMDVATAYRSHTAATLFMGLVTITAVWLASLAAL

SEQ ID NO: 45518 - DNA, 1395 bp, Enterobacter sakazakii
  CDS (1)..(1395): transl_table=11
atgttgaggataataacgatgacagaaaccactttcgcttatagcgccggtacgctgcttggcattgctgccggtgccgtcgtactgctgctggtacttatcatgcgctttaaagtgcatgcttttcttgcgcttaccctggtcagtatcgtggtggcgctgttgaccaaagtgccgtttgataaagtcgtgcctacgctgctgaccggttttggcagtacgcttgcgggcgttgcgctgctggtgggcatcggcgcgatgattggccgtctgctggaagtgtccggcggcgcgaaagtgctggccgatacgctgattaacaaattcggtgaacaccgcgcgcccttcgcgctcggcgtcgcctcgctgctgtttggcttccctatcttctttgacgcgggtcttgtcgtcatgctgccgattatcttcagcgtggcgaaacgctttggcggctcgacgctgaaatacgccttcccggcggcgggcgcgtttgcggccatgcatgcgctggtgccgccgcatccgggcccggttgccgcgagcgaactgctgggggcgaatatcggtctgctggtgattgtcgggctgattatcgcgatcccgacctggtattttggcggctatctgtatggtcagtacgccggtaaaaaattcgacattaagctgccctcttctttccttggcgaagtggacgccgatccgacgcaccgcccgccgtcattcggcatggtgatcaccatcctgctgctgccgctgctgctgattttccttgataccggcctcaataccgccaaagtgctgggctgggtcagcgccgataacagcgtggcgaacttcctgcgtatgctcggtaaaaccccggtcgcgctgctgattaccgtctttttcgcgctgatggtgttcagccgcaaccacagccgccagcatctggagaaaatttgcgacggcgcgcttggccctatctgcggcatcattctggtgaccggcgcaggcggcatgttcggcggcgtgctgcgcgccagcggcatcggcgacgcgctggcgggcgtgctctcagacaccggcatgccggtgattctcgcggcgtttgttatctccaccgcgctgcgcgtggcgcagggctcggcgacggtcgcgctgacgaccaccgccgcgctggtcgcgccgatggtgcaggcgacgccgggcttaagccagttcgacctttgctttattgttatcgccatcgcgggcggcgcgacggtgctctcacacgtcaacgactccggtttctggctagtgggccgtttccttgaaatggacgagaaaaccacgctgaaaacctggaccgtgatggaaaccctgctgggcaccatcgccttcctgctggcagccgtggggagcattctgctttaa

SEQ ID NO: 45519 - protein, 464 aa, Enterobacter sakazakii
MLRIITMTETTFAYSAGTLLGIAAGAVVLLLVLIMRFKVHAFLALTLVSIVVALLTKVPFDKVVPTLLTGFGSTLAGVALLVGIGAMIGRLLEVSGGAKVLADTLINKFGEHRAPFALGVASLLFGFPIFFDAGLVVMLPIIFSVAKRFGGSTLKYAFPAAGAFAAMHALVPPHPGPVAASELLGANIGLLVIVGLIIAIPTWYFGGYLYGQYAGKKFDIKLPSSFLGEVDADPTHRPPSFGMVITILLLPLLLIFLDTGLNTAKVLGWVSADNSVANFLRMLGKTPVALLITVFFALMVFSRNHSRQHLEKICDGALGPICGIILVTGAGGMFGGVLRASGIGDALAGVLSDTGMPVILAAFVISTALRVAQGSATVALTTTAALVAPMVQATPGLSQFDLCFIVIAIAGGATVLSHVNDSGFWLVGRFLEMDEKTTLKTWTVMETLLGTIAFLLAAVGSILL

SEQ ID NO: 45520 - DNA, 1320 bp, Escherichia coli B
  CDS (1)..(1320): transl_table=11
atgccattaatcattattgcggcaggcgtcgcgctgcttcttatcctgatgatcgtctttaaagttaacggctttattgccctcgttctggtagctgccgtcgtcggatttgccgaagggatggatgcacaggccgtcctgcactctatacaaaatggtatcggcagcacgctcggcgggctggcaatgatcctcggtttcggggccatgttaggcaagctgatttctgatacgggtgcggcacaacgtatcgccactacgctgattgctacttttggtaaaaaacgcgtgcaatgggcgctagtgatcaccggtctggttgtgggcctcgccatgttttttgaagtgggttttgtcctgctgttgccgttggtatttaccatcgtagcatcatcaggattacccctgttgtatgttggcgtaccaatggtagcagcgctctctgtaacccactgttttctgccgccacatccagggcctactgccatcgcgactatctttgaggctaatctcggaacgactttactgtatggatttatcattaccattccgacagttattgtcgcaggaccgctgttttctaaactgctaactcgctttgagaaagcaccaccggaaggcttatttaatcctcatctgtttagcgaagaggagatgccctccttctggaacagtattttcgctgccgtgatcccggtcatcctgatggctatcgccgccgtttgtgaaattacgttaccgaaaactaacaccgtgcgcctcttctttgaatttgtcggtaaccctgccgttgcgctgtttattgccattgttattgcgattttcacactgggccgacgtaatggacgcaccatcgagcaaatcatggatatcattggggattctataggcgctatcgcgatgattgtgtttattatcgctggcggcggcgcgtttaagcaggtattagtagatagcggtgtcgggcactatatttcacacttaatgaccggaactacactttcgccgttattgatgtgctggactgttgcggcgctgttgcgtatcgctctgggctctgccaccgtcgcggccattaccaccgcgggtgtggtgttgccgattatcaacgttacccatgccgatcccgctttaatggtactggcaaccggtgcgggcagcgtgatcgcgtcacacgtaaacgaccctggcttctggctatttaaagggtattttaatctgacggttggtgaaacgttgcgtacctggacggtgatggaaacccttatttctattatgggtttgctgggcgtgttagccattaacgccgtattgcactga

SEQ ID NO: 45521 - protein, 439 aa, Escherichia coli B
MPLIIIAAGVALLLILMIVFKVNGFIALVLVAAVVGFAEGMDAQAVLHSIQNGIGSTLGGLAMILGFGAMLGKLISDTGAAQRIATTLIATFGKKRVQWALVITGLVVGLAMFFEVGFVLLLPLVFTIVASSGLPLLYVGVPMVAALSVTHCFLPPHPGPTAIATIFEANLGTTLLYGFIITIPTVIVAGPLFSKLLTRFEKAPPEGLFNPHLFSEEEMPSFWNSIFAAVIPVILMAIAAVCEITLPKTNTVRLFFEFVGNPAVALFIAIVIAIFTLGRRNGRTIEQIMDIIGDSIGAIAMIVFIIAGGGAFKQVLVDSGVGHYISHLMTGTTLSPLLMCWTVAALLRIALGSATVAAITTAGVVLPIINVTHADPALMVLATGAGSVIASHVNDPGFWLFKGYFNLTVGETLRTWTVMETLISIMGLLGVLAINAVLH

SEQ ID NO: 45522 - DNA, 1365 bp, Escherichia coli
  CDS (1)..(1365): transl_table=11
atgtccacaattacattgttatgcattgcgttagctggcgtaatcatgctgttgctgctggtcatcaaggcaaaggtacaaccattcgttgctctgctcctcgtcagcctgttagtcgcacttgcggcgggtataccggcgggcgaagtgggtaaagtgatgatcgccgggatgggcggtgtgcttggttccgtcactattattattggtctgggcgctatgctggggcgtatgatcgaacactctggtggtgcagagtcactggctaattatttcagtcgcaagttaggtgacaaacgaactatcgctgcgctgactctggcagcgttcttcctcggtattcccgtcttctttgatgtcggctttattattcttgcgccaatcatttacggttttgccaaggttgccaaaatatcgccactcaaatttggcctgcctgtcgctggaatcatgctaactgttcatgtggcggtaccgccgcatccaggccctgtcgccgcagcggggttactccacgcagacatcggctggctaaccatcatcggtattgcgatttctattcccgtagggattgttggctactttgcagcgaaaataatcaatacgcgccaatatgcgatgtcggtggaagtactggaacagatgcaactggctccggccagtgaggaaggcgcaacaaaattaagcgataaaataaatccaccgggcgtcgcgctggtcacctcgctaattgttattcctatcgcgattatcatggcgggtacggtttccgcaacactgatgccgccttcgcatcccctgcttggtacgctacagctgatcggctcaccaatggtagctctaatgattgcgctggtgctggcattctggttattggctttacgtcgcggctggagcttacaacacaccagcgacattatgggctcagcccttcccactgcggcggtagtgattttggttactggtgctggaggggtatttggcaaagtgctggtggaatcgggcgtcggcaaagcccttgccaatatgctacaaatgattgacctgcctctgttaccagccgcatttattatttcactggctctgcgtgcatcgcaggggtcagcaaccgtagcaatcctgacaaccggcgggttactctcagaagcggtgatgggattgaatccgattcagtgcgtattggtgacgctggcagcctgctttggtgggcttggcgcgtcacatattaatgactcagggttctggattgtgaccaaatatctggggttgtcggtagcagacggtctgaaaacctggacagtgttaacgaccattctcggttttaccggattcttaattacctggtgcgtatgggcggtaatttga

SEQ ID NO: 45523 - protein, 454 aa, Escherichia coli
MSTITLLCIALAGVIMLLLLVIKAKVQPFVALLLVSLLVALAAGIPAGEVGKVMIAGMGGVLGSVTIIIGLGAMLGRMIEHSGGAESLANYFSRKLGDKRTIAALTLAAFFLGIPVFFDVGFIILAPIIYGFAKVAKISPLKFGLPVAGIMLTVHVAVPPHPGPVAAAGLLHADIGWLTIIGIAISIPVGIVGYFAAKIINTRQYAMSVEVLEQMQLAPASEEGATKLSDKINPPGVALVTSLIVIPIAIIMAGTVSATLMPPSHPLLGTLQLIGSPMVALMIALVLAFWLLALRRGWSLQHTSDIMGSALPTAAVVILVTGAGGVFGKVLVESGVGKALANMLQMIDLPLLPAAFIISLALRASQGSATVAILTTGGLLSEAVMGLNPIQCVLVTLAACFGGLGASHINDSGFWIVTKYLGLSVADGLKTWTVLTTILGFTGFLITWCVWAVI

SEQ ID NO: 45524 - DNA, 1365 bp, Escherichia coli
  CDS (1)..(1365): transl_table=11
atgtccacaattacattgttatgcattgcgttagctggcgtaatcatgctgttgctactggtcatcaaggcaaaggtacaaccattcgttgctctgctcctcgtcagcctgttagtcgcacttgcggcgggtataccggcgggcgaagtgggtaaagtgatgatcgccgggatgggcggtgtgcttggttccgtcactattattattggtctgggcgctatgctggggcgtatgatcgaacactctggtggtgcagagtcactggctaattatttcagtcgcaagctaggtgacaaacgaactatcgctgcgctgactctggcagcgttcttcctcggtattcccgtcttctttgatgtcggctttattattcttgcgccaatcatttacggttttgccaaggttgccaaaatatcaccactcaaatttggcctgcctgtcgctgggatcatgctcactgttcacgtggcggtaccgccgcatccaggccctgtcgccgcagcggggttactccacgcagacatcggctggctaaccatcatcggtattgcgatttctattcccgtagggattgttggctactttgcagcgaaaataatcaataagcgccaatatgcgatgtcggtcgaggtactggaacagatgcaactggctccggccagtgaggaaggcgcgacaaaattaagcgataaaataaatccaccgggcgtcgcgctggtcacctcgctaattgttattcctatcgcgattatcatggcgggtacggtttccgcaacactgatgccgccttcgcatcccctgcttggtacgctacagctgatcggctcaccaatggtagctctaatgattgcgctggtgctggcattctggttattggctttacgtcgcggctggagcttacaacacaccagcgacattatgggctcagcccttcccactgcggcggtagtgattttggttactggtgctggaggggtatttggcaaagtgctggtggaatcgggcgtcggtaaagcccttgccaacatgttacaaatgattgacctgcctctgttaccagccgcatttattatttcactggcgctgcgtgcatcgcaggggtcagcaaccgtagcaatcctgacaaccggcgggttactctcagaagcggtgatgggattgaatccaattcagtgcgtattggtgacgctggcagcctgctttggtgggcttggcgcgtcacatattaatgactcagggttctggattgtgaccaaatatctggggttgtcggtagcagacgggctgaaaacctggacagtgttaacgaccattctcggttttaccggattcttaattacctggtgcgtatgggcggtaatttga

SEQ ID NO: 45525 - protein, 454 aa, Escherichia coli
MSTITLLCIALAGVIMLLLLVIKAKVQPFVALLLVSLLVALAAGIPAGEVGKVMIAGMGGVLGSVTIIIGLGAMLGRMIEHSGGAESLANYFSRKLGDKRTIAALTLAAFFLGIPVFFDVGFIILAPIIYGFAKVAKISPLKFGLPVAGIMLTVHVAVPPHPGPVAAAGLLHADIGWLTIIGIAISIPVGIVGYFAAKIINKRQYAMSVEVLEQMQLAPASEEGATKLSDKINPPGVALVTSLIVIPIAIIMAGTVSATLMPPSHPLLGTLQLIGSPMVALMIALVLAFWLLALRRGWSLQHTSDIMGSALPTAAVVILVTGAGGVFGKVLVESGVGKALANMLQMIDLPLLPAAFIISLALRASQGSATVAILTTGGLLSEAVMGLNPIQCVLVTLAACFGGLGASHINDSGFWIVTKYLGLSVADGLKTWTVLTTILGFTGFLITWCVWAVI

SEQ ID NO: 45526 - DNA, 1338 bp, Escherichia coli
  CDS (1)..(1338): transl_table=11
atgcactctcaaatctgggttgtgagcacgctgcttatcagcatcgtgttaattgtactgaccatcgtgaagttcaaattccacccgtttctggcgctgttgctggccagcttcttcgtgggaacgatgatgggcatggggccactggatatggtaaatgctattgaaagtggaattggcggaacgctggggttcctcgcagcggttatcggccttggcacgatactgggaaaaatgatggaagtatccggggccgcagaaagaattggtctgacacttcaacgctgccgctggctttcagttgatgtcattatggtgctggttggcctgatttgtggcatcacgctgtttgttgaagtgggcgtcgtgctattgattcctctggctttttcaattgccaaaaaaaccaatacctcattattaaagcttgccattccgctatgtaccgcattgatggcagtgcactgcgtggttcctccacatccggctgctttatatgttgccaataagctgggcgcagatatcggttcggtgatcgtctacggtttgctggttgggctgatggcatcactgatcggtggcccacttttccttaaatttctgggtcaacgactgccctttaaacctgtacccacagagtttgcagatctcaaagttcgcgatgaaaaaacactaccgtcattaggcgcaacgttattcaccatactgctacccattgcgctgatgttggttaaaacgattgccgaattgaatatggcgcgtgagagtggtttgtatatcttggttgagtttattggcaaccctatcactgccatgtttatcgccgtgtttgtcgcctattatgtgttgggtatacgccagcatatgagcatggggacgatgctcacacatacggaaaatggcttcggttctattgctaatattttgctgattatcggggccggaggcgcattcaacgccattttaaaaagcagcagtctcgctgatacgctggcagttattctctccaatatgcatatgcacccgattcttctggcctggttagtggctcttattctgcatgcggcagtgggctccgctaccgtggcaatgatgggggcaacggcaattgttgcacccatgctgccgctgtatcccgacatcagcccggaaattattgcgattgctatcggttcaggtgcaattggctgcactatcgttacggactcgcttttctggctagtgaagcaatattgcggcgctacgctcaatgaaacatttaaatactatacgacagcgacatttatcgcttcagtcgtcgctctggcgggcacattcctgctgtcatttatcatctaa

SEQ ID NO: 45527 - protein, 445 aa, Escherichia coli
MHSQIWVVSTLLISIVLIVLTIVKFKFHPFLALLLASFFVGTMMGMGPLDMVNAIESGIGGTLGFLAAVIGLGTILGKMMEVSGAAERIGLTLQRCRWLSVDVIMVLVGLICGITLFVEVGVVLLIPLAFSIAKKTNTSLLKLAIPLCTALMAVHCVVPPHPAALYVANKLGADIGSVIVYGLLVGLMASLIGGPLFLKFLGQRLPFKPVPTEFADLKVRDEKTLPSLGATLFTILLPIALMLVKTIAELNMARESGLYILVEFIGNPITAMFIAVFVAYYVLGIRQHMSMGTMLTHTENGFGSIANILLIIGAGGAFNAILKSSSLADTLAVILSNMHMHPILLAWLVALILHAAVGSATVAMMGATAIVAPMLPLYPDISPEIIAIAIGSGAIGCTIVTDSLFWLVKQYCGATLNETFKYYTTATFIASVVALAGTFLLSFII

SEQ ID NO: 45528 - DNA, 1347 bp, Bacillus licheniformis
  CDS (1)..(1347): transl_table=11
atgccattactgatcgtagcaatcgggattgtggcattattgcttttgattatggggttaaaactgaatacgtttgtttccttgattatcgtatcgttcggggttgcattggcgcttggaatgccgcttgacgacatcgtcaaaacgattgaagaaggccttggcggaacgctcggccatatcgcattgatcttcgggctcggcgccatgctgggcaggctgatcgcggattcagggggcgctcagcgcattgcgatgaccctcgtcaacaaattcggagaagaaaacatccaatgggcggtcgtcatcgcctcctttatcatcggggtagcattattcttcgaagtcgcattggtattattgattccaattgtattcgccatttcaaaagaattggagatatctatttcataccttggaattccaatgacggcggccttatccgtcacacacggcttcctgcccccgcatccgggaccgacggctatcgcgggagagctcggcgccaatatcggggaagtgctgctctacggtatcattgttgcaattccaaccgttcttttggccggacctttatttacgaaactggcgaaaaaaatcgtcccgcaatcatttgagaaaatgggcagcatcgcttcactcggtgagcagaaaacgttcaagcttgaagagacgcccggcttcggcatcagcgtcttcacagctatgcttccggtcattatcatgtctatttcgactgttattacgcttattcaagaaacgatgggccttgcagacaacagcctgctggcagcggttcgtttaatcgggaatgcctcgacttcgatggtcatctccctgttggtcgcgatctatacgatggggatcgccagaaagatcccgatcaaacaagtgatggattcctgttcaaccgccattacacaaatcggaatgatgctcttgatcatcgggggcggcggcgccttcaaacaagtcttgatcaatggcggagtaggcgactatgtagctgaattattcaaaggaacagccatgtcgccgatcttgctcgcctgggtcatcgccgcaattctgcgcatctccttaggatccgcgacagttgctgcattaagcacaaccggactcgttcttccgatgctcggacaaagcgatgtcaatcttgcgctggttgtgcttgcaacaggggccggaagtgtaatcgcttcccatgtcaatgacgcaggcttctggatgttcaaagagtatttcggactaagcatgaaagagacatttgccacctggacactgcttgaaaccattatcgcggtggccggattaggatttactttattgttaagcctatttgtataa

SEQ ID NO: 45529 - protein, 448 aa, Bacillus licheniformis
MPLLIVAIGIVALLLLIMGLKLNTFVSLIIVSFGVALALGMPLDDIVKTIEEGLGGTLGHIALIFGLGAMLGRLIADSGGAQRIAMTLVNKFGEENIQWAVVIASFIIGVALFFEVALVLLIPIVFAISKELEISISYLGIPMTAALSVTHGFLPPHPGPTAIAGELGANIGEVLLYGIIVAIPTVLLAGPLFTKLAKKIVPQSFEKMGSIASLGEQKTFKLEETPGFGISVFTAMLPVIIMSISTVITLIQETMGLADNSLLAAVRLIGNASTSMVISLLVAIYTMGIARKIPIKQVMDSCSTAITQIGMMLLIIGGGGAFKQVLINGGVGDYVAELFKGTAMSPILLAWVIAAILRISLGSATVAALSTTGLVLPMLGQSDVNLALVVLATGAGSVIASHVNDAGFWMFKEYFGLSMKETFATWTLLETIIAVAGLGFTLLLSLFV

SEQ ID NO: 45530 - DNA, 1347 bp, Bacillus subtilis
  CDS (1)..(1347): transl_table=11
atgccgttaatcatcgttgcacttgggatcttagcattactatttctgattatgggcttaaaattaaacacatttatttccctgctggtcgtatcgttcggcgtggcactggcactcgggatgccgttcgataaagttgtcagctccatcgaagcaggaataggggggactcttggccacatcgcgctcatcttcggactcggtgcgatgctgggcaaactgatcgcggattcaggaggcgcacagcgcattgcgatgacgctcgtcaacaaattcggtgagaaaaatattcaatgggccgttgtcattgcctcattcattattgggattgcgttattttttgaagtaggactggttctattaattccgattgtctttgcgatttcaagagaattgaagatttctattttatttctcggaatcccgatggtcgcggcactatccgtcacacacggtttcctgccgccgcacccgggacctacggcgatcgccggtgagtatggcgcaaacattggagaagtgctgctgtacggctttatcgttgctgttccgacagtgctcattgcagggccgttatttacaaagttcgcgaaaaaaatcgttcctgcatcatttgcgaaaaacggcaatattgcatcactcggcacacaaaaaacatttaaccttgaagaaacacccggctttggaatcagtgtctttactgcaatgctcccgattatcatcatgtcggtcgcgaccattatcgacctgcttcaagaaacaatcgggtttgcagataacggagttttagcttttatcagattgattggaaacgcatcgactgctatgattatttcgttattggtcgcagtctatacaatgggcatcaagcgcaacattccagtcaaaaccgtgatggattcttgttcaactgccatttcacaaatcggcatgatgcttttgatcatcggaggaggcggcgccttcaaacaagtgctgatcaacggcggtgtcggcgattacgtagcagacttattcaaaggaacggcattatcgccaatcattctggcatggctcatcgcagcgatcctgcgcatttctctaggatcggcgactgttgccgcactaagcacaacaggtctggtcattccgttattgggccattctgatgttaacctggcgttagtcgtactcgcaacaggagccggaagtgtcatcgcttcacacgtcaatgacgccggcttctggatgttcaaggaatacttcggattaagcatgaaagaaacattcgccacatggacattgctggaaaccattatttccgttgctggactgggattcattttattgttaagtttagttgtatga

SEQ ID NO: 45531 - protein, 448 aa, Bacillus subtilis
MPLIIVALGILALLFLIMGLKLNTFISLLVVSFGVALALGMPFDKVVSSIEAGIGGTLGHIALIFGLGAMLGKLIADSGGAQRIAMTLVNKFGEKNIQWAVVIASFIIGIALFFEVGLVLLIPIVFAISRELKISILFLGIPMVAALSVTHGFLPPHPGPTAIAGEYGANIGEVLLYGFIVAVPTVLIAGPLFTKFAKKIVPASFAKNGNIASLGTQKTFNLEETPGFGISVFTAMLPIIIMSVATIIDLLQETIGFADNGVLAFIRLIGNASTAMIISLLVAVYTMGIKRNIPVKTVMDSCSTAISQIGMMLLIIGGGGAFKQVLINGGVGDYVADLFKGTALSPIILAWLIAAILRISLGSATVAALSTTGLVIPLLGHSDVNLALVVLATGAGSVIASHVNDAGFWMFKEYFGLSMKETFATWTLLETIISVAGLGFILLLSLVV

SEQ ID NO: 45532 - DNA, 1356 bp, Zymomonas mobilis
  CDS (1)..(1356): transl_table=11
atgcactctaatggaacaatgctccttttatatgcattggcgtccatcatcattcttattttgatgattgcaaagtggcgtctaaacccttttgtttcccttattttagtttcaatcggtatgggtgccgtaacgggcatgcccttaaccaaagttttgtcggcctttcaagatggtcttggttctggtatcggttccacagcgagtgttatcgcactcggcaccatgcttggtaagatcttggctgagtctggtggtgcggaacgtatcgctacgacgacgatcaaaatctttggccccaaacttatccactgggcgatgctggtcattgcctttatcgtgggtattccgatcttctatcaggtcggttttatcctgttgattccgctcgtctttaccttaggacgtgccagcgggatttctcttgtcaaattaaccattccgctttgtgccggtttggcgaccgttcatggtttgctgcctccgcatccgggttcaatgcaatgcgttgaaatgctccatgctgatgtgggtaaaaccattctttacggtttcatcgtcggtttccctgccgctatccttgccggtccgctttacggcaattggattacgcctcgcattcagctgcctgcccacaacccatttgcagaaagtcttgaaggtagcagcgatcaggataaaaatttgccgggtttctggctgacgattttctcgattttgcttcctgttttgctgatggttttttccagcggcgccaatatcttcctgccccacggtaacaacattcgcgctttcatgaacttcatgggtgatccggttgtttccttgcttatcgctttgctggtcagcatggtcaccttgggtttctggcgtggtttcagcagtgctgatcttctgaaattcaccaatgactgcttgggcccgacggctggcattctgttgctgatcggtgctggtggcggatttagtgaaattctgtatcgcgccggtgtcagtaacgccatggccgatctgtctcacgtcatgcatctgtccccgattatgctcggctttatcattgcggcggttatccgcgttgcaaccggttcacagacggtggcaatgtcgatgtccggcggtatgttagccccgatcatcttcagcaccccgggcttccacagccctgaattgctggttctttcgatcggtgccggttcgtccattctgtctcacgtcaatgacggtgctttctggctgttaaaagaatatctgaatatgacggtcagccagaccttcaagacctggacggtttctgtcaccatcgcttcgattgcagccctgatcctcacctttggtcttcaggcattgggtctttaa

SEQ ID NO: 45533 - protein, 451 aa, Zymomonas mobilis
MHSNGTMLLLYALASIIILILMIAKWRLNPFVSLILVSIGMGAVTGMPLTKVLSAFQDGLGSGIGSTASVIALGTMLGKILAESGGAERIATTTIKIFGPKLIHWAMLVIAFIVGIPIFYQVGFILLIPLVFTLGRASGISLVKLTIPLCAGLATVHGLLPPHPGSMQCVEMLHADVGKTILYGFIVGFPAAILAGPLYGNWITPRIQLPAHNPFAESLEGSSDQDKNLPGFWLTIFSILLPVLLMVFSSGANIFLPHGNNIRAFMNFMGDPVVSLLIALLVSMVTLGFWRGFSSADLLKFTNDCLGPTAGILLLIGAGGGFSEILYRAGVSNAMADLSHVMHLSPIMLGFIIAAVIRVATGSQTVAMSMSGGMLAPIIFSTPGFHSPELLVLSIGAGSSILSHVNDGAFWLLKEYLNMTVSQTFKTWTVSVTIASIAALILTFGLQALGL

SEQ ID NO: 45534 - DNA, 1317 bp, Escherichia coli
  CDS (1)..(1317): transl_table=11
atgccattagtcattgttgctatcggtgtaatcttgttgttgctcctgatgatccgcttcaaaatgaacggcttcatcgctctcgtcctcgtggcgcttgctgttggattaatgcaaggaatgccgctggataaagttattggctccatcaaagccggtgtcggcgggacgctcggtagccttgccctgatcatgggttttggcgcaatgctgggcaaaatgctggcagactgcggtggcgcacaacgtatcgccaccacgctgattgccaaatttggtaaaaaacacatccagtgggcggtggtactgaccggttttaccgttggttttgccctgttctatgaagtgggctttgtgctgatgctgccgctggtgtttaccatcgcggcttctgcgaatattccactgctgtatgttggtgtaccaatggcggctgcactgtctgtgacccacggcttcctgccaccgcatccgggtccgactgcgattgccaccattttcaatgccgatatgggtaaaaccctgctgtacggtactattctggcaatcccgaccgtgattctcgccggtccggtttacgctcgcgtgttgaaaggtatcgataagccaattccggaaggtctctacagcgcgaaaaccttcagcgaagaagagatgccgagctttggcgtcagcgtctggacctctctggtgccggtagtactgatggcgatgcgtgcgattgccgaaatgatcctgccgaaaggtcacgctttcctgccggtagcggagttcctcggtgacccggtaatggcaacgctgattgccgtgctgattgcgatgttcacctttggtctaaaccgtggtcgttcaatggatcagattaacgacacgctggtttcttccatcaaaatcattgcgatgatgctgttgatcatcggtggtggcggtgcgttcaagcaggtgctggtagacagcggcgtggacaaatacattgcttccatgatgcacgaaaccaacatttctccgctgctgatggcctggtcgattgctgccgtactgcgtatcgcgctgggttccgcaaccgttgcggcaatcactgcgggtggtatcgcggcaccgctgattgcaacgacgggtgttagcccggagctgatggttattgcggttggttccggtagtgtgattttctctcatgtgaacgatccgggcttctggctgttcaaagagtactttaacctgactatcggcgagaccatcaaatcctggtcgatgctggaaaccattatctcggtgtgcggtctggtaggctgtctgctgctgaatatggtgatttga

SEQ ID NO: 45535 - protein, 438 aa, Escherichia coli
MPLVIVAIGVILLLLLMIRFKMNGFIALVLVALAVGLMQGMPLDKVIGSIKAGVGGTLGSLALIMGFGAMLGKMLADCGGAQRIATTLIAKFGKKHIQWAVVLTGFTVGFALFYEVGFVLMLPLVFTIAASANIPLLYVGVPMAAALSVTHGFLPPHPGPTAIATIFNADMGKTLLYGTILAIPTVILAGPVYARVLKGIDKPIPEGLYSAKTFSEEEMPSFGVSVWTSLVPVVLMAMRAIAEMILPKGHAFLPVAEFLGDPVMATLIAVLIAMFTFGLNRGRSMDQINDTLVSSIKIIAMMLLIIGGGGAFKQVLVDSGVDKYIASMMHETNISPLLMAWSIAAVLRIALGSATVAAITAGGIAAPLIATTGVSPELMVIAVGSGSVIFSHVNDPGFWLFKEYFNLTIGETIKSWSMLETIISVCGLVGCLLLNMVI

SEQ ID NO: 45536 - DNA, 1341 bp, Escherichia coli O157
  CDS (1)..(1341): transl_table=11
gtgactacattaacgcttgttttaacagcagtagggtctgttttactgctgctgtttttagtcatgaaggcgcgtatgcacgctttcctggctttaatggtggtgtccatgggggctggccttttttccggtatgccgctcgataaaatcgcagcgacgatggaaaaagggatgggaggcaccctcggcttcctggcggtggttgtcgccctgggagctatgtttggcaagatcttacatgaaaccggcgcagtcgatcagattgccgtcaaaatgcttaaatccttcggtcacagccgcgcgcattatgccatcggccttgcggggctggtctgtgcgctaccgctgttctttgaagtggcgattgttctgctgattagcgttgctttctcaatggcgcgccacaccggtacgaacctggtgaagctggtaatcccattattcgcaggcgtggcggccgcggcggcgttcctggtgccagggccagcgccaatgctgctggcatcgcagatgaacgccgattttggctggatgatcctgattggcctgtgtgcggcaattccgggaatgattattgccgggccgctgtggggtaacttcatcagccgttacgttgagctgcatattcctgacgacatcagcgaaccgcatctcggcgaaggcaaaatgccatccttcggattcagcctgtcgctgatcctgctgccgctggtgctggtagggctgaaaaccattgccgcgcgttttgtgccggaaggctctaccgcttacgaatggttcgagtttattggtcatccgtttaccgcgattctggttgcttgtctggtagcgatttatggcctggcaatgcgtcagggcatgccaaaagacaaagtgatggagatttgcggtcacgcgctgcaaccggcggggatcattctgctggtgattggtgcgggcggcgtgttcaaacaggtgctggttgactctggcgtaggtccggcactgggcgaagcgttaaccggcatgggcctgccgattgccatcacctgcttcgtgctggccgctgcagtgcgcatcattcagggttctgcaaccgttgcctgtttaacggcggtgggactggtgatgccggttattgaacaactgaactactccggtgcgcaaatggcggcgctgtcgatttgtatcgccggtggttcgattgttgtcagccacgttaacgacgctggtttctggttgttcggtaaatttaccggcgcgaccgaagccgaaacgctgaaaacctggaccatgatggaaaccatcctcggcactgtcggtgccatcgttgggatgattgcgttccagctgttgagttaa

SEQ ID NO: 45537 - protein, 446 aa, Escherichia coli O157
MTTLTLVLTAVGSVLLLLFLVMKARMHAFLALMVVSMGAGLFSGMPLDKIAATMEKGMGGTLGFLAVVVALGAMFGKILHETGAVDQIAVKMLKSFGHSRAHYAIGLAGLVCALPLFFEVAIVLLISVAFSMARHTGTNLVKLVIPLFAGVAAAAAFLVPGPAPMLLASQMNADFGWMILIGLCAAIPGMIIAGPLWGNFISRYVELHIPDDISEPHLGEGKMPSFGFSLSLILLPLVLVGLKTIAARFVPEGSTAYEWFEFIGHPFTAILVACLVAIYGLAMRQGMPKDKVMEICGHALQPAGIILLVIGAGGVFKQVLVDSGVGPALGEALTGMGLPIAITCFVLAAAVRIIQGSATVACLTAVGLVMPVIEQLNYSGAQMAALSICIAGGSIVVSHVNDAGFWLFGKFTGATEAETLKTWTMMETILGTVGAIVGMIAFQLLS

SEQ ID NO: 45538 - DNA, 1353 bp, Pseudomonas aeruginosa
  CDS (1)..(1353): transl_table=11
atgttcggcatgtcacacgatgcctacctgctcctcgacgccctggtgaccatcatcggcctgatcgtgctgatcacccgcttcaaggtgcatcccttcatcgccctgatcatcgccgccggcttcctcggcctgacctcggggatgccggtggagaagatcgtcaaatccttccaggacggcttcggcggcgtgctcggcttcgtcggcgtgatcctcgccctgggcaccatgctcggcaagctgatggccgattccggcggcgccgaccagatcgcccgcaccctgatccgcgccttcggcaaggagcgggtgcactggtcgatgatgctcgccgcgttcctggtgggcatcccgctgttcttcgagatcggcttcatcctgctgatcccgctggtgttcatcgtcgcccggcgcagcggcgtgtccctgatcaagatcggcatcccgttgctcgccggcctttccgcggtgcacggtctggtgccgccgcatcccggcccgctgctggcgatcggcgtgttcggcgccgacatcggcaagaccatcctctacggcctgatcgtcgccctgcccaccgccgccatcgccggcccgctgttcggcgcgctggtctcgcgctacatacccggcacgccatcggcggaactggtcgagcagatcgcccacgagcccgagacccaggacctgcccagcttcggcgtgaccctggcgaccgtgctgctgccggtgttcctgatgctgctgaagaccttcgccgacgtcgccttccccgatggccacgcgttccgcgcctggatggacatgatcggccatccgatcagcgccctgctcctggccctgctggtggcgctctataccttcggctacgcccgtggcttcgactcgaagaaaatcctcaggctgctcgaccagagcctggcaccgaccgccgccatcgtgatgatcatcggcgccggcggcggcttcaagcagatgctggtggccagcggggtcggcgacgtcatcggccatctcgcggtgaacgcgcagatctcgccgatcctgctggcctggctggtggccgcggtgatccgcatcgccaccggctcggccaccgtcgccaccatcaccggggccggcatcgtggtgccggtgatcgacctgattcccggcgtcaaccgcgagttgctggtgctcgccaccggcgccggctcgctgatcctctcccatgtcaacgacgccgggttctggctggtcaagcagtacttcaacatgagcgtcagcgagaccttcaagacctggaccgcgatggagaccatcctctccgtggtcggcctggtcttcatcctgttgctgtcgctggtgctctga

SEQ ID NO: 45539 - protein, 450 aa, Pseudomonas aeruginosa
MFGMSHDAYLLLDALVTIIGLIVLITRFKVHPFIALIIAAGFLGLTSGMPVEKIVKSFQDGFGGVLGFVGVILALGTMLGKLMADSGGADQIARTLIRAFGKERVHWSMMLAAFLVGIPLFFEIGFILLIPLVFIVARRSGVSLIKIGIPLLAGLSAVHGLVPPHPGPLLAIGVFGADIGKTILYGLIVALPTAAIAGPLFGALVSRYIPGTPSAELVEQIAHEPETQDLPSFGVTLATVLLPVFLMLLKTFADVAFPDGHAFRAWMDMIGHPISALLLALLVALYTFGYARGFDSKKILRLLDQSLAPTAAIVMIIGAGGGFKQMLVASGVGDVIGHLAVNAQISPILLAWLVAAVIRIATGSATVATITGAGIVVPVIDLIPGVNRELLVLATGAGSLILSHVNDAGFWLVKQYFNMSVSETFKTWTAMETILSVVGLVFILLLSLVL

SEQ ID NO: 45540 - DNA, 1320 bp, Escherichia coli
  CDS (1)..(1320): transl_table=11
atgccattaatcattattgcggcaggcgtcgcgctgcttcttatcctgatgatcggctttaaagttaacggctttattgccctcgttctggtagctgccgtcgtcggatttgccgaagggatggatgcacaggccgtcctgcactctatacaaaatggtatcggcagcacgctcggcgggctggcaatgatcctcggtttcggggccatgttaggcaagctgatttctgatacgggtgcggcacaacgtatcgccactacgctgattgctacttttggtaaaaaacgcgtgcaatgggcgctagtgatcaccggtctggttgtgggcctcgccatgttttttgaagtgggttttgtcctgctgttgccgttggtatttaccatcgtagcatcatcaggattacccctgttgtatgttggcgtaccaatggtagcagcgctctctgtaacccactgttttctgccgccacatccagggcctactgccatcgcgactatctttgaggctaatctcggaacgactttactgtatggatttatcattaccattccgacagttattgtcgcaggaccgctgttttctaaactgctaactcgctttgagaaagcaccaccggaaggcttatttaatcctcatctgtttagcgaagaggagatgccctccttctggaacagtattttcgctgccgtgatcccggtcatcctgatggctatcgccgccgtttgtgaaattacgttaccgaaaactaacaccgtgcgcctcttctttgaatttgtcggtaaccctgccgttgcgctgtttattgccattgttattgcgattttcacactgggccgacgtaatggacgcaccatcgagcaaatcatggatatcattggggattctataggcgctatcgcgatgattgtgtttattatcgctggcggcggcgcgtttaagcaggtattagtagatagcggtgtcgggcactatatttcacacttaatgaccggaactacactttcgccgttattgatgtgctggactgttgcggcgctgttgcgtatcgctctgggctctgccaccgtcgcggccattaccaccgcgggtgtggtgttgccgattatcaacgttacccatgccgatcccgctttaatggtactggcaaccggtgcgggcagcgtgatcgcgtcacacgtaaacgaccctggcttctggctatttaaagggtattttaatctgacggttggtgaaacgttgcgtacctggacggtgatggaaacccttatttctattatgggtttgctgggcgtgttagccattaacgccgtattgcactga

SEQ ID NO: 45541 - protein, 439 aa, Escherichia coli
MPLIIIAAGVALLLILMIGFKVNGFIALVLVAAVVGFAEGMDAQAVLHSIQNGIGSTLGGLAMILGFGAMLGKLISDTGAAQRIATTLIATFGKKRVQWALVITGLVVGLAMFFEVGFVLLLPLVFTIVASSGLPLLYVGVPMVAALSVTHCFLPPHPGPTAIATIFEANLGTTLLYGFIITIPTVIVAGPLFSKLLTRFEKAPPEGLFNPHLFSEEEMPSFWNSIFAAVIPVILMAIAAVCEITLPKTNTVRLFFEFVGNPAVALFIAIVIAIFTLGRRNGRTIEQIMDIIGDSIGAIAMIVFIIAGGGAFKQVLVDSGVGHYISHLMTGTTLSPLLMCWTVAALLRIALGSATVAAITTAGVVLPIINVTHADPALMVLATGAGSVIASHVNDPGFWLFKGYFNLTVGETLRTWTVMETLISIMGLLGVLAINAVLH

SEQ ID NO: 45542 - DNA, 1365 bp, Escherichia coli
  CDS (1)..(1365): transl_table=11
atgtccacaattacattgttatgcattgcgttagctggcgtaatcatgctgttgctgctggtcatcaaggcaaaggtacaaccattcgttgctttgctcctcgtcagcctgttagtcgcacttgcggcaggtataccggcgggcgaagtgggtaaagtgatgatcgccgggatgggcggtgtgcttggttccgtcactattattattggtctgggcgctatgctggggcgtatgatcgaacactctggtggtgcagagtcactggctaattatttcagtcgcaagttaggtgacaaacgaactatcgctgcgctgactctggcagcgttcttcctcggtattcccgtcttctttgatgtcggctttattattcttgcgccaatcatttacggttttgccaaggttgccaaaatatcgccactcaaatttggcctgcctgtcgctgggatcatgctcactgttcacgtggcggtaccgccgcatccaggccctgtcgccgcagcggggttactccacgcagacatcggctggctaaccatcatcggtattgcgatttctattcccgtaggggttgttggctactttgcagcgaaaataatcaataagcgccaatatgcgatgtcagtagaagtactggaacagatgcaactggctccggccagtgaggaaggcgcgacaaaattaagcgataaaataaatccaccgggcgtcgcgctggtcacctcgctaattgttattcctatcgcgattatcatggcgggtacggtttccgcaacactgatgccgccttcgcatcccctgcttggtacgctacagctgatcggctcaccaatggtagctctaatgattgcgctggtgctggcattctggttattggctttacgtcgcggctggagcttacaacacaccagcgacattatgggctcagcgcttcctactgcggcggtagtgattttggttactggtgctggaggggtatttggcaaagtgctggtggaatcgggcgtcggcaaagcccttgccaacatgctacaaatgattgacctgcctctgttaccagccgcatttattatttcactggcgctgcgtgcatcgcaggggtcagcaaccgtagcaatactgacaaccggcgggttactctcagaagcggtgatgggattgaatccgattcagtgcgtattggtgacgctggcagcctgctttggtgggcttggtgcgtcacatattaatgactcagggttctggattgtgaccaaatatctggggttgtcggtagcagacggtctgaaaacctggacagtgttaacgaccattctcggttttaccggattcttaattacctggtgcgtatgggcggtaatttga

SEQ ID NO: 45543 - protein, 454 aa, Escherichia coli
MSTITLLCIALAGVIMLLLLVIKAKVQPFVALLLVSLLVALAAGIPAGEVGKVMIAGMGGVLGSVTIIIGLGAMLGRMIEHSGGAESLANYFSRKLGDKRTIAALTLAAFFLGIPVFFDVGFIILAPIIYGFAKVAKISPLKFGLPVAGIMLTVHVAVPPHPGPVAAAGLLHADIGWLTIIGIAISIPVGVVGYFAAKIINKRQYAMSVEVLEQMQLAPASEEGATKLSDKINPPGVALVTSLIVIPIAIIMAGTVSATLMPPSHPLLGTLQLIGSPMVALMIALVLAFWLLALRRGWSLQHTSDIMGSALPTAAVVILVTGAGGVFGKVLVESGVGKALANMLQMIDLPLLPAAFIISLALRASQGSATVAILTTGGLLSEAVMGLNPIQCVLVTLAACFGGLGASHINDSGFWIVTKYLGLSVADGLKTWTVLTTILGFTGFLITWCVWAVI

SEQ ID NO: 45544 - DNA, 1350 bp, Escherichia coli
  CDS (1)..(1350): transl_table=11
atgccactaattatcgttgtggcagggattgctttactcctgcttttaaccataaaaattaagcttaatacgtttgtttcgttaattattgtctcgattgctgtcgccatcgccagtggtatggatttgagtaaagtcgtcacctcagtcgaatccggacttggcggtacgctgggccatattggtttgatatttggcttcggtgttatgctcggtcgcttgctggccgatgcgggtggtgcgcagcgaatagcgctgaccatgctgaattatttcgggaaaaataaacttgactgggcagtggtctgttcggcgtttattgtcggtatcgcactttttttcgaagtcggtttaattcttctggtacctattttattcgctattgcccgtgaagcaaaaatatcaccgatgtttatgtgtgtgccgatgctttctggtttgctggtcgcacacggttttttgccgccgcaccccggcccgactgttatcgccagggaatatggcgctgatgtaggattggtactgatatacggtatcattgtcggcattccaacctttattctttgcggcccggtattgaataaattctgccagcgcattattccggacgcctttaaaaaagaggggaatatagcctctctcggcgcgacccgccgattcagcgaaagcgaaatgccaggctttgggatcagttttctcacggcaatgctgccggtgatcctgatggcggttgtcaccatcatccagatgactcatgccaaaagtgccgcggattcaggcttattttacaacgtgatactgttcttaggtaattcaacgatcgccatgctgatttcactgctattcgcgatctataccatgggcctggggcgcgggaaaacaatccctgacctgatggattcttgcggaaaagctatcgcgggtattgccggtctgctgctgattatcggtggtggtggtgcattcaagcaagttctcatcgactctggcgttggtcagtatatttccaccctggtttcgggtatggatattaacccgatcctgatggcctggggcgtggccgcattcctgcgtatttgtctgggttcagccaccgtcgcggcgatctctaccgccggtctggtcatcccattgttggcagtacatcccaataccaacctggccttgattacgctggctaccggtgccggatcctgtatttgttctcacgttaacgatgccagtttctggatgattaaagacttttttggcctgaccaccaaagaaacgctgttatcctggacgctgatgtccacactcttatccatcagtgggctgatttttattctgctcgccagcttagttttataa

SEQ ID NO: 45545 - protein, 449 aa, Escherichia coli
MPLIIVVAGIALLLLLTIKIKLNTFVSLIIVSIAVAIASGMDLSKVVTSVESGLGGTLGHIGLIFGFGVMLGRLLADAGGAQRIALTMLNYFGKNKLDWAVVCSAFIVGIALFFEVGLILLVPILFAIAREAKISPMFMCVPMLSGLLVAHGFLPPHPGPTVIAREYGADVGLVLIYGIIVGIPTFILCGPVLNKFCQRIIPDAFKKEGNIASLGATRRFSESEMPGFGISFLTAMLPVILMAVVTIIQMTHAKSAADSGLFYNVILFLGNSTIAMLISLLFAIYTMGLGRGKTIPDLMDSCGKAIAGIAGLLLIIGGGGAFKQVLIDSGVGQYISTLVSGMDINPILMAWGVAAFLRICLGSATVAAISTAGLVIPLLAVHPNTNLALITLATGAGSCICSHVNDASFWMIKDFFGLTTKETLLSWTLMSTLLSISGLIFILLASLVL

SEQ ID NO: 45546 - DNA, 1335 bp, Bacillus subtilis
  CDS (1)..(1335): transl_table=11
atgccgattttaattgtagctgtcggagtgctgattctgttatttctcattattaaagtaaaattaaatacctttgtctcactgattgtcgtttcatttttagtagccatcggacttggaatggatatcaataaaattgttctttcaattgagactggaattggcgggcagctggggcatttagctttagtgtttggacttggcgcgatgcttgggaggcttgtctcagatgctgggggcggctaccggatcgccattacgctgattgacaaattcgggaggaaacgaatacaggcggcggttgtggttgcctcttttatcatcgggattgccctattttttgaagtcggtcttgttctgttgataccgattgtttacgcgattgctaaagaattaaaaatgccttttctgtatctgggaatcccgatggccgccgccttaaatgttactcacggatttttgcccccgcatcctgctccaactgctatctcagttgcatatggtgcccatattggccaggtgctgctttttggaatcatcatcgctgttccgacaactgtgattgccgggcctttatttaataaatttgcgatgaaacggtttcctggtgcgtatcaaaagcatggaaacctatcggggttaggaccaaggaaagaatttcagctggatgaaacaccgggctttgcgatcagtgctgtcacgtctttattcccggttatctttatggcaatggcaacaattttttctttattattgagtgaacattcaaaaggaaaagacattatagaatttatcggcactccgggaacggcaatgctcatttcgctgttgcttgcactctatacgatgggatatgcccgtaaaatatctatgcaggaaatcggcagatctatttcagaatcaatttcgcaaattgcgatgatgctgctcatcataggagggggaggagcgtttaaacaggtgctgattgacggcggagtcggcgattatgtcgctgattttttccgtcaaacaaacatgtcgccgctattcgttgcatggaccatcgccgcggttctgcgtctgtgtctaggctctgctaccgtggctgcgcttaccacagcgggaatggcagctccgcttatggaggctggcagtgtaaaccctgcgttaatggtgcttgcaacaggagccggcagtgtcattgcgtgtcatgtaaatgatgcaggattttggatggtaaaggaatttttcggcttgagcatgaaagaaacatttcaaacctggacgctgcttacaacagttctttcggttacagggctcggctgtgtgttattggcagggcttgtgatgtaa

SEQ ID NO: 45547 - protein, 444 aa, Bacillus subtilis
MPILIVAVGVLILLFLIIKVKLNTFVSLIVVSFLVAIGLGMDINKIVLSIETGIGGQLGHLALVFGLGAMLGRLVSDAGGGYRIAITLIDKFGRKRIQAAVVVASFIIGIALFFEVGLVLLIPIVYAIAKELKMPFLYLGIPMAAALNVTHGFLPPHPAPTAISVAYGAHIGQVLLFGIIIAVPTTVIAGPLFNKFAMKRFPGAYQKHGNLSGLGPRKEFQLDETPGFAISAVTSLFPVIFMAMATIFSLLLSEHSKGKDIIEFIGTPGTAMLISLLLALYTMGYARKISMQEIGRSISESISQIAMMLLIIGGGGAFKQVLIDGGVGDYVADFFRQTNMSPLFVAWTIAAVLRLCLGSATVAALTTAGMAAPLMEAGSVNPALMVLATGAGSVIACHVNDAGFWMVKEFFGLSMKETFQTWTLLTTVLSVTGLGCVLLAGLVM

SEQ ID NO: 45548 - DNA, 24 bp, Artificial sequence
  primer
atgcatgtgcttaacattctctgg

SEQ ID NO: 45549 - DNA, 25 bp, Artificial sequence
  primer
ttacgctaccatgctaataatcagc

SEQ ID NO: 45550 - protein, 481 aa, Artificial sequence
  consensus sequence
  Variant (2)..(5): Xaa in position 2 to 5 is any amino acid
  Variant (7)..(9): Xaa in position 7 to 9 is any amino acid
  Variant (11)..(12): Xaa in position 11 to 12 is any amino acid
  Variant (14)..(24): Xaa in position 14 to 24 is any amino acid
  Variant (26)..(37): Xaa in position 26 to 37 is any amino acid
  Variant (38)..(46): Xaa in position 38 to 46 is any or no amino acid
  Variant (48)..(48): Xaa in position 48 is any amino acid
  Variant (50)..(51): Xaa in position 50 to 51 is any amino acid
  Variant (54)..(61): Xaa in position 54 to 61 is any amino acid
  Variant (63)..(63): Xaa in position 63 is any amino acid
  Variant (65)..(65): Xaa in position 65 is any amino acid
  Variant (67)..(72): Xaa in position 67 to 72 is any amino acid
  Variant (74)..(74): Xaa in position 74 is any amino acid
  Variant (76)..(78): Xaa in position 76 to 78 is any amino acid
  Variant (80)..(86): Xaa in position 80 to 86 is any amino acid
  Variant (88)..(93): Xaa in position 88 to 93 is any amino acid
  Variant (95)..(102): Xaa in position 95 to 102 is any amino acid
  Variant (104)..(106): Xaa in position 104 to 106 is any amino acid
  Variant (108)..(110): Xaa in position 108 to 110 is any amino acid
  Variant (112)..(116): Xaa in position 112 to 116 is any amino acid
  Variant (118)..(135): Xaa in position 118 to 135 is any amino acid
  Variant (136)..(142): Xaa in position 136 to 142 is any or no amino acid
  Variant (144)..(151): Xaa in position 144 to 151 is any amino acid
  Variant (153)..(155): Xaa in position 153 to 155 is any amino acid
  Variant (160)..(160): Xaa in position 160 is any amino acid
  Variant (162)..(169): Xaa in position 162 to 169 is any amino acid
  Variant (171)..(172): Xaa in position 171 to 172 is any amino acid
  Variant (173)..(174): Xaa in position 173 to 174 is any or no amino acid
  Variant (176)..(180): Xaa in position 176 to 180 is any amino acid
  Variant (182)..(186): Xaa in position 182 to 186 is any amino acid
  Variant (188)..(221): Xaa in position 188 to 221 is any amino acid
  Variant (222)..(249): Xaa in position 222 to 249 is any or no amino acid
  Variant (251)..(261): Xaa in position 251 to 261 is any amino acid
  Variant (263)..(264): Xaa in position 263 to 264 is any amino acid
  Variant (266)..(286): Xaa in position 266 to 286 is any amino acid
  Variant (287)..(317): Xaa in position 287 to 317 is any or no amino acid
  Variant (319)..(322): Xaa in position 319 to 322 is any amino acid
  Variant (324)..(359): Xaa in position 324 to 359 is any amino acid
  Variant (360)..(361): Xaa in position 360 to 361 is any or no amino acid
  Variant (363)..(364): Xaa in position 363 to 364 is any amino acid
  Variant (366)..(366): Xaa in position 366 is any amino acid
  Variant (369)..(369): Xaa in position 369 is any amino acid
  Variant (371)..(373): Xaa in position 371 to 373 is any amino acid
  Variant (375)..(377): Xaa in position 375 to 377 is any amino acid
  Variant (379)..(400): Xaa in position 379 to 400 is any amino acid
  Variant (401)..(401): Xaa in position 401 is any or no amino acid
  Variant (403)..(405): Xaa in position 403 to 405 is any amino acid
  Variant (407)..(409): Xaa in position 407 to 409 is any amino acid
  Variant (416)..(417): Xaa in position 416 to 417 is any amino acid
  Variant (419)..(424): Xaa in position 419 to 424 is any amino acid
  Variant (426)..(439): Xaa in position 426 to 439 is any amino acid
  Variant (440)..(445): Xaa in position 440 to 445 is any or no amino acid
  Variant (447)..(449): Xaa in position 447 to 449 is any amino acid
  Variant (451)..(454): Xaa in position 451 to 454 is any amino acid
  Variant (457)..(457): Xaa in position 457 is any amino acid
  Variant (460)..(461): Xaa in position 460 to 461 is any amino acid
  Variant (464)..(479): Xaa in position 464 to 479 is any amino acid
  Variant (480)..(480): Xaa in position 480 is any or no amino acid
LXXXXKXXXFXXLXXXXXXXXXXXGXXXXXXXXXXXXXXXXXXXXXGXGXXLGXXXXXXXXGXMXGXXXXXXGXAXXXAXXXXXXXGXXXXXXAXXXXXXXXGXXXFXXXGXXXXXPXXXXXXXXXXXXXXXXXXXXXXXXXPXXXXXXXXHXXXPPHPXPXXXXXXXXAXXXXGXXXXXGXXXXXPXXXXXXXXXXXXXXXXXXXXXXXXXXXXXXXXXXXXXXXXXXXXXXXXXXXXXXXXXXXXXXPXXXXXXXXXXXPXXLXXXXXXXXXXXXXXXXXXXXXXXXXXXXXXXXXXXXXXXXXXXXXXXXXXXXGXXXXAXXXXXXXXXXXXXXXXXXXXXXXXXXXXXXXXXXXXXXLXXGXGGXFXXXLXXXGXXXXXXXXXXXXXXXXXXXXXXXAXXXRXXXGSATVAXXTXXXXXXPXXXXXXXXXXXXXXXXXXXXAXXXGXXXXSHXNDXXFWXXXXXXXXXXXXXXXXXW

SEQ ID NO: 45551 - protein, 20 aa, Artificial sequence
  protein pattern
  Variant (2)..(2): Xaa in position 2 is any amino acid
  Variant (5)..(5): Xaa in position 5 is Ala, Gly, Pro, Ser or Thr
  Variant (6)..(6): Xaa in position 6 is any amino acid
  Variant (9)..(9): Xaa in position 9 is Ile, Leu, Met or Val
  Variant (10)..(10): Xaa in position 10 is Phe, Ile, Leu or Val
  Variant (11)..(16): Xaa in position 11 to 16 is any amino acid
  Variant (17)..(17): Xaa in position 17 is Asp, Asn, Ser or Thr
  Variant (18)..(19): Xaa in position 18 to 19 is any amino acid
  Variant (20)..(20): Xaa in position 20 is Asp, Glu, Gln or Thr
HXNDXXFWXXXXXXXXXXXX

SEQ ID NO: 45552 - protein, 31 aa, Artificial sequence
  protein pattern
  Variant (2)..(10): Xaa in position 2 to 10 is any amino acid
  Variant (12)..(12): Xaa in position 12 is Ala, Thr or Val
  Variant (13)..(13): Xaa in position 13 is Ile, Met or Val
  Variant (14)..(14): Xaa in position 14 is Phe, Ile, Leu or Met
  Variant (16)..(16): Xaa in position 16 is any amino acid
  Variant (17)..(17): Xaa in position 17 is Ile, Leu or Met
  Variant (18)..(18): Xaa in position 18 is Phe, Ile, Leu, Met or Val
  Variant (19)..(20): Xaa in position 19 to 20 is any amino acid
  Variant (21)..(21): Xaa in position 21 is Ala, Cys, Gly, Ser or Thr
  Variant (23)..(23): Xaa in position 23 is Ala or Gly
  Variant (25)..(26): Xaa in position 25 to 26 is any amino acid
  Variant (27)..(27): Xaa in position 27 is Ile, Leu, Met or Val
  Variant (28)..(28): Xaa in position 28 is Ala, Gly or Ser
  Variant (29)..(30): Xaa in position 29 to 30 is any amino acid
  Variant (31)..(31): Xaa in position 31 is Phe, Ile, Leu, Met or Val
LXXXXXXXXXGXXXGXXXXXXGXAXXXXXXX

SEQ ID NO: 45553 - protein, 23 aa, Artificial sequence
  protein pattern
  Variant (2)..(9): Xaa in position 2 to 9 is any amino acid
  Variant (10)..(13): Xaa in position 10 to 13 is any or no amino acid
  Variant (15)..(16): Xaa in position 15 to 16 is any amino acid
  Variant (17)..(17): Xaa in position 17 is Ile, Leu or Val
  Variant (22)..(22): Xaa in position 22 is Ala, Gly or Ser
  Variant (23)..(23): Xaa in position 23 is Ala, Pro or Ser
PXXXXXXXXXXXXHXXXPPHPXX

SEQ ID NO: 45554 - protein, 25 aa, Artificial sequence
  protein pattern
  Variant (2)..(4): Xaa in position 2 to 4 is any amino acid
  Variant (5)..(8): Xaa in position 5 to 8 is any or no amino acid
  Variant (10)..(10): Xaa in position 10 is Ala, Ile, Leu or Val
  Variant (11)..(12): Xaa in position 11 to 12 is any amino acid
  Variant (15)..(15): Xaa in position 15 is Ala, Gly or Ser
  Variant (18)..(18): Xaa in position 18 is Ala or Ser
  Variant (19)..(20): Xaa in position 19 to 20 is any amino acid
  Variant (21)..(21): Xaa in position 21 is Ser or Thr
  Variant (22)..(22): Xaa in position 22 is Ala, Gly, Ser or Thr
  Variant (23)..(23): Xaa in position 23 is Ala, Cys, Gly, Ser, Thr or Val
  Variant (24)..(24): Xaa in position 24 is Ala, Gly, Ser or Thr
  Variant (25)..(25): Xaa in position 25 is Ile, Leu, Met or Val
AXXXXXXXRXXXGSXTVXXXXXXXX

SEQ ID NO: 45555 - protein, 34 aa, Artificial sequence
  protein pattern
  Variant (2)..(3): Xaa in position 2 to 3 is any amino acid
  Variant (4)..(4): Xaa in position 4 is any or no amino acid
  Variant (6)..(6): Xaa in position 6 is any or no amino acid
  Variant (9)..(9): Xaa in position 9 is any amino acid
  Variant (10)..(10): Xaa in position 10 is Phe or Leu
  Variant (11)..(13): Xaa in position 11 to 13 is any amino acid
  Variant (14)..(14): Xaa in position 14 is Ile, Leu or Val
  Variant (15)..(16): Xaa in position 15 to 16 is any amino acid
  Variant (17)..(17): Xaa in position 17 is Ala, Gly, Ser or Thr
  Variant (19)..(19): Xaa in position 19 is Ala, Ile, Leu or Val
  Variant (20)..(20): Xaa in position 20 is Ala, Asp, Glu, Gly or Ser
  Variant (21)..(22): Xaa in position 21 to 22 is any amino acid
  Variant (23)..(23): Xaa in position 23 is Ile, Leu, Met or Val
  Variant (24)..(33): Xaa in position 24 to 33 is any amino acid
  Variant (34)..(34): Xaa in position 34 is Ala, Gly, Ile, Leu, Pro or Val
LXXXGXGGXXXXXXXXXGXXXXXXXXXXXXXXXX

SEQ ID NO: 45556 - DNA, 720 bp, Escherichia coli
  CDS (1)..(720): transl_table=11
atggctaccccacacattaatgcagaaatgggcgatttcgctgacgtagttttgatgccaggcgacccgctgcgtgcgaagtatattgctgaaactttccttgaagatgcccgtgaagtgaacaacgttcgcggtatgctgggcttcaccggtacttacaaaggccgcaaaatttccgtaatgggtcacggtatgggtatcccgtcctgctccatctacaccaaagaactgatcaccgatttcggcgtgaagaaaattatccgcgtgggttcctgtggcgcagttctgccgcacgtaaaactgcgcgacgtcgttatcggtatgggtgcctgcaccgattccaaagttaaccgcatccgttttaaagaccatgactttgccgctatcgctgacttcgacatggtgcgtaacgcagtagatgcagctaaagcactgggtattgatgctcgcgtgggtaacctgttctccgctgacctgttctactctccggacggcgaaatgttcgacgtgatggaaaaatacggcattctcggcgtggaaatggaagcggctggtatctacggcgtcgctgcagaatttggcgcgaaagccctgaccatctgcaccgtatctgaccacatccgcactcacgagcagaccactgccgctgagcgtcagactaccttcaacgacatgatcaaaatcgcactggaatccgttctgctgggcgataaagagtaa

SEQ ID NO: 45557 - protein, 239 aa, Escherichia coli
MATPHINAEMGDFADVVLMPGDPLRAKYIAETFLEDAREVNNVRGMLGFTGTYKGRKISVMGHGMGIPSCSIYTKELITDFGVKKIIRVGSCGAVLPHVKLRDVVIGMGACTDSKVNRIRFKDHDFAAIADFDMVRNAVDAAKALGIDARVGNLFSADLFYSPDGEMFDVMEKYGILGVEMEAAGIYGVAAEFGAKALTICTVSDHIRTHEQTTAAERQTTFNDMIKIALESVLLGDKE

SEQ ID NO: 45558 - DNA, 720 bp, Ureaplasma parvum serovar 3 str. ATCC 700970
  CDS (1)..(720): transl_table=4
atgactgcacataatcaagctaaattaggagaaatagctaaagtagtactaatgccaggggacccaatgcgcgctaaatgaattgctgaaacttttttagaaaatgcaattttagttaatgaagttcgtggcatgctatgctatacaggaacatataaaggcaaaaaaatatcaattatgggccatggtatgggaattccttcgatcggaatttattcatatgaattatataaattttatgaagttgaaacaattattcgtgttggttcaactggttcatataaaaaagatttgaatgttaatgatgtggttttagttgaaaaatcatatagtgattctacattcgcatcactgattggtgcacaagttggcgatgataaggttttattaccatcaagagaagttaataatttaattaaaaatactgcgaaggaattaaatttagaattatcattagcaacttgtcatgcttctgatgtgttttataataatgattttcaaacattagatgaaattattcatcgaactaaatccgattgtgttgatatggaatcatttggtttattcgcaaatgcacaaattttaaataaaaatgcagcaactttactaacagttagtgattcattgattacaggtgatgcactatcacccgcagagcgtgctaatacttttaaaaaaatggtaacattagccttagaaagcgcaattaaattactttaa

SEQ ID NO: 45559 - protein, 239 aa, Ureaplasma parvum serovar 3 str. ATCC 700970
MTAHNQAKLGEIAKVVLMPGDPMRAKWIAETFLENAILVNEVRGMLCYTGTYKGKKISIMGHGMGIPSIGIYSYELYKFYEVETIIRVGSTGSYKKDLNVNDVVLVEKSYSDSTFASLIGAQVGDDKVLLPSREVNNLIKNTAKELNLELSLATCHASDVFYNNDFQTLDEIIHRTKSDCVDMESFGLFANAQILNKNAATLLTVSDSLITGDALSPAERANTFKKMVTLALESAIKLL

SEQ ID NO: 45560 - DNA, 747 bp, Mesorhizobium loti MAFF303099
  CDS (1)..(747): transl_table=11
gtgagagggcggtcgggcttgggggagcagcgattgacgacacacatagaggcaggcaagggcgattacgccgaaacggtgctgttgccgggcgatccgcagcgcgccgaatggatggcgaagacatttctcgaggcgccacgctgcgtcaatcgccggcggggtgctctcggctttaccggcctttttcgcggccagcccgtcagcattcaggcgacgggtatcggggtttcgtcgttcctgatctatgcccatgaattgcttgactattatggcgcccgaacgttgatccgcacggggacctgcggcggcctgagcgccgaggccacgctgcgcagcctggtaatctcgcaatcggcacggccggaaaacgccgagaacggtcaggtctttggcctttatgacgctgaagccggcccggatccggcgctgctcgtctgcgccttggccaaggcagccgaactcggcatcgaccatcacgccggcctgacagtctgcaccgacatattttaccatcctgaagcgcacacccgttatgccgaagcaagggcgctcggagcgctggccgtggacatggaaaccagcgcgctctaccgcatcgcggcgcatttcggcgccagggcgttatcgctactgacagtcgtcgacaatctggttaccggcgaacaggccgactattccgagcgccaggcgcttttcaccgatatgagccggctggcgctcgaaatcgctggggaagggcgctag

SEQ ID NO: 45561 - protein, 248 aa, Mesorhizobium loti MAFF303099
MRGRSGLGEQRLTTHIEAGKGDYAETVLLPGDPQRAEWMAKTFLEAPRCVNRRRGALGFTGLFRGQPVSIQATGIGVSSFLIYAHELLDYYGARTLIRTGTCGGLSAEATLRSLVISQSARPENAENGQVFGLYDAEAGPDPALLVCALAKAAELGIDHHAGLTVCTDIFYHPEAHTRYAEARALGALAVDMETSALYRIAAHFGARALSLLTVVDNLVTGEQADYSERQALFTDMSRLALEIAGEGR

SEQ ID NO: 45562 - DNA, 738 bp, Vibrio cholerae O1 biovar eltor str. N16961
  CDS (1)..(738): transl_table=11
ttggcgaaattgaattggagagtaaccatggcaaccccacacattaacgctcaacctggtgattttgctgaaaccgtattgatgccgggcgatccactacgtgcgaaatacattgcagaaaccttcttggaagacgtcaagcaagtgtgcgatgtacgtagtatgtttggctttacaggcacatacaaaggcaaaaaagtctctgtgatgggtcatggcatgggcatcccttcttgcagcatttatgtacatgaattgattgcagaatatggtgtgaaaaacatcattcgtatcggcagctgtggtgcagtacgtgatgacgtcaaactgatggacgtggtgatcggtatgggtgcatcaactgactcaaaagtgaaccgcatccgcttcagcggccatgattttgcggccatcgccgactacgacttgctggaaacggcggttaaccaagctcgtgctcagcaagtgccagtaaaagtgggtaacgtattttctgccgatctgttctacacccctgagcctgagattttcgaaaagatgaaaaaactcggcattttaggtgtggatatggaagcggcgggtatctacggtgtagcggctgatctcggcgcacgcgctctgacgattctgacggtatcggatcacattctacgtggcgaaaaactcagctcagaagatcgtcaaaagtcatttaatgacatgatgaaagttgcgcttgaaactgccatcaacatctaa

SEQ ID NO: 45563 - protein, 245 aa, Vibrio cholerae O1 biovar eltor str. N16961
MAKLNWRVTMATPHINAQPGDFAETVLMPGDPLRAKYIAETFLEDVKQVCDVRSMFGFTGTYKGKKVSVMGHGMGIPSCSIYVHELIAEYGVKNIIRIGSCGAVRDDVKLMDVVIGMGASTDSKVNRIRFSGHDFAAIADYDLLETAVNQARAQQVPVKVGNVFSADLFYTPEPEIFEKMKKLGILGVDMEAAGIYGVAADLGARALTILTVSDHILRGEKLSSEDRQKSFNDMMKVALETAINI

SEQ ID NO: 45564 - DNA, 714 bp, Streptococcus pyogenes M1 GAS
  CDS (1)..(714): transl_table=11
atgtctatccatatttctgccaaaaaaggcgatattgctgataaaattcttctacctggagatcctttgcgcgcgaaatttatcgctgaaaatttcctagaagatgcagtgtgttttaacgaagtgcgtaacatgtttggctacacaggaacttacaaagggcaccgcgtttctgtcatgggaactggtatggggatgccttcgatctctatctatgctcgtgaattaatcgttgattacggtgtcaaaacattgatccgtgttggtactgcgggtgcgattgacccagaagttcatgtgcgtgaattggtgcttgcccaagcagcagcaaccaactcaaatattatccgtaatgacttcccagaatttgatttcccacaaattgctgattttggtttacttgacaaggcttaccatatcgccagagaaatgggagtaacaactcacgttgggaatgtgctttcttctgatgtcttttacactaacatgcctgagcgtaatatggctcttggtaaattgggtgttaaagccatcgaaatggaagcagcagctctttactatttagctgctcagcaccatgtcaaagcccttggaatcatgacgatctcagataacttgaatgatccaaccgaagatactacagctgaagagcgccaaacaactttcactgatatgatgaaggtcggcttggaaaccttaattgccaatgactaa

SEQ ID NO: 45565 - protein, 237 aa, Streptococcus pyogenes M1 GAS
MSIHISAKKGDIADKILLPGDPLRAKFIAENFLEDAVCFNEVRNMFGYTGTYKGHRVSVMGTGMGMPSISIYARELIVDYGVKTLIRVGTAGAIDPEVHVRELVLAQAAATNSNIIRNDFPEFDFPQIADFGLLDKAYHIAREMGVTTHVGNVLSSDVFYTNMPERNMALGKLGVKAIEMEAAALYYLAAQHHVKALGIMTISDNLNDPTEDTTAEERQTTFTDMMKVGLETLIAND

SEQ ID NO: 45566 - DNA, 918 bp, Deinococcus radiodurans R1
  CDS (1)..(918): transl_table=11
gtggacattggcgaactcttcgggctcgcgcacgtccacgagcagcgccccttgctgcaccagcttctgcccttcggcgggggtgacttctttcatgggggcagcatagcgaacccgactgagaaaaaagcgggacgagcagccaatcgccggaaatttggccgaaacgcgctgaggtcgcctgatactctgcggggtatgagcattcacctcaacgccgaaaaaggccagattgccgaaaccgtcctgctgccgggcgaccccctgcgggcgcggcacatcgccgaaacctttctggaaaaccccgtgcagcacaacaccgtgcgcgggatgctgggctttaccggcacctacaagggcgagcgcgtcagcgtgcagggcaccggcatgggcattccgagctgcatgatttatgtcaacgaactgattcaggactacggctgcaagaacctgattcgtgtgggcacggcgggcagctatcaggaaggcgtgcacgtgcgcgacctcgtgctggcgcaggcggcgtgcaccgacagcaacatcaaccgcgtccgcttcggcgagcgcaccttcgcgcccatcgccgacttcgagctgctgctgcgggcgtaccagattgcccaggagcgcggcttcagcgcccacgtcggcaacatcatgagcagcgacaccttctacaacgacaacccgaccgagtttcagcgctgggccgagttcggcgtgctggcggtggaaatggaagccgccgggctctacaccctcgccgccaaatacggcgtgcgggcgctgaccatcctcaccatcagcgaccacctcgtgacccacgaagtcacctccgctgaggagcgtcagctcaccttcaacggcatgattgaagtcgcgctcgacgcggcgctcgggctggaaaagaaagcttag

SEQ ID NO: 45567 - protein, 305 aa, Deinococcus radiodurans R1
MDIGELFGLAHVHEQRPLLHQLLPFGGGDFFHGGSIANPTEKKAGRAANRRKFGRNALRSPDTLRGMSIHLNAEKGQIAETVLLPGDPLRARHIAETFLENPVQHNTVRGMLGFTGTYKGERVSVQGTGMGIPSCMIYVNELIQDYGCKNLIRVGTAGSYQEGVHVRDLVLAQAACTDSNINRVRFGERTFAPIADFELLLRAYQIAQERGFSAHVGNIMSSDTFYNDNPTEFQRWAEFGVLAVEMEAAGLYTLAAKYGVRALTILTISDHLVTHEVTSAEERQLTFNGMIEVALDAALGLEKKA

SEQ ID NO: 45568 - DNA, 699 bp, Mycoplasma pulmonis UAB CTIP
  CDS (1)..(699): transl_table=4
atgacaccacacattaatgccaaaaaaggtgaaattgctaaggtagttttaatgccaggagatcctctaagagctaaaactatggcagaaaaatatttaaaaaattataaattagttagttctgttagaaatgcttttatttatacaggtgaatacaaaggaaagcaaatttcaattgccgcttcaggaatgggttgtgcttcgattggaatttactcacatgagctttttgacaaatatgaagttgaaaaaatcattagagtaggaacttctggatcatatgtaaaagatttaaacattggagatgttgttctagcaaaaagtgcctacactgataatcaaaacttttcgctagttttaagtggtaaagccgaaaatgttttttatccttcaaaagagcttaatgagcaaattagtaaaattgcaaaagatcttttgattccaatcaaagaaattcaagttcactcaagtgatgttttttatgccacaaggcctcttgaagagactatcaaaattactcaatctcaagctgttgaaatggaagcaagtgcactttttgctgttgcaaataaattcaataagcaagcagcaacacttcttacaattagcgacaatctaataacccatgaagaagctagttctcaaacaagacaaaacaactttaccaagatgtttgaaattgcacttgaaattgactaa

SEQ ID NO: 45569 - protein, 232 aa, Mycoplasma pulmonis UAB CTIP
MTPHINAKKGEIAKVVLMPGDPLRAKTMAEKYLKNYKLVSSVRNAFIYTGEYKGKQISIAASGMGCASIGIYSHELFDKYEVEKIIRVGTSGSYVKDLNIGDVVLAKSAYTDNQNFSLVLSGKAENVFYPSKELNEQISKIAKDLLIPIKEIQVHSSDVFYATRPLEETIKITQSQAVEMEASALFAVANKFNKQAATLLTISDNLITHEEASSQTRQNNFTKMFEIALEID

SEQ ID NO: 45570 - DNA, 711 bp, Streptococcus pneumoniae TIGR4
  CDS (1)..(711): transl_table=11
atgtctatccatattgctgctcagcagggtgaaattgctgataaaattcttcttcctggggatcctcttcgtgctaagtttattgcggagaatttccttgatgatgctgtttgttttaacgaagtgcgtaacatgtttggttacactggtacttacaagggtcactgtgtatctgtcatgggaactgggatgggaatgccatctatttcgatttatgcgcgtgagttaatcgtagactacggtgtgaagaaattgattcgtgtgggaactgcaggttctttgaatgaagaggttcatgttcgtgaattagttttggcgcaggcggctgcaaccaactcaaacatcgttcgtaatgactggccacagtacgattttccacaaattgctagctttgatttgcttgataaagcctaccatatcgccaaaaaacttggtatgactactcacgttgggaacgttttgtcatctgatgtcttttactcaaattactttgaaaagaatatcgagcttggtaaatggggagtcaaggctgtggaaatggaagcagcagctctttactatcttgctgcccaataccatgttgatgcgctagctatcatgaccatctctgatagcttggtcaatccagacgaagacacaactgcagaagaacgtcaaaataccttcactgatatgatgaaggttggtttggaaaccttgattgcagaataa

SEQ ID NO: 45571 - protein, 236 aa, Streptococcus pneumoniae TIGR4
MSIHIAAQQGEIADKILLPGDPLRAKFIAENFLDDAVCFNEVRNMFGYTGTYKGHCVSVMGTGMGMPSISIYARELIVDYGVKKLIRVGTAGSLNEEVHVRELVLAQAAATNSNIVRNDWPQYDFPQIASFDLLDKAYHIAKKLGMTTHVGNVLSSDVFYSNYFEKNIELGKWGVKAVEMEAAALYYLAAQYHVDALAIMTISDSLVNPDEDTTAEERQNTFTDMMKVGLETLIAE

SEQ ID NO: 45572 - DNA, 711 bp, Streptococcus pneumoniae R6
  CDS (1)..(711): transl_table=11
atgtctatccatattgctgctcagcagggtgaaattgctgataaaattcttcttcctggggatcctcttcgtgctaagtttattgcggagaatttccttggtgatgctgtttgttttaacgaagtgcgtaacatgtttggttacactggtacttacaagggtcaccgtgtatctgtcatgggaactgggatgggaatgccatctatttcgatttatgcgcgtgagttaatcgtagactacggtgtgaagaaattgattcgtgtgggaactgcaggttctttgaatgaagaggttcatgttcgtgaattagttttggcgcaggcggctgcaaccaactcaaacatcgttcgtaatgactggccacagtacgattttccacaaattgctagctttgatttgcttgataaagcctaccatatcgccaaagaacttggtatgactactcacgttgggaacgttttgtcatctgatgtcttttactcaaattactttgaaaagaatatcgagcttggtaaatggggagtcaaggctgtggaaatggaagcagcagctctttactatcttgctgcccaataccatgttgatgcgctagctatcatgaccatctctgatagcttggtcaatccagacgaagacacaactgcagaagaacgtcaaaataccttcactgatatgatgaaggttggtttggaaaccttgattgcagaataa

SEQ ID NO: 45573 - protein, 236 aa, Streptococcus pneumoniae R6
MSIHIAAQQGEIADKILLPGDPLRAKFIAENFLGDAVCFNEVRNMFGYTGTYKGHRVSVMGTGMGMPSISIYARELIVDYGVKKLIRVGTAGSLNEEVHVRELVLAQAAATNSNIVRNDWPQYDFPQIASFDLLDKAYHIAKELGMTTHVGNVLSSDVFYSNYFEKNIELGKWGVKAVEMEAAALYYLAAQYHVDALAIMTISDSLVNPDEDTTAEERQNTFTDMMKVGLETLIAE

SEQ ID NO: 45574 - DNA, 708 bp, Clostridium perfringens str. 13
  CDS (1)..(708): transl_table=11
atgagtattcatataggtgcaaaagaaggtcaaatagccgaaacaattttattaccaggagatcctttaagagctaaatttatagctgaaacttttttagaaaatccagtttgttacaatgaagttagaggaatgttaggatatacaggaacatataaaggaaaaagaatatcagttcaaggtactggtatgggggttccttcaatttctatttacgttaatgaacttataagagattatggagttaaaaatttaataagagtaggtactgctggcggtatgcaagaagatataaaagttagagatttagttttagcaatgtcatctcatactgattctgcaataaataaagttagatttaacggtttagattttgctccaacagcatcatttaaacttttaaaggctgcttacgatactgccgttgaaaaaggatattctcctaaggttggtagcgtattcacagctgatagcttctataatgataatcctgaagcatggaaacaatgggctaaatttggtactttagctgttgaaatggaaactgcagctttatataccttagcagctaagtatggtgttaatgccttaacaatacttactataagtgatcatttaattactgctgaggaaactactagtgaggagcgtcaaactaccttcacaaagatgatggaagttgctcttgatgctgctataactttataa

SEQ ID NO: 45575 - protein, 235 aa, Clostridium perfringens str. 13
MSIHIGAKEGQIAETILLPGDPLRAKFIAETFLENPVCYNEVRGMLGYTGTYKGKRISVQGTGMGVPSISIYVNELIRDYGVKNLIRVGTAGGMQEDIKVRDLVLAMSSHTDSAINKVRFNGLDFAPTASFKLLKAAYDTAVEKGYSPKVGSVFTADSFYNDNPEAWKQWAKFGTLAVEMETAALYTLAAKYGVNALTILTISDHLITAEETTSEERQTTFTKMMEVALDAAITL

SEQ ID NO: 45576 - DNA, 726 bp, Fusobacterium nucleatum subsp. nucleatum ATCC 25586
  CDS (1)..(726): transl_table=11
atgaaaggagttcaagttatgagtatacatataggagcaaaactagaagatatcgcagaaactgtcttgttgccaggtgaccctaaaagagcaaaatggatagcagaaaattatttagaaaacgctttttgctatactgatattagaggtatgttaggttttacagggacatataaaggaaagatgatatctatacaaggaacaggaatgggaattccttcaatatctatctatataacagaacttatgaaagactatggagttaaaaatttaataagagttggttcagcaggttcctatcaagaagatataaaagttagagatgttgttatagctatgtccacttcaactgattctaatattaataatagaaaatttaatggagctaatttttctcctactgctaattttgaattattttcaatggctttaaaagttgcagaagaaaaaaatattaaaataaaagcaggaaatgttttaacaagtgatgaattttatagtgataatagtgattattataagaagtgggcagattttggagtgctagcagttgaaatggaaacagctggattgtacacattagctgcaaaatataaagctaaggcactttctattttaactatttcagattcattagttagtccagaaattacaagtgcagaagaaagggaaaaaacattctctgaaatgatagagctggctttagaaactgctattagaatttaa

SEQ ID NO: 45577 - protein, 241 aa, Fusobacterium nucleatum subsp. nucleatum ATCC 25586
MKGVQVMSIHIGAKLEDIAETVLLPGDPKRAKWIAENYLENAFCYTDIRGMLGFTGTYKGKMISIQGTGMGIPSISIYITELMKDYGVKNLIRVGSAGSYQEDIKVRDVVIAMSTSTDSNINNRKFNGANFSPTANFELFSMALKVAEEKNIKIKAGNVLTSDEFYSDNSDYYKKWADFGVLAVEMETAGLYTLAAKYKAKALSILTISDSLVSPEITSAEEREKTFSEMIELALETAIRI

SEQ ID NO: 45578 - DNA, 708 bp, Staphylococcus aureus subsp. aureus MW2
  CDS (1)..(708): transl_table=11
atgaaatcaacaccacacattaaaccaatgaatgacgtcgaaattgcagaaacggttctattgccaggagatccgttaagagctaagttcattgcagaaacttatttggatgatgtggaacagttcaatacagtgcgaaacatgtttggttttaccggaacatataaaggtaaaaaagtttctgtcatgggttcaggtatgggtatgccatctattggcatttactcttatgaattaattcatacatttggttgtaaaaaattaattcgcgttggttcttgtggcgcgatgcaagaaaacattgatttatatgatgtgattattgcacaaggtgcctctactgattcaaattacgttcaacaatatcaattaccaggtcattttgcgccaattgcttcttatcaattattagaaaaagcagttggaacagcacgtgacaaaggtgtacgtcatcatgtaggtaatgtgttatcaagtgatattttctataacgcggatacaacagcgagtgaacgttggatgcgtatgggtattttaggtgtagaaatggaatcagctgcattatacatgaatgcaatttacgctggtgtcgaagcattaggtgtgttcacagtgagcgatcatttaattcatgaaacgtcaacaacacctgaggaaagggaacgtgcatttacagatatgattgaaattgcactgtcattggtttag

SEQ ID NO: 45579 - protein, 235 aa, Staphylococcus aureus subsp. aureus MW2
MKSTPHIKPMNDVEIAETVLLPGDPLRAKFIAETYLDDVEQFNTVRNMFGFTGTYKGKKVSVMGSGMGMPSIGIYSYELIHTFGCKKLIRVGSCGAMQENIDLYDVIIAQGASTDSNYVQQYQLPGHFAPIASYQLLEKAVGTARDKGVRHHVGNVLSSDIFYNADTTASERWMRMGILGVEMESAALYMNAIYAGVEALGVFTVSDHLIHETSTTPEERERAFTDMIEIALSLV

SEQ ID NO: 45580 - DNA, 726 bp, Yersinia pestis KIM
  CDS (1)..(726): transl_table=11
gtgattatggcaacgccacatattaatgctgaaatgggtgatttcgccgacgttgtattgatgccaggggacccactgcgggcaaagtttattgcagaaactttcctgcaagacgtgcgtgaagtgaataacgtacgcggcatgttgggtttcaccggcacctataaaggccggaagatttctgtgatgggccatggcatggggatcccatcctgttctatctatgctaaagagctgatcactgattttggtgtgaagaaaatcatccgcgtgggctcctgtggtgccgtacgcaccgatgttaaactgcgtgatgtagtgatcggaatgggggcgtgcacggattccaaagttaaccgtatgcgttttaaagatcacgactatgcggcgattgctgattttgagatgacccgtaatgcggttgatgcagccaaagcgaaaggggtcaatgtccgtgtcggtaacctcttctctgcggatcttttctacacaccagatccacaaatgtttgatgtgatggaaaaatacggcatcttgggcgtagaaatggaagccgccggtatctgcggcgtagcggcagagtttggtgcgaaggcactgactatctgcaccgtttctgaccatatccgtaccggcgagcagactaccgcggctgaacgtcagaccacttttaatgacatgattgagatcgcactggaatctgtgttactgggtgataacgcgtaa

SEQ ID NO: 45581 - protein, 241 aa, Yersinia pestis KIM
MIMATPHINAEMGDFADVVLMPGDPLRAKFIAETFLQDVREVNNVRGMLGFTGTYKGRKISVMGHGMGIPSCSIYAKELITDFGVKKIIRVGSCGAVRTDVKLRDVVIGMGACTDSKVNRMRFKDHDYAAIADFEMTRNAVDAAKAKGVNVRVGNLFSADLFYTPDPQMFDVMEKYGILGVEMEAAGICGVAAEFGAKALTICTVSDHIRTGEQTTAAERQTTFNDMIEIALESVLLGDNA

SEQ ID NO: 45582 - DNA, 705 bp, Streptococcus mutans UA159
  CDS (1)..(705): transl_table=11
atgtctattcatattggagcccaagtgggtcaaattgctgataaaattttacttccgggtgatcctcttcgtgctaaattcattgcagaaaattttcttgaagatgcggtgtgttttaacgaagttcgtggcatgcttggatttacgggaatttataaaggtcatcgcgtttctgttatgggaactggcatgggcatgccttctatctcaatttatgtgaatgagctcattcgttcttatggtgttaaaaaattaattcgtgttggaacagcaggttcgcttaacaaggatgtccatgtgcgtgatctcgttttggcgcaggctgcagggacaacttccagcatgattaaaaacgaatggccacaatacgattttccgcagattgctgatttctcaatgcttgataaggcttatcatattgctgaggatatggagctgacaacacatgtgggaagtgttctgtctattgatgctttttattcagattttgctgacaacaatattaagcttggacaaattggggttaaagccgttgaaatggaagcggcagctatttattatttggctgctaaacatggtgtccaagctttgggaattatgaccatttcagacagtttagttgctgacgaagatacaacagctgaggaacgccaaacaacctttactgacatgatgaaggtaggtttagaaactttaattgcttaa

SEQ ID NO: 45583 - protein, 234 aa, Streptococcus mutans UA159
MSIHIGAQVGQIADKILLPGDPLRAKFIAENFLEDAVCFNEVRGMLGFTGIYKGHRVSVMGTGMGMPSISIYVNELIRSYGVKKLIRVGTAGSLNKDVHVRDLVLAQAAGTTSSMIKNEWPQYDFPQIADFSMLDKAYHIAEDMELTTHVGSVLSIDAFYSDFADNNIKLGQIGVKAVEMEAAAIYYLAAKHGVQALGIMTISDSLVADEDTTAEERQTTFTDMMKVGLETLIA

SEQ ID NO: 45584 - DNA, 711 bp, Streptococcus agalactiae NEM316
  CDS (1)..(711): transl_table=11
atgtcaatccatattgaagcaaaacaaggtgaaattgcagataaaattttacttccaggagatccactccgtgcgaaatttattgccgagaattttttagaagatgcggtgtgttttaatacagttcgtaatatgtttggttatacaggtacctataaaggacatcgtgtttctgttatggggactggtatgggtatgccttcaatttcaatttatgctcgcgaactaattgttgattatggggttaaaacattgattcgcgtaggaacagcaggtgctattaatcctgatatccatgttcgtgaacttgttttggcacaagcagcagcaacaaattctaatattatccgtaatgattggcctgaatttgattttccgcaaattgctgattttaaacttttggataaagcttatcacatcgcaaaggaaatggatattacaactcatgtaggcagtgtattatcttcagacgtgttttattcaaaccaaccagatcgtaatatggccttgggtaaactaggtgttcatgctattgagatggaagcagcagctctctactatcttgcagctcaacacaatgttaatgctcttgctatgatgacgatttcagataacttgaataatccagaagaagatacaagtgcagaagagcgtcaaacaacatttactgatatgatgaaagttgggctcgaaacacttatttctgaatga

SEQ ID NO: 45585 - protein, 236 aa, Streptococcus agalactiae NEM316
MSIHIEAKQGEIADKILLPGDPLRAKFIAENFLEDAVCFNTVRNMFGYTGTYKGHRVSVMGTGMGMPSISIYARELIVDYGVKTLIRVGTAGAINPDIHVRELVLAQAAATNSNIIRNDWPEFDFPQIADFKLLDKAYHIAKEMDITTHVGSVLSSDVFYSNQPDRNMALGKLGVHAIEMEAAALYYLAAQHNVNALAMMTISDNLNNPEEDTSAEERQTTFTDMMKVGLETLISE

SEQ ID NO: 45586 - DNA, 708 bp, Enterococcus faecalis V583
  CDS (1)..(708): transl_table=11
atgagtgtgcatatcgaagcaaaaccaggtgaaattgccgataaaattttactaccaggggatcccctccgagcaaaatatattgcggaaacttttttagagaatcctgtctgctataatcaagttcgtgggatgttaggttacacaggaacgtataagggacagcgtgtttcagtccaaggaacagggatggggatgccttcagcaggtatttatgcccatgagttaattaactcttacgatgtgaagaagttaattcgtgttggtacgtgtggttctatttcagaaaaagtcaacgttcgtgaattagttatcgcacaagcagcagcgacgccttcttccgcgattcgcaatgattttcctaaatatgattttccacaaattgcgagctttgatcttttactcaaatcttacgaaattgctaaagcaaaaggctttactacccatgttggtaacgtattgtcagatgatgttttttacaaagatagtttagatgatgtctttcgtttaggtcgatacggggtattagcgattgaaatggaagcggcaatgttatattatttagcagcaaaatttgatgtagaagcattggcgattatgacggtgagtgatagcttggtgacaggcgaagaaacaacggcagaagaacgccaaacgacgtttaatgaaatgattgaagttggtttagaaacggcaattgctaattaa

SEQ ID NO: 45587 - protein, 235 aa, Enterococcus faecalis V583
MSVHIEAKPGEIADKILLPGDPLRAKYIAETFLENPVCYNQVRGMLGYTGTYKGQRVSVQGTGMGMPSAGIYAHELINSYDVKKLIRVGTCGSISEKVNVRELVIAQAAATPSSAIRNDFPKYDFPQIASFDLLLKSYEIAKAKGFTTHVGNVLSDDVFYKDSLDDVFRLGRYGVLAIEMEAAMLYYLAAKFDVEALAIMTVSDSLVTGEETTAEERQTTFNEMIEVGLETAIAN

SEQ ID NO: 45588 - DNA, 714 bp, Mycoplasma gallisepticum R
  CDS (1)..(714): transl_table=4
ataatgactccacatattaaagcaaaaaaagaagagatcgctaaaacagtaattatgcctggtgatccattacgagcaaaatggattgcagaaacatttctagaagactataaactagttaatgaagtaagaaatatgtttgcttacacaggtaaatataagaacaaattagtaacagttatgggtcacgggatgggtaatccttcaattggaatctacacccacgagctttataatttttatgatgttgaaaatattattcgtgttggttcatgtggcgctttagttaaagatgttaacttaggtgatgtgatcttagaaagcaaggcttatagtgaatcaccttatgcaatgctaatcggagttgatgtggtggataaaactaattacccttcagctaaattattagagttatcaagaaaaacagctgatgaattaaagatcaaataccatgaagggttagtgatctgtgaagacgctttttatcaaaccttatacactcccaagcaagctaatgaaaagtgaaatgcgattgctgtagagatggaaggttttgctttgaatgctaatgcacaaaaagctaaaaagcatgcaatgacgatcctaacggtctctgactcattagttacccatgaatcaatgagtccagagaaacgccaaacaacatttaaaaatatgatggagttagcacttaatgtggctaataaactataa

SEQ ID NO: 45589 - protein, 237 aa, Mycoplasma gallisepticum R
MMTPHIKAKKEEIAKTVIMPGDPLRAKWIAETFLEDYKLVNEVRNMFAYTGKYKNKLVTVMGHGMGNPSIGIYTHELYNFYDVENIIRVGSCGALVKDVNLGDVILESKAYSESPYAMLIGVDVVDKTNYPSAKLLELSRKTADELKIKYHEGLVICEDAFYQTLYTPKQANEKWNAIAVEMEGFALNANAQKAKKHAMTILTVSDSLVTHESMSPEKRQTTFKNMMELALNVANKL

SEQ ID NO: 45590 - DNA, 765 bp, Vibrio vulnificus YJ016
  CDS (1)..(765): transl_table=11
gtgcctctctattcttttgtgattgaaatacaaggaaacgaaaacatggcaactccacatattaatgctgaaatgggtgattttgcagatgttgtactgatgccgggtgacccgctacgtgcaaaatacattgcagaaaccttcctggaagacgtggttcaggtttgtgatgtacgtaatatgtatggtttcactggtacttacaaaggtcgtaaagtatcggtaatgggtcatggtatgggtatcccatcgtgctcaatttacgccactgagcttatcaaagactacggtgtgaagaagatcatccgtgtgggtagctgtggtgctgtaagcacggacatcaaagtacgcgatgttgtgatcggcatgggggcatgtaccgattccaaagtaaaccgcatccgttttaaaggtcatgactttgcggcgattgctgactacaaaatggtcaaagcagcggaagaagcggcgaaagcgcgtggtatcgatgtgaaagtgggtaacctattttctgctgaactgttctacacgccagatccagaaatgttcgacgtgatggacaaatacggaattgtcggcgtagaaatggaagcggcgggcatctacggtgttgctgctgaatacggcgcaaaagcgctgacgatttgtacggtttctgaccacatcaagacaggtgagcaaaccacatcagaagagcgtcagaataccttcaatgacatgatgattgttgcgttggattctgtattgcttggcgatgcagaataa

SEQ ID NO: 45591 - protein, 254 aa, Vibrio vulnificus YJ016
MPLYSFVIEIQGNENMATPHINAEMGDFADVVLMPGDPLRAKYIAETFLEDVVQVCDVRNMYGFTGTYKGRKVSVMGHGMGIPSCSIYATELIKDYGVKKIIRVGSCGAVSTDIKVRDVVIGMGACTDSKVNRIRFKGHDFAAIADYKMVKAAEEAAKARGIDVKVGNLFSAELFYTPDPEMFDVMDKYGIVGVEMEAAGIYGVAAEYGAKALTICTVSDHIKTGEQTTSEERQNTFNDMMIVALDSVLLGDAE

SEQ ID NO: 45592 - DNA, 825 bp, Vibrio vulnificus YJ016
  CDS (1)..(825): transl_table=11
atggcgaattatctagctagtattgcctcaacgaacgaaaacagtttcaacagaattggtaatttgactctgtttttgatgacaattacctcaatagaaatattggagaatactatggcaaccccacacatcaacgcacaaccaggtgatttcgcagaaaccgtactgatgccaggcgatccgctacgcgctaagtacatcgcagaaaccttcttggaagatgtaaaacaagtttgtgacgttcgtaacatgttcggcttcactggcacttacaaaggtaaaaaagtgtctgttatgggccacggtatgggtatcccatctgcatgtatctatgttcacgagctgatcgctgaatacggcgtgaaaaatgttatccgcgttggtagctgtggtgcagtgcgcgacgacgttaacctgatggacgttgtgattggcatgggtgcttcgacggattctaaagtaaaccgtatccgctttaacgatcacgatttcgctgcactagcggattacggtctgttggaagaagcggtgaaacaagcacgtgcgcaaaacgtaccagtaaaagtcggtaacgtattctctgcggatcttttctacacaccagaagcagacatcttcgagaagatggaaaaactaggcatcctaggtgtggatatggaagcagcaggcatctacggtgtggctgcggatctaaaagcaaaagcactgactattctgacggtttctgaccacatcatccgtggcgagaaactaagctctgaagatcgtcagaagtcgttcaacgacatgatgaaagtggctctagaaaccgccatcaatctttaa

SEQ ID NO: 45593 - protein, 274 aa, Vibrio vulnificus YJ016
MANYLASIASTNENSFNRIGNLTLFLMTITSIEILENTMATPHINAQPGDFAETVLMPGDPLRAKYIAETFLEDVKQVCDVRNMFGFTGTYKGKKVSVMGHGMGIPSACIYVHELIAEYGVKNVIRVGSCGAVRDDVNLMDVVIGMGASTDSKVNRIRFNDHDFAALADYGLLEEAVKQARAQNVPVKVGNVFSADLFYTPEADIFEKMEKLGILGVDMEAAGIYGVAADLKAKALTILTVSDHIIRGEKLSSEDRQKSFNDMMKVALETAINL

SEQ ID NO: 45594 - DNA, 717 bp, Corynebacterium diphtheriae NCTC 13129
  CDS (1)..(717): transl_table=11
atggctgaaaagtcaaccccacacatcaatcccaagggcgtcgatatcgcagaaactgttctgctgcctggcgacccactgcgtgcaaagtttatcgcagacacctacctagaagacgttgtgcagttcaattcggtgcgcaacatgctcggcttcaccggtacctaccaaggaaccccagtttctgtgatgggttccggcatgggtatgccttctatcggcatctactcctacgagctcattaacttctttgatgcccgcaacgtcattcgcgtgggctccatcggcgctatgcagaaagatattgacctctacgagatcatcgttgcagcatctgcatccaccgactccaacttccttgagcagtacaacttgcctggcacctacgccccaactgcatcgtggaccctgctgagggcgttcatggatgaggcagaccgcaagggtaagaaggttcacgtcggcaacattttgtcctccgatgttttctacaacgctgataataccgtgaatgagcgttgggctcgcatgggtgtgctcggtgtagagatggaatcggcagcactgtactccatcgccgcatacgctggcgcaaatgctctgggcgtatttaccgtgtcggacaacctgttcaccggagcacgcaccacggctgaagagcgcgaaagcgccttcaccgacatgatggaactcgcactaccattggcacgcgcatga

SEQ ID NO: 45595 - protein, 238 aa, Corynebacterium diphtheriae NCTC 13129
MAEKSTPHINPKGVDIAETVLLPGDPLRAKFIADTYLEDVVQFNSVRNMLGFTGTYQGTPVSVMGSGMGMPSIGIYSYELINFFDARNVIRVGSIGAMQKDIDLYEIIVAASASTDSNFLEQYNLPGTYAPTASWTLLRAFMDEADRKGKKVHVGNILSSDVFYNADNTVNERWARMGVLGVEMESAALYSIAAYAGANALGVFTVSDNLFTGARTTAEERESAFTDMMELALPLARA

SEQ ID NO: 45596 - DNA, 702 bp, Treponema denticola ATCC 35405
  CDS (1)..(702): transl_table=11
atgagtgttcatatagctgcaaaacaaggagaaattgccgataaaattcttttaccgggggatcctttacgggcggaatttgttgcaaacaattttttggaaaatccccaatgttataacaaggttagaggtatgttgggctttacgggaacctacaagggtgtaagggtttcggttcagggaaccggaatggggcagccttctttttcgatctatgcaaatgagctgtttaacgagtacggcgtacaaagggctatccgtatcggaacggccggagccttgcaaaaggatatgggcttgcgggatgtagttttagctatggcggcctctaccgattcgggtattaacacgcaccgttttaggggttgtcattatgctcctaccgccgattggagcttgctaaaaaatgcctatgatcatgctcaaaaaatgggaattaaacccttagtaggctcgattgccagctctgatgttttttatgatgaccttgaaacatggaagatgtgggccgcttacggggttttagctgttgaaatggaagctgcagagctttatactctggctgcaaagtataagcgccaagcccttgccgttcttaccatttcggataatatagttacacaggagcagacaagtgccgaagagcggcaaactacctttaaaaccatgatggaaattgccttagaggcaataatagcttaa

SEQ ID NO: 45597 - protein, 233 aa, Treponema denticola ATCC 35405
MSVHIAAKQGEIADKILLPGDPLRAEFVANNFLENPQCYNKVRGMLGFTGTYKGVRVSVQGTGMGQPSFSIYANELFNEYGVQRAIRIGTAGALQKDMGLRDVVLAMAASTDSGINTHRFRGCHYAPTADWSLLKNAYDHAQKMGIKPLVGSIASSDVFYDDLETWKMWAAYGVLAVEMEAAELYTLAAKYKRQALAVLTISDNIVTQEQTSAEERQTTFKTMMEIALEAIIA

SEQ ID NO: 45598 - DNA, 654 bp, Mycoplasma mycoides subsp. mycoides SC str. PG1
  CDS (1)..(654): transl_table=4
atgcatattgataaaaatgctgatattgctagtgttgtactaattgcaggagatccaaaaagaactaaatgagcaactgaaaacttattgactgattataaactagtaagtgatgtcagaaatgcttttgtttatactggttattataaaaatcataaagtaagttttgctacaagtggaatgggtcaaccttcaattgctatttatgctcatgaattatttaatgatcataatgtaaatactattattagagttggaacttgtggaacatataataatgatattaaaataggaactgtaattgaagcaaaaaatgcttttagtgaagtaaatatttttgaaccagataaaacaggatgacaaaaaaatcaacctagtttagatttaaatatcggttttaaagcaaatgttcactgtagtgatgttttttatagaatatctaaattagatataaaagaacataatttagatgttgttgatatggaaagttttgctttgttttatttagcaaatcattttaataaaaaagcagcaactattttaactgtttcagataatttaaatgatcattcaaatgatttaactgcaaaacaaagagaaatagctacactaaaaatgtatcaagatgttttagaaaaactatttgcaaattaa

SEQ ID NO: 45599 - protein, 217 aa, Mycoplasma mycoides subsp. mycoides SC str. PG1
MHIDKNADIASVVLIAGDPKRTKWATENLLTDYKLVSDVRNAFVYTGYYKNHKVSFATSGMGQPSIAIYAHELFNDHNVNTIIRVGTCGTYNNDIKIGTVIEAKNAFSEVNIFEPDKTGWQKNQPSLDLNIGFKANVHCSDVFYRISKLDIKEHNLDVVDMESFALFYLANHFNKKAATILTVSDNLNDHSNDLTAKQREIATLKMYQDVLEKLFAN

SEQ ID NO: 45600 - DNA, 714 bp, Streptococcus pyogenes str. Manfredo
  CDS (1)..(714): transl_table=11
atgtctatccatatttctgccaaaaaaggcgatattgctgataaaattcttctacctggagaccctttgcgcgcgaaatttatcgctgaaaatttcctagaagatgcagtgtgttttaacgaagtgcgtaacatgtttggctacacaggaacttacaaagggcaccgcgtttctgtcatgggaactggtatgggaatgccttcgatctctatctatgctcgtgaattaatcgttgattacggtgtcaaaacattgatccgtgttggtactgcgggtgcgattgacccagaagttcatgtgcgtgaattggtgcttgcccaagcagcagcaaccaactcaaatattatccgtaatgacttcccagaatttgatttcccacaaattgctgattttggtttacttgacaaggcttatcatatcgccagagaaatgggagtaacaactcacgttgggaatgtgctttcttctgatgtcttttacactaacatgcctgagcgtaatatggctcttggtaaattgggtgttaaagccatcgaaatggaagcagcagctctttactatttagctactcagcaccatgtcaaagcccttggaatcatgacgatctcagataacttgaatgatccaaccgaagatactacagctgaagagcgtcaaaccactttcactgatatgatgaaaattggtttggaaactttaattgccaatgactaa

SEQ ID NO: 45601 - protein, 237 aa, Streptococcus pyogenes str. Manfredo
MSIHISAKKGDIADKILLPGDPLRAKFIAENFLEDAVCFNEVRNMFGYTGTYKGHRVSVMGTGMGMPSISIYARELIVDYGVKTLIRVGTAGAIDPEVHVRELVLAQAAATNSNIIRNDFPEFDFPQIADFGLLDKAYHIAREMGVTTHVGNVLSSDVFYTNMPERNMALGKLGVKAIEMEAAALYYLATQHHVKALGIMTISDNLNDPTEDTTAEERQTTFTDMMKIGLETLIAND

SEQ ID NO: 45602 - DNA, 714 bp, Dichelobacter nodosus VCS1703A
  CDS (1)..(714): transl_table=11
atgacgcctcatatcaatgcgccggcgggggcttttgcggaaacggttttattttgcggcgatccgctgcgcgcgcaatttatcgcgcatcattttttaaaaaacgcgcaggaaatcactaatgtgcgcgcaatgttgggttttaccggcgaatatcaacagcacaaattatctgtgatggggcacggcatgggtattccgtcgtgttcgatttatgctaaagaattgattaccgaatacggcgtaaaaaatctgattcgcgtgggcagttgtggcgccgtgttagatgagattaaattgcatgacgttatcattgctttatcagcggcaacggattctaacgtgaaccgtctgcggtttcgtcattatgattttgctgccactgccgattattctattttttccgctttaattgccgcggcagcgcagcaaaatatcaccgcgcgagtaggaaccgttttttctactgattctttttatcatgcggatactgaattaatggatttattaaaacgttttcacatcttgggcgtggaaatggaagcggcaggattatttggcgttgccgcagaatatggcgcgcgcgccggctgcattttaacggtttccgatcatattttgcgacaagaaaccaccacggcgctggaacggcaaacgcgttttcatgacatgatcacaattgctttggaagcggcagtacgtttggcgcattaa

SEQ ID NO: 45603 - protein, 237 aa, Dichelobacter nodosus VCS1703A
MTPHINAPAGAFAETVLFCGDPLRAQFIAHHFLKNAQEITNVRAMLGFTGEYQQHKLSVMGHGMGIPSCSIYAKELITEYGVKNLIRVGSCGAVLDEIKLHDVIIALSAATDSNVNRLRFRHYDFAATADYSIFSALIAAAAQQNITARVGTVFSTDSFYHADTELMDLLKRFHILGVEMEAAGLFGVAAEYGARAGCILTVSDHILRQETTTALERQTRFHDMITIALEAAVRLAH

SEQ ID NO: 45604 - DNA, 708 bp, Staphylococcus aureus subsp. aureus MRSA252
  CDS (1)..(708): transl_table=11
atgaaatcaacaccacacattaaaccaatgaatgacgtcgaaattgcagaaacggttctattgccaggagatccgttaagagctaagttcattgcagaaacatatttggacgatgtggaacagttcaatacagtgcgaaatatgtttggttttaccggaacatataaaggtaaaaaagtttctgtcatgggttcaggaatgggtatgccatctattggcatttactcttatgaattaattcatacatttggttgtaaaaaattaattcgcgttggttcttgtggcgcgatgcaagaaaacattgatttatatgatgtgattgttgcacaaggtgcctctactgattcaaattacgttcaacaatatcaattaccaggtcattttgcgccaattgcttcttatcagttattagaaaaagctgttgaaacagcacgtgacaaaggtgtacgtcatcatgtaggtaatgtgttatcaagtgatattttctataacgcggatacaacagcgagtgaacgttggatgcgtatgggtattttaggtgtagaaatggaatcagctgcattatacatgaatgcaatttacgctggtgtcgaagcattaggtgtgttcacagtgagcgatcatttaattcatgaaacgtcaacaacacctgaggaaagggaacgtgcatttacagatatgattgaaattgcactgtcattggtgtag

SEQ ID NO: 45605 - protein, 235 aa, Staphylococcus aureus subsp. aureus MRSA252
MKSTPHIKPMNDVEIAETVLLPGDPLRAKFIAETYLDDVEQFNTVRNMFGFTGTYKGKKVSVMGSGMGMPSIGIYSYELIHTFGCKKLIRVGSCGAMQENIDLYDVIVAQGASTDSNYVQQYQLPGHFAPIASYQLLEKAVETARDKGVRHHVGNVLSSDIFYNADTTASERWMRMGILGVEMESAALYMNAIYAGVEALGVFTVSDHLIHETSTTPEERERAFTDMIEIALSLV

SEQ ID NO: 45606 - DNA, 708 bp, Mesoplasma florum L1
  CDS (1)..(708): transl_table=4
atgacaccacacattagtgcaaaaaaagaagatattgcaaaaactgttttaatgccaggagacccattaagagctaagaaaattgctgaaacatatttagaaaatgttaagttagttaacgaagttagaaatatgttcatgtacacaggaacatataaaggtatacaagtaacaatagcaggaagcggaatgggctgcccaagtattggaatatattcatatgagctattcaatttttataatgtagaaaacattattagaattggttcagctggaagttacaaagaagaaatcaaagtttatgatgtttacaatgtaaaagaagcatatggagatagtaactatgctaaattagcagcaaatattgatgataaagttattaaagcaggagataaactttattcattgattgaaaaaattgctaaagataaaaaaattaaaacattaactggaagagcacattcagcagatgtattttaccgtcatgatgatattactgaatttgtaaaagaaaacaatttagatgttgttgaaatggaatctgttgctttatttgcaaatgcaataaaagctaaaaaacaagctgcatgtttattaacaatatcagataacttggtaacaaaagaggttacgacagccgaagaaagacaaaacaattttatgcaaatggttgaaattgctttagatgctgctgttgaatctaactaa

SEQ ID NO: 45607 - protein, 235 aa, Mesoplasma florum L1
MTPHISAKKEDIAKTVLMPGDPLRAKKIAETYLENVKLVNEVRNMFMYTGTYKGIQVTIAGSGMGCPSIGIYSYELFNFYNVENIIRIGSAGSYKEEIKVYDVYNVKEAYGDSNYAKLAANIDDKVIKAGDKLYSLIEKIAKDKKIKTLTGRAHSADVFYRHDDITEFVKENNLDVVEMESVALFANAIKAKKQAACLLTISDNLVTKEVTTAEERQNNFMQMVEIALDAAVESN

SEQ ID NO: 45608 - DNA, 714 bp, Streptococcus pyogenes MGAS10394
  CDS (1)..(714): transl_table=11
atgtctatccatatttctgccaaaaaaggcgatattgctgataaaattcttctacctggagaccctttgcgcgcgaaatttatcgctgaaaatttcctagaagatgcagtgtgttttaacgaagtgcgtaacatgtttggctacacaggaacttacaaagggcaccgcgtttctgtcatgggaactggtatgggaatgccttcgatctctatctatgctcgtgaattaatcgttgattacggtgtcaaaacattgatccgtgttggtactgcgggtgcgattgacccagaagttcatgtgcgtgaattggtgcttgcccaagcagcagcaaccaactcaaatattatccgtaatgacttcccagaatttgatttcccacaaattgctgattttggtttacttgacaaggcttaccatatcgccagagaaatgggagtaacaactcacgttgggaatgtgctttcttctgatgtcttttacactaacatgcctgagcgtaatatggctcttggtaaattgggtgttaaagccatcgaaatggaagcagcagctctttactatttagctgctcagcaccatgtcaaagcccttggaatcatgacgatctcagataacttgaatgatccaaccgaagatactacagctgaagagcgtcaaaccactttcactgatatgatgaaaattggtttggaaactttaattgccaatgactaa

SEQ ID NO: 45609 - protein, 237 aa, Streptococcus pyogenes MGAS10394
MSIHISAKKGDIADKILLPGDPLRAKFIAENFLEDAVCFNEVRNMFGYTGTYKGHRVSVMGTGMGMPSISIYARELIVDYGVKTLIRVGTAGAIDPEVHVRELVLAQAAATNSNIIRNDFPEFDFPQIADFGLLDKAYHIAREMGVTTHVGNVLSSDVFYTNMPERNMALGKLGVKAIEMEAAALYYLAAQHHVKALGIMTISDNLNDPTEDTTAEERQTTFTDMMKIGLETLIAND

SEQ ID NO: 45610 - DNA, 711 bp, Silicibacter pomeroyi DSS-3
  CDS (1)..(711): transl_table=11
atgacgatccatatcggcgccaatcccggagagattgcggaaacggttctattacccggcgatccttatcgcgcgaaatgggcagcggaaacgtttctggataacccggtcctggtgaatgaggttcgcggcatgttggggtttaccggcatgtggcgaggcaaccgggtgaccattcacgggtctggcatgggtatgccgtcactgtcgatctatgccaatgagctgatccgtgactatggggcgaagacactgatccgtatcggatcctgcggcggcatgcaggacagtgtcgaagttcgtgacgtgatcctggcaatgacggcatcgacgctgggcactccgtcgcgggggatctttcgcgagctgagctttgccccctgcgccgattggtccctgttgcacgcggctgcgcgtgcagccgaggacaagggcgtacggacccatgtgggcggcatctattcgtcggacgtgttttatgacgaacggcccgatctgaacgaacagatggtgcgccatggggtgctgggggtcgagatggaggccgccgagctttacattctggccgcacggcacaaatgccgggcgctggcggtgctgacggtttccgaccacctgctgaccggcgctgccctgcccagtgcagagcgcgaaaccagcttcggcgacatggtcgagattgcgctgcacgcagcctttcccggcgcctga

SEQ ID NO: 45611 - protein, 236 aa, Silicibacter pomeroyi DSS-3
MTIHIGANPGEIAETVLLPGDPYRAKWAAETFLDNPVLVNEVRGMLGFTGMWRGNRVTIHGSGMGMPSLSIYANELIRDYGAKTLIRIGSCGGMQDSVEVRDVILAMTASTLGTPSRGIFRELSFAPCADWSLLHAAARAAEDKGVRTHVGGIYSSDVFYDERPDLNEQMVRHGVLGVEMEAAELYILAARHKCRALAVLTVSDHLLTGAALPSAERETSFGDMVEIALHAAFPGA

SEQ ID NO: 45612 - DNA, 711 bp, Bacillus clausii KSM-K16
  CDS (1)..(711): transl_table=11
atgacagaattcaaacaaacccctcacattaatgcaaaaggagagatcgcggaaacggtccttcttcctggagacccgctccgggccaaatttattgccgaacgttttttgacggatgtcgtccaatttaatagtgtccgcaatatgtttggatttaccggtacttacaatggcaagcgtatttctgtcatgggaacgggaatgggaatgccgagcatgggcatttactcgtatgagctcattcatgtgttcggtgttaaaaatttgatccgggttgggtcctgtggcgcccttcaagatgatttgaacttatatgacgtcattttaggaatgggggcatcaaccaattccaactatgtaaaccaatatcacttgccaggtacattcgcgccacttgcttcttattcgttactcgaaaaagcgaaaaaagcggcagacgaaaaaggcgtgcctgtccatgtcggaaacatcctttccagcgacacattctataatgctgatgaagacgcagcagggaaatggcgtgatatgggaattttggggattgaaatggaagcggcggctttgtatatgaatgctgcccaagccggcgttaatgcgctttgcattttgacggtaagcgaccacatatttaaagaggaagaaacaacagctgaagagcgggaaacctcgttcacgaacatgatggaaattgccctagaactagcctaa

SEQ ID NO: 45613 - protein, 236 aa, Bacillus clausii KSM-K16
MTEFKQTPHINAKGEIAETVLLPGDPLRAKFIAERFLTDVVQFNSVRNMFGFTGTYNGKRISVMGTGMGMPSMGIYSYELIHVFGVKNLIRVGSCGALQDDLNLYDVILGMGASTNSNYVNQYHLPGTFAPLASYSLLEKAKKAADEKGVPVHVGNILSSDTFYNADEDAAGKWRDMGILGIEMEAAALYMNAAQAGVNALCILTVSDHIFKEEETTAEERETSFTNMMEIALELA

SEQ ID NO: 45614 - DNA, 705 bp, Silicibacter sp. TM1040
  CDS (1)..(705): transl_table=11
gtgactgtgcatattggctctcaaaaagatgatttcgccgaaaccgtcctgcttcccggcgatccctatcgcgccaaatgggcagcggagacatttctaagtgacgtgcgcctcgtcaatgaggtccgcggcatgctgggctatacgggcatgtggaacggccatcgggtctcgatccaaggcagcggcatggggatgccatccctgtcgatctatgccaatgagctgatccgggacttcgacgcccagaccttgatccgcatcgggtcctgtgggggcatgcagccccacgtcaaggtccgcgatgtgatcattgcgatgtcggcaaccagtgtgagcacgccgtcgcgcacgattttcagggatgtgaatttcgcgccgaccgcggactggaccctgctgcgcaacgcggtcaccgcagccgaggcacagggtctgtcaccgcatgtgggcgggatctactcctctgacaccttctatgacgaacgccctgatctcaacgaacagatggtccgccatggtgttcttggcgtggagatggaagcggccgagctttatacgcttgccgctcgctacggacgccgcgcccttgcggttctgaccgtttccgaccacctgcagaccggcgaggccctcccgtcggaagaacgcgaacgcagttttggagagatggtggaaatcgccctttctgcagcgtttgcataa

SEQ ID NO: 45615 - protein, 234 aa, Silicibacter sp. TM1040
MTVHIGSQKDDFAETVLLPGDPYRAKWAAETFLSDVRLVNEVRGMLGYTGMWNGHRVSIQGSGMGMPSLSIYANELIRDFDAQTLIRIGSCGGMQPHVKVRDVIIAMSATSVSTPSRTIFRDVNFAPTADWTLLRNAVTAAEAQGLSPHVGGIYSSDTFYDERPDLNEQMVRHGVLGVEMEAAELYTLAARYGRRALAVLTVSDHLQTGEALPSEERERSFGEMVEIALSAAFA

SEQ ID NO: 45616 - DNA, 720 bp, Myxococcus xanthus DK 1622
  CDS (1)..(720): transl_table=11
atggcgactcctcatatctccgctgcccctggtgacttcgctgacgtggtcctcatgcctggcgacccgctccgcgctcgttacatctccgaccgcttcctggaaggtgcccgcgaggtcacctccgtgcgcaacatgctcggcttcaccgggaccttccggggccggcgcgtgtcggtgatggggcacggcatgggcgttccctccatctccatctacgccaccgagctcatcaagacgtatggggtgcgcgtgatcatccgcgtgggcagctgcggcgcgctgagcaccgacgtgaaggtccgggaggtcatcgtcgcgacgggggccggcacggactccaacgtgaatcggatgcggctgatggggcatgacttcgccgcggtggcggacttcacgctcgcgcgccgggccatggaggcggcggagcggcgcaacaagcctgtgcgcgccggccccgtcttcacctccgacctcttctaccacccgcaggagcagctcaacgccaccctggcgcggatgggtgtcctggccgtcgagatggaggtcgccggcctctacggcgtggccgcggagtcgggcgcccgcgcgctggggctgctcacggtgtcggaccacatcatcaccggggagagtctcacgccgcaggagcggcagacgacgttcgacgagatgattgaactcgccctggacgtcgcacacgccgaacccacgccgtag

SEQ ID NO: 45617 - protein, 239 aa, Myxococcus xanthus DK 1622
MATPHISAAPGDFADVVLMPGDPLRARYISDRFLEGAREVTSVRNMLGFTGTFRGRRVSVMGHGMGVPSISIYATELIKTYGVRVIIRVGSCGALSTDVKVREVIVATGAGTDSNVNRMRLMGHDFAAVADFTLARRAMEAAERRNKPVRAGPVFTSDLFYHPQEQLNATLARMGVLAVEMEVAGLYGVAAESGARALGLLTVSDHIITGESLTPQERQTTFDEMIELALDVAHAEPTP

SEQ ID NO: 45618 - DNA, 711 bp, Rubrobacter xylanophilus DSM 9941
  CDS (1)..(711): transl_table=11
atgccggtacacgtgcgtgcggagcccggggacttcgccgagagcgtcctgctcccgggcgacccgctgcgggccgagtacatagccaggaccttcttcgagagcccccgcctggtcacccgggagcgcggcatgctcggctacaccggctcctaccggggcaggcccgtctcggtgcaggccaccgggatgggctgcccgagcgccgccatcgtggtggaggagctcgtccagctcggggcccgcaacctgctgcgggtgggcacctgcggcggctaccaccgggagctgcagctcggggacctcgtggtggccaccgccgccgccccgcaggacggcaccgtctcctccctcacccgcggcgtcccctacgccccggccgcccacttcgacgtcgtgcacgccgcctaccacgccgccgagcgctcggggcgccggaccttcatggggccggtggtcagctccgacctcttctacgacccggtggaggacccggccgggctctggagccggctcggggtgctggcggtggagatggaggcggccgccatcttcaccatagccgccatgcgcggggcgcgcgccggctgcctgctgaccgtctcggacaccatcggcgaggaggtcgtcaggatcagcgacgaggacctgcgcgccgcggtggacaacatggtggagctggcgctcgacaccctgcacggcttaaactag

SEQ ID NO: 45619 - protein, 236 aa, Rubrobacter xylanophilus DSM 9941
MPVHVRAEPGDFAESVLLPGDPLRAEYIARTFFESPRLVTRERGMLGYTGSYRGRPVSVQATGMGCPSAAIVVEELVQLGARNLLRVGTCGGYHRELQLGDLVVATAAAPQDGTVSSLTRGVPYAPAAHFDVVHAAYHAAERSGRRTFMGPVVSSDLFYDPVEDPAGLWSRLGVLAVEMEAAAIFTIAAMRGARAGCLLTVSDTIGEEVVRISDEDLRAAVDNMVELALDTLHGLN

SEQ ID NO: 45620 - DNA, 708 bp, Clostridium perfringens ATCC 13124
  CDS (1)..(708): transl_table=11
atgagtattcatataggtgcaaaagaaggtcaaatagccgaaacaattttattaccaggagatcctttaagagctaaatttatagctgaaacttttttagaaaatccagtttgttacaatgaagttagaggaatgttaggatatacaggaacatataaaggaaaaaaaatatcagttcaaggtactggtatgggggttccttcaatttctatttacgttaatgaacttataagagattatggagttaaaaatttaataagagtaggtactgctggcggtatgcaagaagatataaaagttagagatttagttttagcaatgtcatctcatactgattctgcaataaataaagttagatttaacggtttagattttgctccaacagcatcatttaaacttttaaaggccgcttacgatactgccgttgaaaaaggatattctcctaaggttggtagcgtattcacagctgatagcttctataatgataatcctgaagcatggaaacaatgggctaaatttggtactttagctgttgaaatggaaactgcagctttatataccttagcagctaagtatggtgttaatgcgttaacaatacttactataagtgatcatttaattactgctgaggaaactactagtgaggagcgtcaaactaccttcacaaagatgatggaagttgctcttgatgctgctataactttataa

SEQ ID NO: 45621 - protein, 235 aa, Clostridium perfringens ATCC 13124
MSIHIGAKEGQIAETILLPGDPLRAKFIAETFLENPVCYNEVRGMLGYTGTYKGKKISVQGTGMGVPSISIYVNELIRDYGVKNLIRVGTAGGMQEDIKVRDLVLAMSSHTDSAINKVRFNGLDFAPTASFKLLKAAYDTAVEKGYSPKVGSVFTADSFYNDNPEAWKQWAKFGTLAVEMETAALYTLAAKYGVNALTILTISDHLITAEETTSEERQTTFTKMMEVALDAAITL

SEQ ID NO: 45622 - DNA, 717 bp, Haemophilus somnus 129PT
  CDS (1)..(717): transl_table=11
atgacaccacatattaacgcaccagccggtgcatttgccgatgttgttttaatgccgggagatccgttacgtgcaaaatatattgcagaaacctttttagaaaatgcacaagaggtaacaaatatccgtaatatgctcggctatacaggtacttacaaaggacgaaaaatatcagtgatgggacatggaatgggtattccgtcttgctccatttatgccaaagaattgatcacagaatatggggtaaaaaaaattattcgtgtcggttcttgtggtgcagtcaacatggatgtcaaaattcgtgatgtcattattggtcttggtgcttgtaccgactcaaaagtaaatcgtattcgcttcaaagataatgatttcgctgccattgcggattttggcatggcacaagcagccgtacaggctgcaaaaaataaaggaattgatgtaaaagtaggtaacttgttttccgccgacttattttatacaccagacccagaaatgtttgatgtcatggaaaaatatggcattttaggtgtggaaatggaggctgccggcatttatggtgtagcagctgaatttaaagccaaagccttaacaatctgtactgtttctgatcatatccgtacgcatgaacaaaccagtgcagaagagcgacaattaactttcaatgaaatgatcgaaattgcattagaatctgttttgttgggggattcgttataa

SEQ ID NO: 45623 - protein, 238 aa, Haemophilus somnus 129PT
MTPHINAPAGAFADVVLMPGDPLRAKYIAETFLENAQEVTNIRNMLGYTGTYKGRKISVMGHGMGIPSCSIYAKELITEYGVKKIIRVGSCGAVNMDVKIRDVIIGLGACTDSKVNRIRFKDNDFAAIADFGMAQAAVQAAKNKGIDVKVGNLFSADLFYTPDPEMFDVMEKYGILGVEMEAAGIYGVAAEFKAKALTICTVSDHIRTHEQTSAEERQLTFNEMIEIALESVLLGDSL

SEQ ID NO: 45624 - DNA, 711 bp, Shewanella sp. ANA-3
  CDS (1)..(711): transl_table=11
atggcaacaccacacattaatgctgtagagggcgcattcgctgagacagttctgtttccaggcgatccattacgtgcaaaatatattgctgaaacattcttagaaaatgttgagcaagtgactgacgttcgaaacatgctaggttttaccggtacttacaaaggtaaacgtatttctgttatgggttcaggcatgggtattccttcatgctcaatctatgcaactgaattaattaaagactacggtgttaagaacctgatccgcgtgggtacttgtggcgcgatcagcactgacgttaaagtgcgcgatgtgatcatcggcatgggtgcttgtaccgattctcaagttaaccgtttacgtttcaaaggccaagatttcgctgctatcgcgaactacgagctgatgaatgccgtgatcgaatctgccaaagtgaaaggcactaagatccgtgttggtaacgttttctctgccgatctgttctacactcctgatccacaaatgtttgacgtgatggaaaaaatgggcgtgttaggcgtagagatggaagccgctggtttatatggtgttgcccatgaattcggtgctcgtgcactgtgtgtggtaactgtatctgaccatatccgtactggcgagaaaaccacttctgatgagcgtcaaaccacgttcaacgatatgatcgtgatgacattagacgcagcaattacgctgtaa

SEQ ID NO: 45625 - protein, 236 aa, Shewanella sp. ANA-3
MATPHINAVEGAFAETVLFPGDPLRAKYIAETFLENVEQVTDVRNMLGFTGTYKGKRISVMGSGMGIPSCSIYATELIKDYGVKNLIRVGTCGAISTDVKVRDVIIGMGACTDSQVNRLRFKGQDFAAIANYELMNAVIESAKVKGTKIRVGNVFSADLFYTPDPQMFDVMEKMGVLGVEMEAAGLYGVAHEFGARALCVVTVSDHIRTGEKTTSDERQTTFNDMIVMTLDAAITL

SEQ ID NO: 45626 - DNA, 705 bp, Shewanella sp. ANA-3
  CDS (1)..(705): transl_table=11
atgactgcgcacattaatgcacaacctactgattttgctgaaactgttattatgcctggcgatccgctacgggcgaaatatattgccgaaacctaccttactgatgccgtagaagtcaccaacgttcgcaatatgctgggctacacaggttattaccaagggcagcgtatttctgtaatggggcacggtatggggatttcctcaatggtgctctatggccatgagttgattaatttttttggtgtgaagcgcatcattcgtatcggcagtttaggcgcaacccaaaaacacgtgcaaatgcgggatgtgattttagcgcaggcggcgggtaccgactcacccacgaatgccaagcgtagcagtggctatcatatggcaacctcggccaccttttccttactgcacaaagcctatacccaagccaatgaaaaaggcattagcgtgaaagttggcaacgtatttagtggcgatctttattatgatcccgacgaagatatgatcccagcactggagcgttttggggtattgggtatcgatatggaagtcgcgggtctttatggcttagcgcatcaacagggcattgaatcattggccattctcacggtatccgatcattgcctaacgggtgaggaaaccaccgccgaagaacgccagttatccttcaataatatgatcgaacttgcgctcgcgactgcgctgaattag

SEQ ID NO: 45627 - protein, 234 aa, Shewanella sp. ANA-3
MTAHINAQPTDFAETVIMPGDPLRAKYIAETYLTDAVEVTNVRNMLGYTGYYQGQRISVMGHGMGISSMVLYGHELINFFGVKRIIRIGSLGATQKHVQMRDVILAQAAGTDSPTNAKRSSGYHMATSATFSLLHKAYTQANEKGISVKVGNVFSGDLYYDPDEDMIPALERFGVLGIDMEVAGLYGLAHQQGIESLAILTVSDHCLTGEETTAEERQLSFNNMIELALATALN

SEQ ID NO: 45628 - DNA, 732 bp, Nocardioides sp. JS614
  CDS (1)..(732): transl_table=11
gtgagcacccacatcggcgcccggccgggcgacatcgcccccctcgtcctcatgcccggagacccgctgcgcgcccggtggatcgcagacacgttcctggacgacgcgcgctgctacaccgaggtgcgcggcatgtacggctacaccggcagctggcagggtcagcgcgtctcggtgcagggctccgggatgggccagccgtcgctggcgatctacgccaacgagctgttccgggagtacgacgtgcagtcgatcatccgggtcggctcgtgcggcgcgctgagcgagcggctcgccgtacgcgacatcgtgatcgcctcgggcgcctgcaccgactcctcgatgaaccggatccggttcgaggggctggactacgcgccggtcgccgacttcggcctgctccgcgccgcccacgacgcggccacggcgaagcagctcgccgagggggtgcacgtcgggctgatcttcagcagcgactcgttctaccccgccaggcccgagctggccgcacgcatggtcgacttcggcgtactggcggtcgagatggaggcgagcgcgctctacacgctggccgccaagcacggccggcgggcactcacgatctgcacggtcagcgaccacgtcgtcaccggcgaggagacgtccgcgcaggagcgcgagcagacgttcgggacgatggtggagatcgcgctcgccgccgggctcgcccaggccgtggcgccccaggactaa

SEQ ID NO: 45629 - protein, 243 aa, Nocardioides sp. JS614
MSTHIGARPGDIAPLVLMPGDPLRARWIADTFLDDARCYTEVRGMYGYTGSWQGQRVSVQGSGMGQPSLAIYANELFREYDVQSIIRVGSCGALSERLAVRDIVIASGACTDSSMNRIRFEGLDYAPVADFGLLRAAHDAATAKQLAEGVHVGLIFSSDSFYPARPELAARMVDFGVLAVEMEASALYTLAAKHGRRALTICTVSDHVVTGEETSAQEREQTFGTMVEIALAAGLAQAVAPQD

SEQ ID NO: 45630 - DNA, 717 bp, Haemophilus somnus 2336
  CDS (1)..(717): transl_table=11
atgacgccacatattaacgcaccagccggtgcatttgccgatgttgttttaatgccgggagatccgttgcgtgcaaaatatatcgcagaaacatttttagaaaatgcacaagaagtaacaaatgtccgtaatatgcttggttacacaggtacttacaaaggacgaaaaatatcagtgatgggacatggaatgggtattccgtcttgctccatttatgccaaagaattgatcacagaatatggcgtaaaaaaaattattcgtgtcggttcttgtggtgcagtcaacatggatgtcaaaattcgtgatgtcattattggtcttggtgcttgtaccgactcaaaagtaaatcgtattcgcttcaaagataacgatttcgctgccattgcggattttggcatggcacgagcagccgtacaggctgcaaaaaataaaggaattgatgtaaaagtaggtaacttgttttccgccgatttattttatacaccagacctggaaatgtttgatgtcatggaaaaatatggcattttaggtgtggaaatggaggctgccggcatttatggtgtagcagctgaatttaaagccaaagccttaacaatctgtactgtttctgatcatatccgtacgcatgaacaaaccagtgcagaagagcgacaattaactttcaatgaaatgatcgaaattgcgttagaatctgttttgttggaggactcactataa

SEQ ID NO: 45631 - protein, 238 aa, Haemophilus somnus 2336
MTPHINAPAGAFADVVLMPGDPLRAKYIAETFLENAQEVTNVRNMLGYTGTYKGRKISVMGHGMGIPSCSIYAKELITEYGVKKIIRVGSCGAVNMDVKIRDVIIGLGACTDSKVNRIRFKDNDFAAIADFGMARAAVQAAKNKGIDVKVGNLFSADLFYTPDLEMFDVMEKYGILGVEMEAAGIYGVAAEFKAKALTICTVSDHIRTHEQTSAEERQLTFNEMIEIALESVLLEDSL

SEQ ID NO: 45632 - DNA, 726 bp, Fusobacterium nucleatum subsp. vincentii ATCC 49256
  CDS (1)..(726): transl_table=11
atgaaaggagttcaagttatgagtatacacataggagcaaaagaaggagatattgtagaaactgtcttgttacctggtgaccccaaaagagcaaaatggatagcagaaaactatttagaaaatgctttttgttacactgatattagaggtatgttaggttttacagggacatataaagggaaaagaatatctgtacaagggacaggaatgggaattccttcaatatctatctatataacagaacttatgaaagactatggagttaaaaatttaataagagttggttcagcaggttcttatcaagaagatataaaagttagagatgttgttatagctatgtccacttcaactgattctaatattaataatagaagatttaatggaggaaatttttcccctacggctaattttgagctattttcattagctttaaaagttgcagaagaaaaaaatataaaaataaaagcaggaaatgtcttaacaagtgatgagttttataatgatgatagtgattactataaaaaatgggcggattttggaatattagcagttgaaatggaaactgctggactctatacattagctgccaaatataaagctaaggcactttcaattttaactatttcagattcattagtcagtccagaaattacaagtgcagaagaaagagaaaaaacattctctgaaatgatagaattagccttagaaatagctgttagaatatag

SEQ ID NO: 45633 - protein, 241 aa, Fusobacterium nucleatum subsp. vincentii ATCC 49256
MKGVQVMSIHIGAKEGDIVETVLLPGDPKRAKWIAENYLENAFCYTDIRGMLGFTGTYKGKRISVQGTGMGIPSISIYITELMKDYGVKNLIRVGSAGSYQEDIKVRDVVIAMSTSTDSNINNRRFNGGNFSPTANFELFSLALKVAEEKNIKIKAGNVLTSDEFYNDDSDYYKKWADFGILAVEMETAGLYTLAAKYKAKALSILTISDSLVSPEITSAEEREKTFSEMIELALEIAVRI

SEQ ID NO: 45634 - DNA, 717 bp, Haemophilus influenzae R2846
  CDS (1)..(717): transl_table=11
atgactccacatattaacgcgcctgaaggtgcatttgctgatgttgttttaatgcctggcgatccacttcgtgcaaaatacattgcagaaacttttttacaagatgttgttgaagtaacgaatgttcgtaatatgcttggttttactggaacttataaaggtcgtaaaatttctattatggggcacggaatggggattccatcttgctctatttatgcaaaagaattaatcactgaatatggcgtgaaaaaaattatccgtgtaggttcttgtggctctgttcgtatggacgtgaaagtgcgcgatgtgattatcggtttaggtgcatgtactgattcaaaagtaaaccgtattcgtttcaaagataacgactttgcagctattgctgacttcgatatggcgcaagctgctgttcaagctgcaaaagcaaaaggcaaagccgttcgtgtaggtaatttattctcggcggatttattctatacacccgatgttgaaatgttcgatgtaatggaaaaatacggaatcttaggcgtggaaatggaagcggctggaatttatggtgtggctgcagaatatggtgcaaaagcattaacgatttgtaccgtgtctgaccatattcgtactcacgaacaaaccacggcagaagaacgtcaattaacattcaatgatatgattgaaattgcgttagattcagtattaattggtgatgcgcaataa

SEQ ID NO: 45635 - protein, 238 aa, Haemophilus influenzae R2846
MTPHINAPEGAFADVVLMPGDPLRAKYIAETFLQDVVEVTNVRNMLGFTGTYKGRKISIMGHGMGIPSCSIYAKELITEYGVKKIIRVGSCGSVRMDVKVRDVIIGLGACTDSKVNRIRFKDNDFAAIADFDMAQAAVQAAKAKGKAVRVGNLFSADLFYTPDVEMFDVMEKYGILGVEMEAAGIYGVAAEYGAKALTICTVSDHIRTHEQTTAEERQLTFNDMIEIALDSVLIGDAQ

SEQ ID NO: 45636 - DNA, 708 bp, Exiguobacterium sibiricum 255-15
  CDS (1)..(708): transl_table=11
atgagcgtacacattaacgcagcagaaggtcagattgcagaaaccgtattacttccaggagatccacttcgtgcaaaatatattgccgatacatttttagaggatgtcgttctttataacgaagtccgcggaatgtatggatttacaggaacgtataaaggtaaaaaagtttcggtccaaggaactggtatgggcgttccttcgatgtcgatttacgccaatgaactcgttcaatcatacggcgcaaaaaacctgattcgtgtcggtactgccggcggaattacaccggacgtcaaagttcgcgacgtcgtcatcgccatgagtgcatcacacgatatggcacaaaaccgcgtccgcttcaacggactcgattacgcgccgacagcatcgtttgacttattgcacaaagcgtatatgacagcgaaagagcacggaatcgacgcaaaagtgggtcaaatctttacgacagatcaattttatcaagatgatttccaccatttcaaaaaatgggcggacttcggttgcctcgcaatcgagatggaagcggcaggcctctacacacttgcggccaaacataaagtcaacgccttgacgatcttgacgatttccgatcacttgttgacgggtgaagagacaacagcagaagaacgtcaaacgacgtttaacgacatgatgaaagtcgcacttgaaacagcaatccaactgtaa

SEQ ID NO: 45637 - protein, 235 aa, Exiguobacterium sibiricum 255-15
MSVHINAAEGQIAETVLLPGDPLRAKYIADTFLEDVVLYNEVRGMYGFTGTYKGKKVSVQGTGMGVPSMSIYANELVQSYGAKNLIRVGTAGGITPDVKVRDVVIAMSASHDMAQNRVRFNGLDYAPTASFDLLHKAYMTAKEHGIDAKVGQIFTTDQFYQDDFHHFKKWADFGCLAIEMEAAGLYTLAAKHKVNALTILTISDHLLTGEETTAEERQTTFNDMMKVALETAIQL

SEQ ID NO: 45638 - DNA, 714 bp, Streptococcus suis 89/1591
  CDS (1)..(714): transl_table=11
atgtctatccatatttccgcaaaaccaggcgaaatcgctgataagattttgcttcctggtgatccgcttcgtgctaaatttatcgctgaaaattttcttgaagacgcagtttgcttcaatgaagtccgcaatatgtttggctatactggtacttacaaaggtcaccgtgtttctgtcatgggaacaggtatgggaatgccatccatctctatctatgctcatgaattgattaacgaatatggtgtgaaaaaactaattcgtgtgggaacagcaggttctttgaatgaggatgtccatgtccgtgaattggttttggcgcaagcagccgcgaccaactctcgcatgattaatattgactggccagagtacgatttgccacaaatcgctgattttgatcttttagataaggcttatcatatcgccaaagaactcaacatgacaacgcatgttggcaatgttttatcatcagatagtttctattctccaaaattgtttagtcgcaacttagaattaggtcaactaggtgtcaaggctgtagaaatggaagcagctgcactttattacctaggtgctaagtttggcgttcaaacgcttgccattatgacgatttcagatagcttggttaatccagaggaaaacaccacagcagaagagcgtcaaaatactttcacggatatgatgaaagttggtttggaaactctgattgcagaataa

SEQ ID NO: 45639 - protein, 237 aa, Streptococcus suis 89/1591
MSIHISAKPGEIADKILLPGDPLRAKFIAENFLEDAVCFNEVRNMFGYTGTYKGHRVSVMGTGMGMPSISIYAHELINEYGVKKLIRVGTAGSLNEDVHVRELVLAQAAATNSRMINIDWPEYDLPQIADFDLLDKAYHIAKELNMTTHVGNVLSSDSFYSPKLFSRNLELGQLGVKAVEMEAAALYYLGAKFGVQTLAIMTISDSLVNPEENTTAEERQNTFTDMMKVGLETLIAE

SEQ ID NO: 45640 - DNA, 711 bp, Sulfitobacter sp. EE-36
  CDS (1)..(711): transl_table=11
atgacaattcatattggcgcaaaacccggcgatattgccgaaacagtccttatgcccggcgacccgtatcgcgcgaaatgggctgctgaaacattccttaaagatgcaaagcttgtaaatgaagtgcgcggcatgctgggtttcaccggcacatggaatggtaaccgcgtcactattcaaggctctggcatggggatgccctcgctgtcgatttatgccaatgaattgatttccgaatacaacgcgcaaacccttattcggattggatcttgtggcgggatgcagccgcaggttggtattcgcgatgtcattattgccatgaccgccacgacaattacctcgccttcttccggtatcttccgcgagatgaattacgccccctgcgccgattggtccctgctgcgtgctgccgtggacgcggcagaggcgaaaggcacgaaaacccatgtcggcgggatctattcttcggatgtcttttatgccgaacgccccgatctggacgagcagatgacccgccacggtattctgggtgtcgagatggaagcggcagagctttataccctcgccgcgcgtcacaaacgccgtgcgctggcggtgctgacggtcagcgaccacctgcaaaccggcgaagcgctgcccgcggaagagcgcgagaaatcctttggcgatatggtagaaatcgcgctacaggcggctttccccaacagctga

SEQ ID NO: 45641 - protein, 236 aa, Sulfitobacter sp. EE-36
MTIHIGAKPGDIAETVLMPGDPYRAKWAAETFLKDAKLVNEVRGMLGFTGTWNGNRVTIQGSGMGMPSLSIYANELISEYNAQTLIRIGSCGGMQPQVGIRDVIIAMTATTITSPSSGIFREMNYAPCADWSLLRAAVDAAEAKGTKTHVGGIYSSDVFYAERPDLDEQMTRHGILGVEMEAAELYTLAARHKRRALAVLTVSDHLQTGEALPAEEREKSFGDMVEIALQAAFPNS

SEQ ID NO: 45642 - DNA, 705 bp, Oceanicola batsensis HTCC2597
  CDS (1)..(705): transl_table=11
atgaccatccatatcggcgccgagcccggccagatcgccgaaaccgtgctgatgcccggcgacccctaccgcgcgaaatgggcggcggaaacctttctcgagggtgccgagctggtcaacgaggtgcgcgggatgctgggcttcaccggcacctggagggggcatcgcgtgaccatccagggctcggggatggggatgccctcgctctcgatctatgccaacgaactgatccgggactacggggcgcggacgctgatccgtatcggctcctgcggggcgatgcagagccatgtgaagatccgcgacgtcatcctcgccatgtcggcgagttcgatctcgacgccctcgctggggttcttcagggaggtcaactttgccccgaccgccgatttcggcctgctgcacggcgccttccaagcggccgaggcgcgcggcgtcaccacgcataccggcgggatctattccgccgacgttttctatgccgaacgccccgacctcgatgaggcgatggagcggcacggcatcctcgcggtcgagatggaggcggccgagctctacaccgtggccgcgcgccacggctgccgggcgctggcggtgctgaccgtgtcggatcacctcaagacgcacgaggccctgccggcggaggaccgggagaagagctttggcgacatggtggagatcgcgctggaggcggccttcggctga

SEQ ID NO: 45643 - protein, 234 aa, Oceanicola batsensis HTCC2597
MTIHIGAEPGQIAETVLMPGDPYRAKWAAETFLEGAELVNEVRGMLGFTGTWRGHRVTIQGSGMGMPSLSIYANELIRDYGARTLIRIGSCGAMQSHVKIRDVILAMSASSISTPSLGFFREVNFAPTADFGLLHGAFQAAEARGVTTHTGGIYSADVFYAERPDLDEAMERHGILAVEMEAAELYTVAARHGCRALAVLTVSDHLKTHEALPAEDREKSFGDMVEIALEAAFG

SEQ ID NO: 45644 - DNA, 702 bp, Pseudoalteromonas tunicata D2
  CDS (1)..(702): transl_table=11
atgagcactcctcacatcaacgcaactttaggcgattttgccgaaacagttctaatgccaggcgatcctcttcgcgctcaatatattgcagagaactttttagacgatgcgcgtcaagtcactggcgtgcgcaatatgttcggctttacaggaacttacaaaggtaaacctgtcagcattatggcatctggtatggggatcccatcaatgtctatttatgctcgcgaactaatttgtagctacaacgtaaaaaatcttatccgtattggcacttgtggcggtattggatcagaaataaaaattcgtgacgttattttcgctcaaggcgcaagcacagactcaaatgttaatcgtgcccgtgttcgtggttatgattttgcagcgattgcggattttggtttactcgaaaatggcgttaacgcagctcgtaacttaggcgtcaatgtaaaagtgggtaatgtattcaccacagatacattctaccaagcagacccgactttttatgctgacttagataaattaggcgtattggcagttgatatggaaacagccggtttatacggcgtagcggctgagtacggcgttaaagctatggcactatttacagtgagtgatcatgtgatcacgggtgaagcaacaccagctgaagagcgtcaaaacacattcaatgaaatggttaaaattgccctagaatcaatttga

SEQ ID NO: 45645 - protein, 233 aa, Pseudoalteromonas tunicata D2
MSTPHINATLGDFAETVLMPGDPLRAQYIAENFLDDARQVTGVRNMFGFTGTYKGKPVSIMASGMGIPSMSIYARELICSYNVKNLIRIGTCGGIGSEIKIRDVIFAQGASTDSNVNRARVRGYDFAAIADFGLLENGVNAARNLGVNVKVGNVFTTDTFYQADPTFYADLDKLGVLAVDMETAGLYGVAAEYGVKAMALFTVSDHVITGEATPAEERQNTFNEMVKIALESI

SEQ ID NO: 45646 - DNA, 711 bp, Photobacterium sp. SKA34
  CDS (1)..(711): transl_table=11
atggccaccccacatattaacgcagagcttggtgattttgcagaaacagttctaatgccaggtgatcctctacgtgctcagtttattgctgaaacttacctagataatgttaagcgtgtttgtgacgtacgtagtatgtatggctacaccggcacttataaaggtcaacgtatttcggttatggggcatggtatgggtattccctcatgctctatttatgttcacgaattaattaaagactttggtgttaaaaatattatccgtatcggtagctgtggcgctgtccatgatgatgtaaaactgatggatgtgatcatcggtatgggagcctcaacagattcaaaagtaaaccgtattcgcttctcaaatcatgattttgcagcaattgcggattatcaattattagaaactgcggtaaatcaagcacgggcgcagaaagtaccggttcgtgtcggtaatgttttttctgctgacttattctacagtccagaaagcgatcttttcgataaaatggaaaagctaggtatccttggcgtagatatggaggcggcaggtatttacggcgttgctgccgagttaggtgcaaaagcactgactattctaacggtttctgatcatatcaaacgtggtgaaaagctcagtgcagaagatcgtcaaaaatcatttaatgaaatgatgaatatcgcactagaaacagcaatttctttataa

SEQ ID NO: 45647 - protein, 236 aa, Photobacterium sp. SKA34
MATPHINAELGDFAETVLMPGDPLRAQFIAETYLDNVKRVCDVRSMYGYTGTYKGQRISVMGHGMGIPSCSIYVHELIKDFGVKNIIRIGSCGAVHDDVKLMDVIIGMGASTDSKVNRIRFSNHDFAAIADYQLLETAVNQARAQKVPVRVGNVFSADLFYSPESDLFDKMEKLGILGVDMEAAGIYGVAAELGAKALTILTVSDHIKRGEKLSAEDRQKSFNEMMNIALETAISL

SEQ ID NO: 45648 - DNA, 723 bp, Photobacterium sp. SKA34
  CDS (1)..(723): transl_table=11
atggctactccacatattaatgctgaaatgggtgattttgcagatgtagttttaatgccgggcgatccgcttcgtgctaaatacatcgctgaaactttcctagatgatgcaaaagaagtatgtaatgtacgtagtatgttaggcttcacgggcacttacaaaggtcgtaagatctctgttatgggtcacggtatgggtattccatcatgttctatctacgcaacagaattaatcaaagattttggtgtgaagaagatcattcgtgtgggtagttgtggtgcagtacgtgatgacgttaagctacgtgacgttgttatcggtatgggtgcatcaacagattctaaagtaaaccgtattcgttttggcggtcatgactttgcagcgattgctgatttcggcatggtacaaaatgcggtagatgcagctaaagcgaaaggtattccagttaaagtgggtaatatcttctctgcggatctgttctacaatcctgattttgaatttttcaaaacaatggataagtacggcatcgttggcgttgaaatggaagcggctggtatctatggtgttgcagctgagtttggtgcaaaagcattaactatctgtactgtttctgatcacattctacgtggtgaagcaacaacatctgaagagcgtcaattgacattcaatgagatgatcgaaatcgcgttagattctgtgatcctaggtgatgcagaagcataa

SEQ ID NO: 45649 - protein, 240 aa, Photobacterium sp. SKA34
MATPHINAEMGDFADVVLMPGDPLRAKYIAETFLDDAKEVCNVRSMLGFTGTYKGRKISVMGHGMGIPSCSIYATELIKDFGVKKIIRVGSCGAVRDDVKLRDVVIGMGASTDSKVNRIRFGGHDFAAIADFGMVQNAVDAAKAKGIPVKVGNIFSADLFYNPDFEFFKTMDKYGIVGVEMEAAGIYGVAAEFGAKALTICTVSDHILRGEATTSEERQLTFNEMIEIALDSVILGDAEA

SEQ ID NO: 45650 - DNA, 702 bp, Flavobacteria bacterium BBFL7
  CDS (1)..(702): transl_table=11
atgagtacacatatagaagccaaaaaaggagaaattgcggacacagttctacttcctggagatcctatgcgagcaaaatggatagctgaaacctttctggataacgcaatttgttataatgatgtacgaggcatgttgggctatacgggaagctataaaggtaagcctgtatctgtacaaggaaccggtatgggaataccgtctgcacttatctactgtcatgaattaattaatgattatggagtaaagaatttgatacgtgtaggatctgctggctcttatcaaaaggatgtagcgataagagatattgtgattgcaatggcggccagtacgacatctggaattaataattcaagatttaagaatgccgactactcgcctactgcaaattttgatttatttcttaaagcatgcctttatgccaaagataaaaatatacctataaaagctgggaatatcctatctgcagatgagttctatgaagacgattttgagaactataaacaatgggcagactatggtgtattatgtgtagaaatggaaactgctggactatatactatcgcagcaaaacacaatgtaaaggcactttccatacttacgatatcagattcactagttactggagaacacaccacgtctgaagaaagagaaacaacatttcaaaaaatgattgagatagcactagccacgttagagtga

SEQ ID NO: 45651 - protein, 233 aa, Flavobacteria bacterium BBFL7
MSTHIEAKKGEIADTVLLPGDPMRAKWIAETFLDNAICYNDVRGMLGYTGSYKGKPVSVQGTGMGIPSALIYCHELINDYGVKNLIRVGSAGSYQKDVAIRDIVIAMAASTTSGINNSRFKNADYSPTANFDLFLKACLYAKDKNIPIKAGNILSADEFYEDDFENYKQWADYGVLCVEMETAGLYTIAAKHNVKALSILTISDSLVTGEHTTSEERETTFQKMIEIALATLE

SEQ ID NO: 45652 - DNA, 720 bp, Vibrio sp. Ex25
  CDS (1)..(720): transl_table=11
atggcaactccacatatcaatgctgaaatgggtgcattcgcagacgtcgtactgatgccgggtgacccgctacgtgcaaaatacatcgcagaaaccttccttgaagacgttgtgcaagtgtgtgatgtgcgtaatatgttcggttacacaggcacatacaaaggtcgtaagatctcggttatgggccacggtatgggtatcccatcatgctcgatttacgcaacggagctaattaaagacttcggcgtgaagaaaattatccgtgttggtagctgtggcgcagtaaacgaagacatcaaagtgcgtgatgttgtgatcggcatgggcgcgtgtacggattctaaagtgaaccgtatccgttttaaaggtcatgactttgcagcaatcgcagactacaaaatggttcgcgcggcagaagacgcagcaaaagcacgtggcattgatgtgaaagtcggtaacctattttcagcggagcttttctacacgccagatccagaaatgttcgacgtaatggacaagtacggcattgttggtgttgaaatggaagcggcgggtatttacggcgtagcggcagaatacggtgcaaaagctctgacaatctgtacggtttcagatcacatcaaaacgggtgagcaaacaacttctgatgagcgtcaaacaacattcaacgacatgatgctaatcgcactagattcagtattgctaggcgacgaagaataa

SEQ ID NO: 45653 - protein, 239 aa, Vibrio sp. Ex25
MATPHINAEMGAFADVVLMPGDPLRAKYIAETFLEDVVQVCDVRNMFGYTGTYKGRKISVMGHGMGIPSCSIYATELIKDFGVKKIIRVGSCGAVNEDIKVRDVVIGMGACTDSKVNRIRFKGHDFAAIADYKMVRAAEDAAKARGIDVKVGNLFSAELFYTPDPEMFDVMDKYGIVGVEMEAAGIYGVAAEYGAKALTICTVSDHIKTGEQTTSDERQTTFNDMMLIALDSVLLGDEE

SEQ ID NO: 45654 - DNA, 702 bp, Alteromonadales bacterium TW-7
  CDS (1)..(702): transl_table=11
atgagtactcctcatataaatgcaaatgttggtgatttcgccgaaacagttttaatgccaggcgatccgctacgtgcgcaatatattgctgaaaactttttagatgatgcggtacaagtaactggtgtacgcaacatgtttggctttacaggtacttacaaaggtaagccagtaagcattatgggttcaggcatgggtattccatcaatgtctatttatgcacgtgagctaattgttagctttggcgtaaaaaacattatacgcattggtacatgtggcggtattggtactgatattaaaatccgtgacgtaatttttgcacaaggtgcaagcacagactcaaacgtaaaccgtgcacgtgttcgtggttacgatttttctgcaattgcagacttcgacctacttttaaacggcgttaatgcagcaaaagagctaggtattaaagcaaaagtaggtaacgtattcacaaccgacactttctaccaagcagacgacactttctacaaagatttagataagttaggcgttcttgcagtagatatggaaacagccggtttatacggcgttgcagctgagtacggcgcaaacgcaatggcattatttaccgtaagcgaccacgtgatcactggcgaagcaacacctgctgacgaacgtcaaagcacgtttaacgaaatggttaaaattgcattagagtctatctaa

SEQ ID NO: 45655 - protein, 233 aa, Alteromonadales bacterium TW-7
MSTPHINANVGDFAETVLMPGDPLRAQYIAENFLDDAVQVTGVRNMFGFTGTYKGKPVSIMGSGMGIPSMSIYARELIVSFGVKNIIRIGTCGGIGTDIKIRDVIFAQGASTDSNVNRARVRGYDFSAIADFDLLLNGVNAAKELGIKAKVGNVFTTDTFYQADDTFYKDLDKLGVLAVDMETAGLYGVAAEYGANAMALFTVSDHVITGEATPADERQSTFNEMVKIALESI

SEQ ID NO: 45656 - DNA, 711 bp, Spiroplasma citri
  CDS (1)..(711): transl_table=4
atgacaccacatattaatgccaaaaaagaagaaattgcaaaagtcgttttaatgccgggagacccattacgagcaaaaaccgttgcggaaaaatatttaacaaatttaaaattagtaaatgaagttcgaaatatgttaatgtatactggcaagtataaaaacattgaggtaacaattgctggaagcggaatgggttgtccaagcattggaatttattcatacgaattatttaagttttacgatgttgattacattattcgaattggttcagctggaagttataatccgaatattaaagtttatgatatctttaatgttcgtgaagcatttggtgaaagtaattatgcaaaaattgcagctaatattgatagtaatttaattgccgcaagtgaaaaattatttaatgaaattgaagctgtagcacaagcaaaaggaattaaaacacacacgggaattgcgcatgcagcagatgttttttaccgttatgatgattcattagactttattcatactcataacttagatgttgttgaaatggaatcatatgctttgtttactaatgcaattgttacgcaaaaacatgcagcgacattattaacagtttctgaccatcttgtgacgaaagaagttactacagctttagaacggcaaaataattttatgacaatggttgaattagcattagacactgctgttcaattaatgggttaa

SEQ ID NO: 45657 - protein, 236 aa, Spiroplasma citri
MTPHINAKKEEIAKVVLMPGDPLRAKTVAEKYLTNLKLVNEVRNMLMYTGKYKNIEVTIAGSGMGCPSIGIYSYELFKFYDVDYIIRIGSAGSYNPNIKVYDIFNVREAFGESNYAKIAANIDSNLIAASEKLFNEIEAVAQAKGIKTHTGIAHAADVFYRYDDSLDFIHTHNLDVVEMESYALFTNAIVTQKHAATLLTVSDHLVTKEVTTALERQNNFMTMVELALDTAVQLMG

SEQ ID NO: 45658 - DNA, 714 bp, Streptococcus iniae
  CDS (1)..(714): transl_table=11
atgtctattcatatttctgcggctcctggtgagattgctgataaaattcttcttcctggggatcctcttcgtgctaagtttattgcggaaaatttccttgaggatgctgtttgtttcaatgaaattcgtggtatgcttggctatactggtacttataaagggcaccgtgtttctgtgatgggaactggtatgggaatgccttcgatttctatttatgcgcgtgaattgattgttgattatggtgttaaaaccttgattcgtgtgggtactgcgggtgctatcgaccctaatgttcatgttcgtgaacttgttcttgcccaagctgcagcaactaattcaaatattatccgtaacgattttccagagtttgatttcccacaaattgctgactttgggcttttggataaggcttaccatattgcgaaagagcttggcatgacaacacacgttggtaatgtattatcttcagatgtcttttactcaaatatgcctgaacgtaatatggctttgggtaaatttggtgttaaagccattgaaatggaagcagctgcactttattatttagcagcacaacatggtgttaaagctcttggaatcatgactatttcagataacttgaacgacccaagtgaagacacaagtgcaaaagaacgtcaaacaaccttcactgacatgatgcaagttggccttgaaaccttaattgcaaatgattaa

SEQ ID NO: 45659 - protein, 237 aa, Streptococcus iniae
MSIHISAAPGEIADKILLPGDPLRAKFIAENFLEDAVCFNEIRGMLGYTGTYKGHRVSVMGTGMGMPSISIYARELIVDYGVKTLIRVGTAGAIDPNVHVRELVLAQAAATNSNIIRNDFPEFDFPQIADFGLLDKAYHIAKELGMTTHVGNVLSSDVFYSNMPERNMALGKFGVKAIEMEAAALYYLAAQHGVKALGIMTISDNLNDPSEDTSAKERQTTFTDMMQVGLETLIAND

SEQ ID NO: 45660 - DNA, 711 bp, Streptococcus thermophilus
  CDS (1)..(711): transl_table=11
atgtcaattcatatttctgccaaacaaggagatattgctgataagattcttcttcctggggatcctttacgtgcaaaatttattgccgaaaatttccttgaagatgctgtatgtttcaatgaagttcgtaatatgtttggttacacaggaacatacaaaggtgaacgtgtctcagtaatggggactgggatggggatgccatctatctctatctatgcacgtgagctcattgttgactacggtgtcaaaaaattaattcgcgtaggaactgccggttctttgaatgagaatgttcacgttcgtgagttagttctagcacaagcagcagcaactaactctaatattattcgtaatgactggcctcaatacgatttcccacaaattgcaagtttcaatctcttggataaggcttatcacatcgccaaaaatttgggtatgacaacacatgttggtaatgttctatcttctgatgttttttactcaaattattttgaaaaaaatattgaacttgggaaatggggcgtgaaggctgtcgaaatggaagcagcagcactttactaccttgcagcccaacaccaagtagatgctctggctattatgactatttctgatagtttggtaaatccagatgaggacacaacagctgaggaacgtcaaaatactttcactgatatgatgaaagttggtcttgaaacactaattgcagactag

SEQ ID NO: 45661 - protein, 236 aa, Streptococcus thermophilus
MSIHISAKQGDIADKILLPGDPLRAKFIAENFLEDAVCFNEVRNMFGYTGTYKGERVSVMGTGMGMPSISIYARELIVDYGVKKLIRVGTAGSLNENVHVRELVLAQAAATNSNIIRNDWPQYDFPQIASFNLLDKAYHIAKNLGMTTHVGNVLSSDVFYSNYFEKNIELGKWGVKAVEMEAAALYYLAAQHQVDALAIMTISDSLVNPDEDTTAEERQNTFTDMMKVGLETLIAD

SEQ ID NO: 45662 - DNA, 726 bp, Photobacterium profundum
  CDS (1)..(726): transl_table=11
atggctactccacatattaatgctgaaatgggtgattttgctgacgtagtactgatgccgggtgatccattacgcgcgaagtacattgcagaaacttttctacaagacgtaaaagaagtatgtaacgtacgtagtatgtttggttataccggtacttataaaggtcgtaagatctctgttatgggtcacggtatgggtatcccttcttgttctatctacgcgacagagttaattaaagactttggtgttaagaaaattattcgtgtgggtagctgtggtgcagtacgtgatgacgtgaaactacgcgatgtagttatcggcatgggcgcatcaacagactctaaagtaaaccgtatccgttttggcggccacgattttgctgcgattgctgatttcggtatggtacaaaatgccgttgatgcagcaaaagcaaaaggtatccctgttaaagtgggtaacatcttctctgctgatctgttctacaatcctgactttgaatttttcaaaacgatggataaatacggtatcgtaggcgtagaaatggaagcggctggtatctacggtgtagctgctgagtttggtgctaaagcactgactatctgtactgtttcagaccacattctacgtggtgaagcgacaacatctgaagagcgtcaactaacgttcaatgaaatgatggaaatcgcacttgaatctgtattgctaggtgatgcagacgaagcataa

SEQ ID NO: 45663 - protein, 241 aa, Photobacterium profundum
MATPHINAEMGDFADVVLMPGDPLRAKYIAETFLQDVKEVCNVRSMFGYTGTYKGRKISVMGHGMGIPSCSIYATELIKDFGVKKIIRVGSCGAVRDDVKLRDVVIGMGASTDSKVNRIRFGGHDFAAIADFGMVQNAVDAAKAKGIPVKVGNIFSADLFYNPDFEFFKTMDKYGIVGVEMEAAGIYGVAAEFGAKALTICTVSDHILRGEATTSEERQLTFNEMMEIALESVLLGDADEA

SEQ ID NO: 45664 - DNA, 711 bp, Shewanella oneidensis
  CDS (1)..(711): transl_table=11
atgtcgactccacatatcaatgcgaatcctggtgactttgcaaaaacaattattatgtctggtgacccactcagagcaaaactcattgcagaaacttatttagaggatgtaaaggaagtcactaatgttcgtggaatattaggttttactgggaaatataaatctaaagatatttcgattatgggtcatggtatgggcgcaccttcagcctcgatttattttcatgaactgatggcaacctacggcgttaaaaactttattcgagtaggtagttgtggggctatatcagataatattcacctgaaagatttaattgttgccatgggagcctctacagactcaaaaataaatcgtattcgctttttagaccacgatcttgcagccattgcaaactatgatctgttacaggcgtgtattgaagtgttaaaaacgacaactgttaactataaagtaggtaacgtgttttcatctgatctattttatcgaccaaatgaaaatgactataccctgatggcaaaatatggcgtactaggtgtcgaaatggaagtaaacgctctttatgcgcttgctgctgaacatcaatgccgcgcacttgctctttgtaccgttacagaccatattgtccagcatgaacatttaacggcagacgaacgcagaaccgatctccatgaaatggtcaaagtcgcattagaaacagccattaagatttaa

SEQ ID NO: 45665 - protein, 236 aa, Shewanella oneidensis
MSTPHINANPGDFAKTIIMSGDPLRAKLIAETYLEDVKEVTNVRGILGFTGKYKSKDISIMGHGMGAPSASIYFHELMATYGVKNFIRVGSCGAISDNIHLKDLIVAMGASTDSKINRIRFLDHDLAAIANYDLLQACIEVLKTTTVNYKVGNVFSSDLFYRPNENDYTLMAKYGVLGVEMEVNALYALAAEHQCRALALCTVTDHIVQHEHLTADERRTDLHEMVKVALETAIKI

SEQ ID NO: 45666 - DNA, 726 bp, Vibrio cholerae
  CDS (1)..(726): transl_table=11
atggcaactccacatattaatgcgcaaatgggtgatttcgctgacgttgtactgatgccgggtgatccgctgcgcgcgaaatacatcgcagaaaacttcctcgataacgcagttcaagtatgtgatgtgcgcaatatgttcggctacacaggcacttacaaaggccgcaagatctctgtgatggggcatggtatgggtatcccatcttgctcaatctatgtaaccgagcttatcaaagattacggcgtgaaaaagatcatccgcgtcggtagctgtggtgcagtgaacgaaggcatcaaagtgcgtgatgtggtgatcggtatgggcgcgtgtactgactctaaagtcaaccgtattcgcttcaaagatcatgattttgctgcgattgcggattacaagatggtaaaggctgcagaagaagcggccaaagctcgtggcattgacgtgaaagttggcaacctgttctctgcagaactgttctacacgccagatccttccatgttcgatgtgatggataaatacggcatcgttggcgtagaaatggaagcggcaggcatttacggtgtagcggcggaatacggcgcgaaagcactggcgatctgtactgtgtctgaccacatcaaaacgggcgagcaaaccacctcagaagagcgtcaaaacaccttcaatgagatgattgaaatcgcactggactctgtactgattggtgatcaagcgggttattaa

SEQ ID NO: 45667 - protein, 241 aa, Vibrio cholerae
MATPHINAQMGDFADVVLMPGDPLRAKYIAENFLDNAVQVCDVRNMFGYTGTYKGRKISVMGHGMGIPSCSIYVTELIKDYGVKKIIRVGSCGAVNEGIKVRDVVIGMGACTDSKVNRIRFKDHDFAAIADYKMVKAAEEAAKARGIDVKVGNLFSAELFYTPDPSMFDVMDKYGIVGVEMEAAGIYGVAAEYGAKALAICTVSDHIKTGEQTTSEERQNTFNEMIEIALDSVLIGDQAGY

SEQ ID NO: 45668 - DNA, 720 bp, Vibrio parahaemolyticus
  CDS (1)..(720): transl_table=11
atggcaactccacatatcaatgctgaaatgggtgcattcgcagacgtagtactgatgccaggtgacccactacgtgcaaaatacatcgcagaaaccttccttgaagatgttgttcaagtgtgtgatgtgcgcaatatgttcggttacacaggcacttacaaaggccgtaaaatctctgtgatgggccacggtatgggtatcccatcatgttcgatttacgcgactgagctaatcaaagacttcggtgtgaagaaaatcatccgtgtcggtagctgtggtgcggtgaatgaagacatcaaagtacgtgatgttgtgatcggtatgggcgcgtgtacggattcaaaagtaaaccgcattcgctttaaaggccatgactttgcggctatcgcagactacaaaatggttcgtgcagcagaagatgcagcaaaagcacgtggtattgatgtgaaagtcggaaacctattctcagcggagcttttctacacgccagatccagaaatgttcgacgtaatggacaagtacggcattgttggtgttgaaatggaagcggcgggtatttacggcgtagcagcagaatacggcgcaaaagctctgacaatctgtacggtttcagaccatatcaaaactggcgagcaaaccacatcagacgagcgtcaaacaacatttaacgacatgatgctaatcgcgttagattcagtattgctaggcgatgcagaataa

SEQ ID NO: 45669 - protein, 239 aa, Vibrio parahaemolyticus
MATPHINAEMGAFADVVLMPGDPLRAKYIAETFLEDVVQVCDVRNMFGYTGTYKGRKISVMGHGMGIPSCSIYATELIKDFGVKKIIRVGSCGAVNEDIKVRDVVIGMGACTDSKVNRIRFKGHDFAAIADYKMVRAAEDAAKARGIDVKVGNLFSAELFYTPDPEMFDVMDKYGIVGVEMEAAGIYGVAAEYGAKALTICTVSDHIKTGEQTTSDERQTTFNDMMLIALDSVLLGDAE

SEQ ID NO: 45670 - DNA, 720 bp, Vibrio vulnificus
  CDS (1)..(720): transl_table=11
atggcaactccacatattaatgctgaaatgggtgattttgcagatgttgtactgatgccgggtgacccgctacgtgcaaaatacattgcagaaacctttctggaagacgtggttcaggtttgtgatgtacgtaatatgtatggtttcactggtacttacaaaggtcgtaaagtatcggtaatgggtcatggtatgggtatcccatcgtgctcaatttacgccactgagcttatcaaagactacggtgtgaagaagatcatccgtgtgggtagctgtggtgctgtaagcacggacatcaaagtacgcgatgttgtgatcggcatgggggcatgtaccgattccaaagtaaaccgcatccgttttaaaggtcatgactttgcggcgattgctgactacaaaatggtcaaagcagcggaagaggcggcgaaagcgcgtggtatcgatgtgaaagtgggtaacctattttctgctgaactgttctacacgccagatccagaaatgttcgacgtgatggacaaatacggcattgtcggcgtagaaatggaagcggcgggcatctacggtgttgctgcggaatacggcgcaaaagcgctgacgatttgtacggtttctgaccacatcaagacaggtgagcaaaccacatcagaagagcgtcagaataccttcaatgacatgatgattgttgcgttggattctgtattgcttggcgatgcagaataa

SEQ ID NO: 45671 - protein, 239 aa, Vibrio vulnificus
MATPHINAEMGDFADVVLMPGDPLRAKYIAETFLEDVVQVCDVRNMYGFTGTYKGRKVSVMGHGMGIPSCSIYATELIKDYGVKKIIRVGSCGAVSTDIKVRDVVIGMGACTDSKVNRIRFKGHDFAAIADYKMVKAAEEAAKARGIDVKVGNLFSAELFYTPDPEMFDVMDKYGIVGVEMEAAGIYGVAAEYGAKALTICTVSDHIKTGEQTTSEERQNTFNDMMIVALDSVLLGDAE

SEQ ID NO: 45672 - DNA, 711 bp, Photobacterium profundum
  CDS (1)..(711): transl_table=11
atggctactccacatattaatgctgaacttggtgattttgcagaaacagtcttaatgccaggtgatccgcttcgcgcaaaattcatcgctgagaatttcttggaagatgtaaaacaagtgtgtgacgtacgtagcatgctaggttttactggcacttacaaaggtaagcgtgtttcagtaatgggtcacggtatgggtatcccttcatgttctatttacgttcatgaacttatcaaagattttggtgtgaaaaacatcattcgtgttggtagctgtggcgccgtacacgacgacgttaaattaatggacattatcatcggtatgggtgcatcaactgactctaaagtgaaccgtattcgttttaatgaccacgatttcgctgcaatcgctgatttccacttactagaaacatctgtacagcaagcacgcctacagaacgtgaatgtacgtgtaggtaacattttctctgccgatttattctacagcccagaagaaggccttttcgataagatggaaaagctaggcatgttaggtatagatatggaagcggctggtatttatggtgttgccgctgaactgggtgctaaagcactgactattctaaccgtatctgatcacattaaacgtggtgagaaactaagctctgaagatcgccaaaagtcgtttggtgaaatgatgaatgtggcactagaaacagcagtgaacatctag

SEQ ID NO: 45673 - protein, 236 aa, Photobacterium profundum
MATPHINAELGDFAETVLMPGDPLRAKFIAENFLEDVKQVCDVRSMLGFTGTYKGKRVSVMGHGMGIPSCSIYVHELIKDFGVKNIIRVGSCGAVHDDVKLMDIIIGMGASTDSKVNRIRFNDHDFAAIADFHLLETSVQQARLQNVNVRVGNIFSADLFYSPEEGLFDKMEKLGMLGIDMEAAGIYGVAAELGAKALTILTVSDHIKRGEKLSSEDRQKSFGEMMNVALETAVNI

SEQ ID NO: 45674 - DNA, 711 bp, Shewanella oneidensis
  CDS (1)..(711): transl_table=11
atggcaacaccacacattaatgctgtagagggcgcattcgctgagacagttttgtttcctggcgatccattacgtgcaaaatatattgctgaaacattcttagaaaatgttgagcaagtgactgatgttcgcaacatgctaggttttaccggtacttacaagggtaaacgtatttctgtgatgggttctggcatgggtattccttcatgctcaatctatgcaactgaattaattaaagattatggcgttaaaaacctgatccgtgttggcacttgtggcgcaataagcacagacgttaaagtgcgcgatgtgatcatcggtatgggggcatgtactgattcgcaagtaaaccgtttacgttttaaaggccaagatttcgcggctatcgcgaactatgagctgatgaatgctgtgattgaatctgccaaagtcaaaggcactaagatccgtgtgggtaacgtattctctgctgatctgttctacacgccagatccacaaatgtttgacgtaatggaaaaaatgggtgtgctaggggtagaaatggaagccgctggtttatacggtgttgcccatgagttcggtgctcgcgcactgtgtgtggtaacggtatctgaccatatccgtactggcgaaaagacgacttcagaagagcgtcaaaccacgttcaacgatatgatcgtgatgactttagacgctgcgattacgctgtaa

SEQ ID NO: 45675 - protein, 236 aa, Shewanella oneidensis
MATPHINAVEGAFAETVLFPGDPLRAKYIAETFLENVEQVTDVRNMLGFTGTYKGKRISVMGSGMGIPSCSIYATELIKDYGVKNLIRVGTCGAISTDVKVRDVIIGMGACTDSQVNRLRFKGQDFAAIANYELMNAVIESAKVKGTKIRVGNVFSADLFYTPDPQMFDVMEKMGVLGVEMEAAGLYGVAHEFGARALCVVTVSDHIRTGEKTTSEERQTTFNDMIVMTLDAAITL

SEQ ID NO: 45676 - DNA, 738 bp, Vibrio cholerae; identical to SEQ ID NO: 45562
  CDS (28)..(738): transl_table=11

SEQ ID NO: 45677 - protein, 236 aa, Vibrio cholerae
MATPHINAQPGDFAETVLMPGDPLRAKYIAETFLEDVKQVCDVRSMFGFTGTYKGKKVSVMGHGMGIPSCSIYVHELIAEYGVKNIIRIGSCGAVRDDVKLMDVVIGMGASTDSKVNRIRFSGHDFAAIADYDLLETAVNQARAQQVPVKVGNVFSADLFYTPEPEIFEKMKKLGILGVDMEAAGIYGVAADLGARALTILTVSDHILRGEKLSSEDRQKSFNDMMKVALETAINI

SEQ ID NO: 45678 - DNA, 711 bp, Vibrio parahaemolyticus
  CDS (1)..(711): transl_table=11
atggcaaccccacacatcaacgcacaaccaggtgatttcgctgaaacagttctaatgccaggcgaccctttgcgtgctaaatacattgcagaaactttccttgaagatgtgaagcaagtttgtgacgttcgcaacatgttcggctttactggcacttacaaaggtaaaaaagtgtctgtaatgggtcacggtatgggtatcccttcatgctgtatctacgtacacgagctaatcgctgaatacggcgtgaaaaacgttatccgtgtaggtagctgtggcgcggtacgtgacgacgttaacctaatggacgttgttatcggtatgggtgcttctacagactcaaaagttaaccgtatccgtttcaacaaccacgatttcgctgcaatcgctgacttcagccttctagaagaagcggttaagcaagctcgcgctcaagaagtgccagtgaaagtaggtaacgtattctctgcagacctgttctacacaccagaagcagacatcttcgagaagatggaaaaactaggcatcctaggtgtagacatggaagcggcaggtatctacggcgtagctgcagacctaggcgcgaaagctctaactatcctaacggtttctgaccacatcatccgtggcgaaaaactaagctcagaagagcgccaaaagtcgttcaacgacatgatgaaagttgcacttgaaacagcaatcaacatctaa

SEQ ID NO: 45679 - protein, 236 aa, Vibrio parahaemolyticus
MATPHINAQPGDFAETVLMPGDPLRAKYIAETFLEDVKQVCDVRNMFGFTGTYKGKKVSVMGHGMGIPSCCIYVHELIAEYGVKNVIRVGSCGAVRDDVNLMDVVIGMGASTDSKVNRIRFNNHDFAAIADFSLLEEAVKQARAQEVPVKVGNVFSADLFYTPEADIFEKMEKLGILGVDMEAAGIYGVAADLGAKALTILTVSDHIIRGEKLSSEERQKSFNDMMKVALETAINI

SEQ ID NO: 45680 - DNA, 705 bp, Shewanella oneidensis
  CDS (1)..(705): transl_table=11
atgacggctcatattaatgctcaacccactgattttgctgaaactgttattatgccaggcgatccactgcgggcgaaatatatcgctgaaacctatcttacggatgccgtagaagtgactaacgttcgcaatatgctgggttacacaggctattaccaagggcaacgtatttcggtgatgggccatggcatgggtatttcatctatggtgctttatggtcatgagttaattaatttttttggcgtgaaacgcattattcgtatcggtagtttaggggcgacccaacagcatgtcgaaatgcgcgatgtgattttagctcaagccgcaggcacagattccccgacgaatgctaaacgcagcagtggctaccatatggcgacctcagccaccttttccttactgcacaaagcctataccaaagccaatgaaaaaggcattagcgtgaaagttggcaacgtatttagtggcgatctttattatgatcctgacgaagatatgatccctgcgcttgagcgtttcggggtattaggtattgatatggaagtggctggactttatggcttagcacaccaacagggtattgaatcgttagccattctgacggtgtcggaccactgtttaacgggtgaagaaaccacggcgcaagagcggcagttatctttcaataatatgattgaactcgccttagaaaccgcacttaattag

SEQ ID NO: 45681 - protein, 234 aa, Shewanella oneidensis
MTAHINAQPTDFAETVIMPGDPLRAKYIAETYLTDAVEVTNVRNMLGYTGYYQGQRISVMGHGMGISSMVLYGHELINFFGVKRIIRIGSLGATQQHVEMRDVILAQAAGTDSPTNAKRSSGYHMATSATFSLLHKAYTKANEKGISVKVGNVFSGDLYYDPDEDMIPALERFGVLGIDMEVAGLYGLAHQQGIESLAILTVSDHCLTGEETTAQERQLSFNNMIELALETALN

SEQ ID NO: 45682 - DNA, 723 bp, Actinobacillus pleuropneumoniae
  CDS (1)..(723): transl_table=11
atggctactccacacattaacgcaccggaaggtgcatttgctgacgttgtattaatgccgggcgatccgcttcgtgcaaaatatattgcggaaacatttttagaagatgcggtacaagtaacggacgtgcgtaatatgttcggctacaccggtacttataaaggtcgccgtatttcggtcatgggacacggtatggggattccttcttgctcaatttatgcaaaagaattgattaccgaatacggtgtgaaaaagatcattcgcgtcggttcttgcggtgcggtacgtcaagatgtaaaagtgcgtgatgtaattatcggttcgggtgcttgcaccgattcaaaagtaaaccgtatccgtttccgtgacaacgattttgcggcaatttccgactttgatatgaccttagcggcggtacaagcggcaaaacaaaaaggtattgcggcacgtgtcggtaacttattctctgcggacttattctatacgccggatgtggaaatgtttgacgtaatggaaaaatacggcattttaggcgtggaaatggaagcggcgggtatttatgcggtagcggcggaatacggtgcaaaagcgttagcgatttgtaccgtttcagaccatatccgtaccggtgagcaaacttcatcggaagaacgccaattaacctttaatgatatgattacgattgcattagagtccgtgttaatcggcgataaagcggaataa

SEQ ID NO: 45683 - protein, 240 aa, Actinobacillus pleuropneumoniae
MATPHINAPEGAFADVVLMPGDPLRAKYIAETFLEDAVQVTDVRNMFGYTGTYKGRRISVMGHGMGIPSCSIYAKELITEYGVKKIIRVGSCGAVRQDVKVRDVIIGSGACTDSKVNRIRFRDNDFAAISDFDMTLAAVQAAKQKGIAARVGNLFSADLFYTPDVEMFDVMEKYGILGVEMEAAGIYAVAAEYGAKALAICTVSDHIRTGEQTSSEERQLTFNDMITIALESVLIGDKAE

SEQ ID NO: 45684 - DNA, 708 bp, Bacillus anthracis
  CDS (1)..(708): transl_table=11
atgagtgtacatattgaagcaaaacaaggcgaaattgctgaatctattctattacctggtgatccattacgtgcaaaatatattgctgaaacatttttagaggacgttacttgctataataacgttcgtggaatgttaggattcactggaacttataaaggaaaacgtgtatctgttcaaggtacaggtatgggtgttccttctatttctatttatgttaacgagttaatccaaagctacggagttaaaaatttaattcgcgttggaacttgcggtgctattcaaaaagatgtaaaagtacgtgacgttattattgcaatgacagcttgtacggattctaatatgaatcgtttaacattcccaggttttgattttgcaccagctgcaaacttcgatcttttaaagaaagcttacgatgctggaactgaaaaaggcttacacgttcgtgttggtaatgttttaacagcagatgtattttaccgtgaaagcatggacatggttaaaaaacttggagattacggtgtactagcagtagaaatggaaacaactgctctttacacattagcagcgaaatacggtgtaaatgcgttatctgtattaacagtaagcgatcacattttcactggtgaagaaacaacatctgaagagcgtcaaactacatttaacgaaatgattgaaatcgctttagatgcagcaattcaacaataa

SEQ ID NO: 45685 - protein, 235 aa, Bacillus anthracis
MSVHIEAKQGEIAESILLPGDPLRAKYIAETFLEDVTCYNNVRGMLGFTGTYKGKRVSVQGTGMGVPSISIYVNELIQSYGVKNLIRVGTCGAIQKDVKVRDVIIAMTACTDSNMNRLTFPGFDFAPAANFDLLKKAYDAGTEKGLHVRVGNVLTADVFYRESMDMVKKLGDYGVLAVEMETTALYTLAAKYGVNALSVLTVSDHIFTGEETTSEERQTTFNEMIEIALDAAIQQ

SEQ ID NO: 45686 - DNA, 708 bp, Bacillus cereus
  CDS (1)..(708): transl_table=11
atgagtgtacatattgaagcaaaacaaggtgaaatcgctgaatctcttctattacctggtgatccattgcgtgcaaaatatattgctgaaacatttctagaggacgttacttgctataataacgttcgtggcatgttaggattcactggaacttataaaggaaaacgtgtatctgtgcaaggtacaggtatgggtgttccttctatttctatttatgtaaacgaattaatccaaagctacggagttaaaaatttaattcgcgttggaacttgcggtgctattcaaaaagacgtaaaagtacgtgacgttattattgcaatgacagcttgtacggattctaatatgaaccgtttaacattcccaggatttgattttgcaccagctgcaaacttcgaccttctaaagaaagcttacgatgctggaactgaaaaaggcctacacgttcgtgttggtaacgttttaacagcagatgtattttaccgtgagagcatggacatggtgaaaaagcttggagattacggtgtactagcagtagaaatggaaacaactgcgctttacacattagcagcgaaatacggtgtaaatgcattatctgtcttaacagtaagtgatcacatcttcactggtgaagaaacaacatctgaagagcgtcaaactacatttaacgaaatgattgaaatcgctttagatgcagcaattcaacaataa

SEQ ID NO: 45687 - protein, 235 aa, Bacillus cereus
MSVHIEAKQGEIAESLLLPGDPLRAKYIAETFLEDVTCYNNVRGMLGFTGTYKGKRVSVQGTGMGVPSISIYVNELIQSYGVKNLIRVGTCGAIQKDVKVRDVIIAMTACTDSNMNRLTFPGFDFAPAANFDLLKKAYDAGTEKGLHVRVGNVLTADVFYRESMDMVKKLGDYGVLAVEMETTALYTLAAKYGVNALSVLTVSDHIFTGEETTSEERQTTFNEMIEIALDAAIQQ

SEQ ID NO: 45688 - DNA, 708 bp, Bacillus cereus
  CDS (1)..(708): transl_table=11
atgagtgtacatatcgaagcaaaacaaggcgaaatcgctgaatctattctattacctggtgatccattacgtgcaaaatatatcgctgaaacatttctagaggacgttacttgctataataatgtgcgtggtatgttaggtttcactggaacttataaaggaaaacgtgtatctgttcaaggtacaggtatgggtgttccttctatttctatttatgtaaacgaattaatccaaagctacggagttaaaaatttaattcgcgttggaacttgcggtgcaattcaaaaagatgtaaaagttcgtgatgttattatcgcaatgacggcttgtactgattctaatatgaaccgtttaacattcccaggatttgattttgcaccagctgcaaactttgaccttttaaagaaagcttatgatgctggaactgaaaaaggattacacgttcgtgtcggtaacgttttaacagcagatgtgttttatcgtgaaagcatggacatagttaaaaaacttggagattacggtgtattagcagtagaaatggaaacaactgctctttacacattagcagcgaaatacggtgtaaatgcattatctgtattaacagttagcgatcacatcttcactggcgaagaaacaacatctgaagagcgtcaaactacatttaacgaaatgattgaaatcgctttagatgcagcaattcaacaataa

SEQ ID NO: 45689 - protein, 235 aa, Bacillus cereus
MSVHIEAKQGEIAESILLPGDPLRAKYIAETFLEDVTCYNNVRGMLGFTGTYKGKRVSVQGTGMGVPSISIYVNELIQSYGVKNLIRVGTCGAIQKDVKVRDVIIAMTACTDSNMNRLTFPGFDFAPAANFDLLKKAYDAGTEKGLHVRVGNVLTADVFYRESMDIVKKLGDYGVLAVEMETTALYTLAAKYGVNALSVLTVSDHIFTGEETTSEERQTTFNEMIEIALDAAIQQ

SEQ ID NO: 45690 - DNA, 708 bp, Bacillus cereus
  CDS (1)..(708): transl_table=11
atgagtgtacatattgaagcaaaacaaggcgaaattgctgaatctattctattacctggtgatccattacgtgcaaaatatattgctgaaacatttttagaggacgttacttgctataataacgttcgtggaatgttaggattcactggaacttataaaggaaaacgtgtatctgttcaaggtacaggtatgggtgttccttctatttctatttatgttaacgagttaatccaaagctacggagttaaaaatttaatccgcgttggaacttgcggtgctattcaaaaagatgtaaaagtacgtgacgttattattgcaatgacagcttgtacggattctaatatgaatcgtttaacattcccaggttttgattttgcaccagctgcaaactttgatcttttaaagaaagcttacgatgctggaactgaaaaaggcttacacgttcgtgttggtaacgttttaacagcagatgtattttaccgtgaaagcatggacatggttaaaaaacttgcagattacggtgtactagcagtagaaatggaaacaactgctctttacacattagcagcgaaatacggtgtaaatgcgttatctgtattaacagtaagcgatcacattttcactggtgaagaaacaacatctgaagaacgtcaaactacatttaacgaaatgattgaaatcgctttagatgcagcaattcaacaataa

SEQ ID NO: 45691 - protein, 235 aa, Bacillus cereus
MSVHIEAKQGEIAESILLPGDPLRAKYIAETFLEDVTCYNNVRGMLGFTGTYKGKRVSVQGTGMGVPSISIYVNELIQSYGVKNLIRVGTCGAIQKDVKVRDVIIAMTACTDSNMNRLTFPGFDFAPAANFDLLKKAYDAGTEKGLHVRVGNVLTADVFYRESMDMVKKLADYGVLAVEMETTALYTLAAKYGVNALSVLTVSDHIFTGEETTSEERQTTFNEMIEIALDAAIQQ

SEQ ID NO: 45692 - DNA, 699 bp, Bacillus licheniformis
  CDS (1)..(699): transl_table=11
atgagcgtacatattggcgcagaaaaaggacaaattgcagaaacggtgctgcttccaggagacccgctgcgcgcaaaatatatcgctgatacatatttggaaaacgttgaatgttataacgaagtacggggaatgtacgggtttaccggcacttataaaggaaagcgcgtttccgttcaggggacgggcatgggtgtgccgtctatttcaatttatgtcaatgaactgatcagaagctatgatgtgaaaaacctgatccgcgtcggatcgtgcggtgcgatcagaaaagacgtcaatgtaagagatgtcattcttgcgatgacttcatcaactgattcacaaatcaacagagtggcattcggctcgatcgactttgcgccctgcgcggacttcggcctgctaaaagctgcttatgacgctgcaagtgagcggaacatcccggttacggcagggaatgtgtttacggcggatcaattctataacgacgacagccaaattgagaagcttgccaaacacggagtgcttgcggtcgagatggaaacgacggcgctttatacattggctgcgaaattcggccgaaaagccctctccattttaacggtcagcgatcacgtcattaccggcgaggaaacaacggcagaagaaagacagacgacctttaatgatatgattctgctggctctggatactgctttgtaa

SEQ ID NO: 45693 - protein, 232 aa, Bacillus licheniformis
MSVHIGAEKGQIAETVLLPGDPLRAKYIADTYLENVECYNEVRGMYGFTGTYKGKRVSVQGTGMGVPSISIYVNELIRSYDVKNLIRVGSCGAIRKDVNVRDVILAMTSSTDSQINRVAFGSIDFAPCADFGLLKAAYDAASERNIPVTAGNVFTADQFYNDDSQIEKLAKHGVLAVEMETTALYTLAAKFGRKALSILTVSDHVITGEETTAEERQTTFNDMILLALDTAL

SEQ ID NO: 45694 - DNA, 705 bp, Bacillus stearothermophilus
  CDS (1)..(705): transl_table=11
atgagcgttcatattggtgcaaaagaacacgagattgcagataaaattttgcttccaggagatccacttcgcgcaaaatatatcgctgaaacgtttttagagggagctacttgctataatcaagttcgcggtatgttaggatttacaggtacatataaaggccatcgtatttccgttcaaggaacaggtatgggtgtaccatctatttctatttatattacagaacttatgcaaagctacaacgttcaaacattaattcgcgtcggaacatgtggtgctattcaaaaagatgtaaaagttcgtgatgtcattttagcgatgacatcgtcaaccgattcccaaatgaatcgcatgacgttcggaggaattgattacgctccgacagctaactttgacttgttaaaaacagcgtacgaaattggaaaagaaaaaggattacaactaaaagttggcagtgtatttacagctgatatgttttataatgaaaatgcacaatttgaaaaactggcacgatacggtgtactggctgtagagatggaaacaacagcgctttatacattagccgctaaatttggcagaaaagcattatcggtattaacagtaagcgatcacattttaacaggggaagagacaacggctgaagagcgccaaacaacatttaacgaaatgatcgaagtcgctcttgaaacagcgattcgccaataa

SEQ ID NO: 45695 - protein, 234 aa, Bacillus stearothermophilus
MSVHIGAKEHEIADKILLPGDPLRAKYIAETFLEGATCYNQVRGMLGFTGTYKGHRISVQGTGMGVPSISIYITELMQSYNVQTLIRVGTCGAIQKDVKVRDVILAMTSSTDSQMNRMTFGGIDYAPTANFDLLKTAYEIGKEKGLQLKVGSVFTADMFYNENAQFEKLARYGVLAVEMETTALYTLAAKFGRKALSVLTVSDHILTGEETTAEERQTTFNEMIEVALETAIRQ

SEQ ID NO: 45696 - DNA, 702 bp, Bacillus subtilis
  CDS (1)..(702): transl_table=11
atgagtgtacatataggtgctgaaaaaggacaaattgcggatactgtgcttttgccgggagatcctctcagagcaaaatttattgcagaaacgtatcttgaaaatgtagaatgctacaatgaagtcagaggcatgtatggatttacgggtacatataaaggtaaaaaaatctcagtacaaggcacgggaatgggagttccgtctatttcaatttatgtgaatgaattaattcaaagctacgatgtgcaaaatctaataagagtcggttcctgcggcgctattcgtaaagatgtcaaagtgcgagacgtcattttggcgatgacctcctcaactgattcacaaatgaacagagttgctttcggaagcgttgattttgcgccttgcgcagatttcgagcttttaaaaaatgcctatgatgccgcaaaggataaaggtgtgccggtgactgtaggaagcgtatttacagctgaccagttctacaatgacgattcgcaaattgaaaaacttgcaaaatacggtgtgcttggcgttgaaatggaaacaactgcattgtatacattagcagcgaagcacggaagaaaagccctgtcaattctcaccgtgagtgatcacgtattaacaggagaagaaacgacagcggaagagcgtcaaacgacatttcatgatatgatagaagtggctttacattccgtatcacaataa

SEQ ID NO: 45697 - protein, 233 aa, Bacillus subtilis
MSVHIGAEKGQIADTVLLPGDPLRAKFIAETYLENVECYNEVRGMYGFTGTYKGKKISVQGTGMGVPSISIYVNELIQSYDVQNLIRVGSCGAIRKDVKVRDVILAMTSSTDSQMNRVAFGSVDFAPCADFELLKNAYDAAKDKGVPVTVGSVFTADQFYNDDSQIEKLAKYGVLGVEMETTALYTLAAKHGRKALSILTVSDHVLTGEETTAEERQTTFHDMIEVALHSVSQ

SEQ ID NO: 45698 - DNA, 705 bp, Buchnera aphidicola subsp
  CDS (1)..(705): transl_table=11
atgtctactccacatattaatagtaaaaaagatgatttttcagatatagttttaatgccgggagacccagttcgtgcaaaatatattgctgaaaaatatttaagtaattttgttcaagtaaatgatactcgtttaatgttagcttataccggattttataaaaatagaaagatttcaatcatgagtcatggtataggaataccatcagcttctctctataccagagagttaattattgaatttaatgtaaaaaaaattattcgtataggaacttgtggtgctgtacgagatgatataaagttacgtgatatagtaatcagtatgggagcttctactgattctaaagtaaatagaataagatttaatgatcatgactttgctgccattgcagattttgatatgatttataatatagtctcaatttcaaaaaaaatgaaaataaaagtctccattggtaatttttttacaacagattctttttataatgatgataaaaaaatgctaaatattttaaaaaaatataatattattggagttgacatggagactgcgggaatatatggagtggcttctgaattaaaagttcaagcattatcgatatgtacagtatctgatcatattacaaataaagagtttctttcatcaaaggaaagagagtcaagttttaatgatatgattgaactagccttggaatctgttttataa

SEQ ID NO: 45699 - protein, 234 aa, Buchnera aphidicola subsp
MSTPHINSKKDDFSDIVLMPGDPVRAKYIAEKYLSNFVQVNDTRLMLAYTGFYKNRKISIMSHGIGIPSASLYTRELIIEFNVKKIIRIGTCGAVRDDIKLRDIVISMGASTDSKVNRIRFNDHDFAAIADFDMIYNIVSISKKMKIKVSIGNFFTTDSFYNDDKKMLNILKKYNIIGVDMETAGIYGVASELKVQALSICTVSDHITNKEFLSSKERESSFNDMIELALESVL

SEQ ID NO: 45700 - DNA, 711 bp, Buchnera aphidicola subsp
  CDS (1)..(711): transl_table=11
gtgccaactcttcatattaaaagtgaaaaaaacgctttttcaaatatagtccttatgcctggtgatccagtaagagctaaatatattgctgaaaattatttagcaaatcctgttcaaattaatgatactagattaatgttagcatatacaggatattataaaaataaaaaaatttctgttatgagtcacggtatgggaataccttctgcatctctttacgtaagagagttgatattagaatataatgtaaaaaaaattattcgggtaggaacttgtggtactattcagaataatataaaattgcgtgatattgttattagcatgggtgcgtctacagattcaaaaattaatagaatacgtttcaataatcacgattacgctgcaattgcagattttgaaatgatttttcatgctttttcaacagctaaaaaaatgaattttaaggttcatattggaaatttttttacgacagattcattttatactgaaagtgaagatatgttaaaaattttaaaaaaatacaatattattggaatagatatggagactgctggcatatatgctgttgctgctgaattaaaagcgcaagcattatcaatttgtactgtttctgatcacattattaaaaaagatgcagtatcatcaaaagatagggaatctagttttcataatatgattactctttctttggaaactaccttattgctttaa

SEQ ID NO: 45701 - protein, 236 aa, Buchnera aphidicola subsp
MPTLHIKSEKNAFSNIVLMPGDPVRAKYIAENYLANPVQINDTRLMLAYTGYYKNKKISVMSHGMGIPSASLYVRELILEYNVKKIIRVGTCGTIQNNIKLRDIVISMGASTDSKINRIRFNNHDYAAIADFEMIFHAFSTAKKMNFKVHIGNFFTTDSFYTESEDMLKILKKYNIIGIDMETAGIYAVAAELKAQALSICTVSDHIIKKDAVSSKDRESSFHNMITLSLETTLLL

SEQ ID NO: 45702 - DNA, 717 bp, Buchnera aphidicola subsp
  CDS (1)..(717): transl_table=11
atggtaactcctcatattaatgcaaaaaaaggagatttttctgattgtgtacttatgcctggtgatcctcttcgagcaagatatatagctaaaaattatttaaaaaatgctatagaagttactaatattcgttcaatgttaggatatactggaagatataaaggacatcgtatttctgtaatgagtcatgggataggtataccttcatctttaatttatgttaaggaattagtttctgaatataatgtgaaaaaaattattcgtattggaacgtgtggtactgttattgagcatataaatattaatgatattattatttgtcttggagcatctacggattctaaagttaatagactacgatttcatgataacgatttttcttcagttgctgatttttatttgattttagatttatttaattctgcaaataatgccggcataaaaattaatataggaaatttttttacaactgatttattttatgttaaaaatgataaattattagatacattacagagatataatattcttggaatagatatggaaacagcaggaatctatagtttagcttctgaattaggaatacaagtagcatcaatatgtactgtatcagatcatattttaaaaaaggatcaaatgagctatatagatcgagagtcaaatttgaataatatgatttatatttctttagaagcactgatactcaaaaaagtataa

SEQ ID NO: 45703 - protein, 238 aa, Buchnera aphidicola subsp
MVTPHINAKKGDFSDCVLMPGDPLRARYIAKNYLKNAIEVTNIRSMLGYTGRYKGHRISVMSHGIGIPSSLIYVKELVSEYNVKKIIRIGTCGTVIEHININDIIICLGASTDSKVNRLRFHDNDFSSVADFYLILDLFNSANNAGIKINIGNFFTTDLFYVKNDKLLDTLQRYNILGIDMETAGIYSLASELGIQVASICTVSDHILKKDQMSYIDRESNLNNMIYISLEALILKKV

SEQ ID NO: 45704 - DNA, 711 bp, Chromobacterium violaceum
  CDS (1)..(711): transl_table=11
atggcaaccccgcatatcaacgccaaagacggcgccttcgccgaaaccgtactgatgccgggcgacccgctgcgcgctcagctgatcgccgagaccttcctggagggcgccgagctggtgaccaacgtgcgcaacgtgttcggttacaccggcacctacaagggcaagcgcctgtcggtgatggcgcacggcatgggcatcccgtcggccagcatctacaccaccgagctgatcaaggactacggcgtcaagaacatcatccgcattggctcctgcggcgcggtgacgccggacatcaagctgcgcgagctgttcgtcgccatgggcgcgtccaccgacagcaaggtgaaccgcatgcgcttcaacgaccacgactacgccgccatcgccgattacacgctgctgcgcaccgtggtggacaccgccgccgagcagggcaagaaggtgaccgtgggcaatgtgttctccgccgacctgttctacggcgtgcagccgaacatgctggacgtgctctccaagctgcaggtcaacgtgatcgagatggagctggcgggcatctacagcgtggccgcccagtacggcgcgcgcgcggtcggcatcctgaccgtgtccgacatcatcccgaccggcgaggccaccagcgccgaggagcgccagacttcgttccgcgacatgatggaagtggcgctggacgctgcgatcaagctgtaa

SEQ ID NO: 45705 - protein, 236 aa, Chromobacterium violaceum
MATPHINAKDGAFAETVLMPGDPLRAQLIAETFLEGAELVTNVRNVFGYTGTYKGKRLSVMAHGMGIPSASIYTTELIKDYGVKNIIRIGSCGAVTPDIKLRELFVAMGASTDSKVNRMRFNDHDYAAIADYTLLRTVVDTAAEQGKKVTVGNVFSADLFYGVQPNMLDVLSKLQVNVIEMELAGIYSVAAQYGARAVGILTVSDIIPTGEATSAEERQTSFRDMMEVALDAAIKL

SEQ ID NO: 45706 - DNA, 708 bp, Clostridium tetani
  CDS (1)..(708): transl_table=11
atgagtattcatattaatgcaccagaaggtgccattgcagaaagtatattattaccaggagatcccctaagggctaaatttatcgcagatacatttttagaagatgtagtttgctacaatgaagtaagaggtatgtatggatttacaggaacatataaaggtaaaagagtttcagttcaaggaacaggaatgggtattccatcaatgtcaatttatgctactgaattaatcgaaagttatggagtcaaaaatctaataagagttgggacttgtggaagttatgtagaaaaagttaaggttagagatttaataattgccatgtcagcttgtacaaattcaaacattaatttagtaccattcaaaggaagaacctttgcaccaacagcaagttttgatctattaaaaccagcttatgatatagcagtagaaaagggatttgaacctaaagttggaagcatatatagttcagatatattctatgatgatgacaaagaagattggaaaacatgggctaaatacggatgtttgggagtggaaatggaaacagcagccctatatacaattgcagctaaatatggagttaatgctttaacattattaacagtaagtgatcattttgtaacacatgaagttacaagtgctgaagaaagacaaactacatttaaagcaatgatggaagttgccctagatacaatagtaaatttataa

SEQ ID NO: 45707 - protein, 235 aa, Clostridium tetani
MSIHINAPEGAIAESILLPGDPLRAKFIADTFLEDVVCYNEVRGMYGFTGTYKGKRVSVQGTGMGIPSMSIYATELIESYGVKNLIRVGTCGSYVEKVKVRDLIIAMSACTNSNINLVPFKGRTFAPTASFDLLKPAYDIAVEKGFEPKVGSIYSSDIFYDDDKEDWKTWAKYGCLGVEMETAALYTIAAKYGVNALTLLTVSDHFVTHEVTSAEERQTTFKAMMEVALDTIVNL

SEQ ID NO: 45708 - DNA, 705 bp, Colwellia psychrerythraea
  CDS (1)..(705): transl_table=11
atgccaacaccacatatcgaagcacaagacggcgaatttgcagaaacagtactaatgcctggcgatccacttagagcaaaatttattgccgataactttctagacgatgctaaatgcattacacaagtacgcaatatgcttggttacacaggtacgtataaaggtaagcgtgtctctgtaatgggctcaggtatgggcgtaccaagcatatctatttacgctactgaactttataaagattatggcgttgaaaaaatcatacgcatcggctcttgtggcgcagtaagagatgatataaagattcgtgatattgttattggtatggcggcgagcacagactcaaacgttaacagacaacgttttcacaatgtagattttgctgcttgtgccgacttctctttattaaaaagtgtcgttgataccgctgaaaaactcggtaaacctgtacatgtaggtaatatttttactgctgatttattttatacgccgcaacctgaaaagtttgcaaccatggaaaagtatggaattttagcggtagaaatggaagcagccggcctttatggtgttgctgctgaatatggtaaaaaagcacttaccgtattgaccgttagtgatcatataaaaacaggtgagaaaactacttctgaagaaagagaaactacgtttaaagatatgatggaacttacattagaaagcgtactatag

SEQ ID NO: 45709 - protein, 234 aa, Colwellia psychrerythraea
MPTPHIEAQDGEFAETVLMPGDPLRAKFIADNFLDDAKCITQVRNMLGYTGTYKGKRVSVMGSGMGVPSISIYATELYKDYGVEKIIRIGSCGAVRDDIKIRDIVIGMAASTDSNVNRQRFHNVDFAACADFSLLKSVVDTAEKLGKPVHVGNIFTADLFYTPQPEKFATMEKYGILAVEMEAAGLYGVAAEYGKKALTVLTVSDHIKTGEKTTSEERETTFKDMMELTLESVL

SEQ ID NO: 45710 - DNA, 711 bp, Geobacillus kaustophilus
  CDS (1)..(711): transl_table=11
ttgagcgtacatatcggagcgaagacaggggagatcgcggagcgcattttgctgccgggtgatccgctgcgcgccaaatacattgccgaaacgtttctggaaggagcggtatgctacaacgaagtgcgcggcatgctcggatttaccgggacgtataaaggggagcgcatttccgtgcaagggaccggcatgggcgtgccgtccatttcgatttatgtgaacgaactgatccaaagctacggcgtaaagacgctcatccgcgtcggaacgtgcggagcgattcagccggatgtgcgcgtccgcgacgtcattttggcgatgagcgcgtcgaccgattccaacatgaaccggctcattttccgcggccgcgattatgcgccaaccgccgatttccatctgctgcggacggcgtatgaagtaggtgtggaaaaagggctggcgctaaaagtcggcaatgtgttcaccgccgacatgttttacaatgatgaaccgaattgggaaacgtgggcgcgctacggtgtattggccgtcgagatggaaacggcggcgctctatacgctggcggcgaaattcggctgccgggcgctgtcggtgctgacggtcagcgaccatattctcaccggagaagaaacaacggctgaggagcggcaaatgacgtttaacgagatgattgaagtggcgcttgaagcggcgatccgcaatggcgcgtga

SEQ ID NO: 45711 - protein, 236 aa, Geobacillus kaustophilus
MSVHIGAKTGEIAERILLPGDPLRAKYIAETFLEGAVCYNEVRGMLGFTGTYKGERISVQGTGMGVPSISIYVNELIQSYGVKTLIRVGTCGAIQPDVRVRDVILAMSASTDSNMNRLIFRGRDYAPTADFHLLRTAYEVGVEKGLALKVGNVFTADMFYNDEPNWETWARYGVLAVEMETAALYTLAAKFGCRALSVLTVSDHILTGEETTAEERQMTFNEMIEVALEAAIRNGA

SEQ ID NO: 45712 - DNA, 717 bp, Haemophilus ducreyi
  CDS (1)..(717): transl_table=11
atgactccacatattaacgcacctgcaggtgcattcgctgatgttgtattgatgcccggtgatccacttcgtgcaaaatacattgctgaaacttttttagaaaatgctgagcaagttactaatgttcgcaatatgtttggttatacaggcacttacaaaggtcgtcgtatttcaataatgggacacggaatggggattccatcttgctccatttatgccaaagagttaattactgaatacggtgtcaaaaaaattatccgagtaggttcttgtggtgcagtgcgtgcggatgtaaaactacgtgatattgtgatcggcagtggtgcttgtactgattcaaaagtcaaccgtattcgttttcgcgataatgattttgctgcaattgctgattttgaaatgacattagccgcgtatcaagtggctaaacaaaaaaatatttcagtgcaagtaggcaatttattctcagcagatttattttatacgcctgatgttgcaatgtttgatgtaatggaaaaatatggcattttaggggttgaaatggaagcggctggtatttatgtcgttgctgcagaatacggtgtgaaatcattagctatttgtacggtttctgatcatattcgtagtggtgagaaattaagcgcagaagatcgtcagttaacctttaatgagatgattgaaattgcgttagaatcagtattaatcggtgatcaaacctaa

SEQ ID NO: 45713 - protein, 238 aa, Haemophilus ducreyi
MTPHINAPAGAFADVVLMPGDPLRAKYIAETFLENAEQVTNVRNMFGYTGTYKGRRISIMGHGMGIPSCSIYAKELITEYGVKKIIRVGSCGAVRADVKLRDIVIGSGACTDSKVNRIRFRDNDFAAIADFEMTLAAYQVAKQKNISVQVGNLFSADLFYTPDVAMFDVMEKYGILGVEMEAAGIYVVAAEYGVKSLAICTVSDHIRSGEKLSAEDRQLTFNEMIEIALESVLIGDQT

SEQ ID NO: 45714 - DNA, 717 bp, Haemophilus influenzae
  CDS (1)..(717): transl_table=11
atgactccacatattaacgcgcctgaaggtgcatttgctgatgttgttttaatgcctggcgatccacttcgtgcaaaatatattgcagaaacttttttacaagatgttgttgaagtaacgaatgttcgtaatatgcttggttttactggaacttataaaggtcgtaaaatttctattatggggcacggtatggggattccatcttgctctatttacgcgaaagaattaatcactgaatatggcgtgaaaaaaattatccgtgtaggttcttgtggcactgttcgtatggacgtgaaagtgcgcgatgtgattatcggtttaggtgcatgtactgattcaaaagtaaaccgtattcgtttcaaagataacgactttgcagctattgctgactttgatatggcacaagccgctgttcaagctgcaaaagcaaaaggtaaagtcgttcgtgtaggtaatttattctcggcggatttattctatacacccgatgtggaaatgttcgatgtaatggaaaaatacggcattttaggtgtggaaatggaagctgctggaatttatggtgtggctgcagaatatggtgcaaaagcattaacgatttgtaccgtgtctgaccatattcgtactcacgaacaaaccacggcagaagaacgtcaattaacattcaatgatatgattgaaattgcgttagattcagtattaattggtgatgcactataa

SEQ ID NO: 45715 - protein, 238 aa, Haemophilus influenzae
MTPHINAPEGAFADVVLMPGDPLRAKYIAETFLQDVVEVTNVRNMLGFTGTYKGRKISIMGHGMGIPSCSIYAKELITEYGVKKIIRVGSCGTVRMDVKVRDVIIGLGACTDSKVNRIRFKDNDFAAIADFDMAQAAVQAAKAKGKVVRVGNLFSADLFYTPDVEMFDVMEKYGILGVEMEAAGIYGVAAEYGAKALTICTVSDHIRTHEQTTAEERQLTFNDMIEIALDSVLIGDAL

SEQ ID NO: 45716 - DNA, 702 bp, Helicobacter pylori J99
  CDS (1)..(702): transl_table=11
atgacccctcacatcaacgctaaaatcggcgacttttatcctcaatgccttttatgcggcgatcccttaagggtgagctacattgcgaaaaattttttacaagacgctaaagagatcacgaatgtgcgtaacatgctaggctttagcgggaagtataagggtaaggggatttctttaatggggcatggcatgggcattgcgtcatgcacgatttatgtaaccgaactcattaaaacctatcaagtcaaagagcttttaaggattggcacttgcggggcgattagcccaaaagtgggcctgaaagacattgtcatggccactggagcttcaacggattctaaaaccaatcgggtgcgttttttaaaccacgatttgagtgcaacgcctgattttgaattgagtttaagagcgtatcaaacagcaaagcgtttgggtattgatttgaaaataggcaatgttttttcaagcgattttttctattcttttgaaacgcatgcttttggtttgatggcccaatacaaccacttggctattgaaatggaagcggcagggttatacgccacggcgatggaattgaacgctaaggctttatgcttatgctctgtctcagatcacttgatcactaaagaagccctaagccctaaagaaaggatagaaagctttgataacatgatcactctggctttagagatgatgagttag

SEQ ID NO: 45717 - protein, 233 aa, Helicobacter pylori J99
MTPHINAKIGDFYPQCLLCGDPLRVSYIAKNFLQDAKEITNVRNMLGFSGKYKGKGISLMGHGMGIASCTIYVTELIKTYQVKELLRIGTCGAISPKVGLKDIVMATGASTDSKTNRVRFLNHDLSATPDFELSLRAYQTAKRLGIDLKIGNVFSSDFFYSFETHAFGLMAQYNHLAIEMEAAGLYATAMELNAKALCLCSVSDHLITKEALSPKERIESFDNMITLALEMMS

SEQ ID NO: 45718 - DNA, 702 bp, Helicobacter pylori
  CDS (1)..(702): transl_table=11
atgacccctcacatcaacgccaaaatcggcgatttttatcctcaatgccttttatgcggcgatcccttaagggtgagctacattgcaaaaaaattcttacaagacgccaaagagatcacgaatgtgcgtaacatgctaggctttagcgggaagtataagggtagggggatttctttaatggggcatggcatgggcattgcgtcatgcacgatttatgtaaccgaactcattaaaacctatcaggttaaagagcttttaaggattggcacttgcggggcgattagcccaaaagttggcctgaaagacattatcatggcgacgggggcttcaacggattctaaaaccaatcgggtgcgttttttaaaccacgatttgagcgcaacgcctgattttgaattgagtttaagagcgtatcaaacagcaaagcgtttgggtattgatttgaaagtgggcaatgttttttcaagcgattttttctattcttttgaaacgcatgcctttgatttaatggctaaatacaaccacttggctattgaaatggaagcggcggggttatacgccacggcgatggaactaaacgctaaggctttatgcttatgctcagtctcagatcacttaatcactaaagaagccttaagccctaaagaaagggtagaaagctttgataacatgataattttggctttggagatgatgagttag

SEQ ID NO: 45719 - protein, 233 aa, Helicobacter pylori
MTPHINAKIGDFYPQCLLCGDPLRVSYIAKKFLQDAKEITNVRNMLGFSGKYKGRGISLMGHGMGIASCTIYVTELIKTYQVKELLRIGTCGAISPKVGLKDIIMATGASTDSKTNRVRFLNHDLSATPDFELSLRAYQTAKRLGIDLKVGNVFSSDFFYSFETHAFDLMAKYNHLAIEMEAAGLYATAMELNAKALCLCSVSDHLITKEALSPKERVESFDNMIILALEMMS

SEQ ID NO: 45720 - DNA, 705 bp, Lactococcus lactis subsp
  CDS (1)..(705): transl_table=11
atgccaacaccacatatcgaagctcaaaaaggcgaaatcgcagataaaattctcttaccaggagatccacttcgcgcaaaatttatcgcagaaaacttccttgaagatgctgtgcaatttaaccaagttcgcggaatgcttggctttactggaacttacaagggccatcgtgtttctgttatgggaacaggaatgggaattccttcaatctcaatctatgctaatgaattaattacagaatacggtgtaaaaagattaattcgtgttgggactgctggttctgtaaatgaagatgttcatattcgtgaccttgtcattgggcaagcagctgcgacaacttcagcgattattcgtaatgatttccctgattttgatttcccccaaattgctgattttgatttgcttgataaagcttatcatattgcaaaagaccttggaattacaactcacgttggaaatattctcagctctgatttgttctacggtggaccagatgcagttaaagttggaaaacttggtgtgaaggctgttgaaatggaagctgctggcctttattatcttggggcaaaatataaagttcaaactttgggaattatgacaatttctgaccatattttgactggagaatcaacaacttctgaagagcgtcaattgactttcacagatatgatgaaagttggattggaaactttgatttctgaataa

SEQ ID NO: 45721 - protein, 234 aa, Lactococcus lactis subsp
MPTPHIEAQKGEIADKILLPGDPLRAKFIAENFLEDAVQFNQVRGMLGFTGTYKGHRVSVMGTGMGIPSISIYANELITEYGVKRLIRVGTAGSVNEDVHIRDLVIGQAAATTSAIIRNDFPDFDFPQIADFDLLDKAYHIAKDLGITTHVGNILSSDLFYGGPDAVKVGKLGVKAVEMEAAGLYYLGAKYKVQTLGIMTISDHILTGESTTSEERQLTFTDMMKVGLETLISE

SEQ ID NO: 45722 - DNA, 702 bp, Listeria monocytogenes serotype 4b
  CDS (1)..(702): transl_table=11
atgagcgtacatatcgaagcaaaacaaggggaaattgcagaaactattttattaccaggagatccattgagagcaaaatatattgcggaaacatttttggaagatgtcgttttattcaaccaagtgcgaggcatgttaggatttactggtacatacaaaggcgaaaaagtttctgttatgggaactggtatgggaattccatctatttcgatttatgtaaatgaattaattcaaagctatgatgtgaaaaacttgattcgcgttggtactatgggcggcattcaagcagatgtaaaagtacgtgatgttgtcattgcacaagcggcatcaacggattcgcaaattaatcgcaatacttttgctggcgtagattttgcaccagtagctgatttttctcttctaaaaaaagcgtatgatgcaggtatcgaaaaaggattatcgcttaaagttgggaatgttttttctgcagaccgtttttataatgatcaactagacaaacaacaattagcagactatggtgtgcttggaattgaaatggaagcagcggcactttatacgttagcacaaaaatatggtcgtcgtgctttagctattttaactgtaagtgaccatattttcactggggaagaaacatccgcggaagagcgccaaactactttcaatgatatgattgttgtagcacttgaagcagcaataaaataa

SEQ ID NO: 45723 - protein, 233 aa, Listeria monocytogenes serotype 4b
MSVHIEAKQGEIAETILLPGDPLRAKYIAETFLEDVVLFNQVRGMLGFTGTYKGEKVSVMGTGMGIPSISIYVNELIQSYDVKNLIRVGTMGGIQADVKVRDVVIAQAASTDSQINRNTFAGVDFAPVADFSLLKKAYDAGIEKGLSLKVGNVFSADRFYNDQLDKQQLADYGVLGIEMEAAALYTLAQKYGRRALAILTVSDHIFTGEETSAEERQTTFNDMIVVALEAAIK

SEQ ID NO: 45724 - DNA, 717 bp, Mannheimia succiniciproducens
  CDS (1)..(717): transl_table=11
atgactccacatattaatgcgcctgaaggtgctttcgctgatgttgttttaatgccgggcgatccactgcgagcaaaatatatcgccgaaactttcttggaaaacgcaaaagaagtcaccaatgtacgtaatatgcttggttacaccggaacttacaaaggtcgccccgtttccgtaatggggcacggtatgggaattccgtcttgttctatttatacaaaagagttaattaccgaatacggcgtgaaaaaaattatccgcgtaggctcatgcggtgccgttcgtaatgacgttaaagtgcgcgacgtaatcatcggtttaggcgcctgtacggattccaaagtaaaccgcattcgttttaaagataacgattttgccgcaattgcggatttcgatatgactcaagcggcggtgcaagcggcaaaagccaagggcatcaattatcgcgtgggcaatctgttctctgcggatttattttatacgccagatgtggaaatgttcgacgtcatggaaaaatacggcattttaggggtggaaatggaagccgccggcatttacggcgttgccgccgaatttggtgcgaaagcattaagcatctgtaccgtatccgaccatatacgcaccggcgaacaaacttcttcggaagaacgccaattaaccttcaacgatatgatcgaaatcgctttagaaagcgtattgttaggcgatcaggcttaa

SEQ ID NO: 45725 - protein, 238 aa, Mannheimia succiniciproducens
MTPHINAPEGAFADVVLMPGDPLRAKYIAETFLENAKEVTNVRNMLGYTGTYKGRPVSVMGHGMGIPSCSIYTKELITEYGVKKIIRVGSCGAVRNDVKVRDVIIGLGACTDSKVNRIRFKDNDFAAIADFDMTQAAVQAAKAKGINYRVGNLFSADLFYTPDVEMFDVMEKYGILGVEMEAAGIYGVAAEFGAKALSICTVSDHIRTGEQTSSEERQLTFNDMIEIALESVLLGDQA

SEQ ID NO: 45726 - DNA, 717 bp, Mycoplasma genitalium
  CDS (1)..(717): transl_table=4
atgaccccacatataagtgctaagaaagatgacattagcaaagttgttttaatgccaggtgatccattgagagctaaatggatagctgagcaattcttagatcaagctaaattagtcaatgaagtgaggggaatgtttgcttatactgggcagtataaatctaaaacagttacagtaatgggccatggaatggggatcccttctattggaatttattcatatgagttgatgaatttttatgaggttgaaactatcattagaatcggaagttgtggtgctttagcaccgcaattaaaattaaaagatcttgttattgcttcaaaagcatgaagtgagtctatttatgctaaagacatgggtgttgaaattccagaagataagatcttatttgcaacaagttctttagtggaattagcaaaagaaactgcgattaagaacaagcttgattttcatgaaggattagtattttgtgaggatgctttttatcaaactagaaaagatgtaattagtcttgctaaagaaaaaaatagtttagcagttgaaatggaagcacatgcactttatgctaatgcaatcctgttgaagaaaaaagcacttacactcttaacagtatctgattctctagtaactcatgaagcacttagttctgaattaagacaaaagtcatttaagcaaatggctttattagcacttgaaatgactcaaaaactaatctaa

SEQ ID NO: 45727 - protein, 238 aa, Mycoplasma genitalium
MTPHISAKKDDISKVVLMPGDPLRAKWIAEQFLDQAKLVNEVRGMFAYTGQYKSKTVTVMGHGMGIPSIGIYSYELMNFYEVETIIRIGSCGALAPQLKLKDLVIASKAWSESIYAKDMGVEIPEDKILFATSSLVELAKETAIKNKLDFHEGLVFCEDAFYQTRKDVISLAKEKNSLAVEMEAHALYANAILLKKKALTLLTVSDSLVTHEALSSELRQKSFKQMALLALEMTQKLI

SEQ ID NO: 45728 - DNA, 717 bp, Mycoplasma pneumoniae
  CDS (1)..(717): transl_table=4
atgacaccgcacataaacgcaaaaaaagatgacattgctaaggttgttttaatgcccggtgatcccttacgtgctaagtggattgcggaacaatttatggaaaagccccggctcgtcaacgaagtgcgaggcatgttagcttttaccggtcagtataagggtaaaaccattaccattatgggccatggcatggggattccctcaattgggatttattcttatgaactgatgaagttctatgaggttaataccattatccgaattggtagttgcggggcgttgcaaggttccttaaacctccaggacctcattattgccgctaaggcttggagtgagtcgatttacgctaacgacatgggtgtggaagtgccagcagacaagatcttaatggcctccccgcaactagtagagttagctaaaaagaccgctaaccaacttcaactggccttccatgagggcttggtgttctgtgaggatgccttccaccaaatcaggaaagacgtgttaaagctagcacaagaaaaacacgctttagcagtggaaatggaagcgcatgctctgtacgctaatgccatgctgctcaacaagcaagcgttaacgatgctcacggtgtccgattctttggtaacccatgctgctctaccagcggaacaacgccaagccacctttaagaacatggctatcttatccttggaaatggctagccaactcgtttaa

SEQ ID NO: 45729 - protein, 238 aa, Mycoplasma pneumoniae
MTPHINAKKDDIAKVVLMPGDPLRAKWIAEQFMEKPRLVNEVRGMLAFTGQYKGKTITIMGHGMGIPSIGIYSYELMKFYEVNTIIRIGSCGALQGSLNLQDLIIAAKAWSESIYANDMGVEVPADKILMASPQLVELAKKTANQLQLAFHEGLVFCEDAFHQIRKDVLKLAQEKHALAVEMEAHALYANAMLLNKQALTMLTVSDSLVTHAALPAEQRQATFKNMAILSLEMASQLV

SEQ ID NO: 45730 - DNA, 708 bp, Oceanobacillus iheyensis
  CDS (1)..(708): transl_table=11
atgagtgtacatattggagcaaaacaaggagaaattgcagataaaatacttttacccggagacccgctccgcgcaaaatatatagcagagacttttttagaggaaccaaaattatataacgaagttagaggtatgtatggttacactggtacttacaaaggtgaacgtgtttctgttcaaggaactggtatgggtgtaccatctatttcaatctatgtaaacgaattaattcaaagctatgatgtgaagaaattaattcgagtaggtacatgcggtgctattcaaaaagatgtcaacgttcgtgatgttattttagcacaaggagctacgacagattctcaaatgaatcgccttatcttcaacggaattgattatgcaccaattgcagattttgaactactaaaaaatgcatatgacgccggagtagataaaggacttcatttacgagtaggaaatgtattcacaagtgatacattttatcgtgataatgcacagcaagtaaatgaattactggctaaatatcaagtacttgccattgaaatggaatctacagcgctatatacattagcagctaaatatggtagacaagcactttctgtattaacggtttccgatcatattataactggtgaagaaactactgctgaggaacgacaaacaacttttaatgacatgatggaaattgctttagatactattataaaataa

SEQ ID NO: 45731 - protein, 235 aa, Oceanobacillus iheyensis
MSVHIGAKQGEIADKILLPGDPLRAKYIAETFLEEPKLYNEVRGMYGYTGTYKGERVSVQGTGMGVPSISIYVNELIQSYDVKKLIRVGTCGAIQKDVNVRDVILAQGATTDSQMNRLIFNGIDYAPIADFELLKNAYDAGVDKGLHLRVGNVFTSDTFYRDNAQQVNELLAKYQVLAIEMESTALYTLAAKYGRQALSVLTVSDHIITGEETTAEERQTTFNDMMEIALDTIIK

SEQ ID NO: 45732 - DNA, 717 bp, Pasteurella multocida
  CDS (1)..(717): transl_table=11
atgactccacatattaacgcacctgccggtgcatttgccgatgttgttttaatgccgggtgacccattacgtgccaaatacatcgcagaaaccttcttacaagatgtgaaagaaatcacgaatgtccgtaatatgcttgggttcacgggaacctataaaggccgcaaaatttctgttatgggacatggtatggggatcccatcttgttcgatttacacaaaagaattgattacggaatatggcgtgaagaaaattatccgtgttggttcttgcggtgctgtccgtatggatgtcaaattacgtgatgtggtgattggatttggtgcctgtaccgattccaaagtcaaccgtatccgttttaaaaaccatgactttgctgcgatcgcggactttgacatgacaatggcggcagtgcaagcggcaaaagcaaaaggcttaaatgtccatgttggtaacttattctctgcagacttattctatacaccagatgtggaaatgtttgatgtaatggaaaaatatggcatcttaggtgttgaaatggaagctgcgggaatttatggtgtggccgcagaatttggtgccaaagccttaacaatctgtactgtgtctgatcacattcgtacacacgaacaaacaacaccagaagaacgtcaattaacatttaatgatatgattgaaatcgcattagaatccgttctaattggcgataacgcgtaa

SEQ ID NO: 45733 - protein, 238 aa, Pasteurella multocida
MTPHINAPAGAFADVVLMPGDPLRAKYIAETFLQDVKEITNVRNMLGFTGTYKGRKISVMGHGMGIPSCSIYTKELITEYGVKKIIRVGSCGAVRMDVKLRDVVIGFGACTDSKVNRIRFKNHDFAAIADFDMTMAAVQAAKAKGLNVHVGNLFSADLFYTPDVEMFDVMEKYGILGVEMEAAGIYGVAAEFGAKALTICTVSDHIRTHEQTTPEERQLTFNDMIEIALESVLIGDNA

SEQ ID NO: 45734 - DNA, 720 bp, Salmonella paratyphi
  CDS (1)..(720): transl_table=11
atggcaactccacatattaatgcagaaatgggtgatttcgctgacgtcgtattgatgccgggcgacccgctgcgtgcgaagcacattgctgagactttcctcgaagatgtccgcgaagtgaacaacgttcgcggcatgttaggtttcaccgggacttacaaaggccgtaagatctccgtgatgggccacggtatgggtatcccgtcctgctccatctacaccaaagagctgatcaccgatttcggcgtgaagaaaatcattcgcgtcggctcctgcggcgctgtgcgcatggacgtcaaactgcgtgacgtggtgatcggtatgggggcctgcaccgactccaaagtgaaccgtatccgtttcaaagatcatgactttgcggctatcgctgacttcgacatggtacgtaacgcggttgacgcggcaaaagcgctgggcgtagacgcgcgcgtgggcaacctgttctccgcggatctgttctattctccggacggcgaaatgttcgacgtgatggaaaaatacggcgtactgggcgtagagatggaagcggcgggtatctacggcgttgcggctgaatttggcgcgaaagcgctgaccatctgcaccgtgtctgaccatatccgtacccacgagcagaccactgccgctgaacgtcagacgaccttcaacgacatgatcaaaatcgcgctggaatccgtactgctgggcgataaagagtaa

SEQ ID NO: 45735 - protein, 239 aa, Salmonella paratyphi
MATPHINAEMGDFADVVLMPGDPLRAKHIAETFLEDVREVNNVRGMLGFTGTYKGRKISVMGHGMGIPSCSIYTKELITDFGVKKIIRVGSCGAVRMDVKLRDVVIGMGACTDSKVNRIRFKDHDFAAIADFDMVRNAVDAAKALGVDARVGNLFSADLFYSPDGEMFDVMEKYGVLGVEMEAAGIYGVAAEFGAKALTICTVSDHIRTHEQTTAAERQTTFNDMIKIALESVLLGDKE

SEQ ID NO: 45736 - DNA, 720 bp, Salmonella typhimurium
  CDS (1)..(720): transl_table=11
atggcaactccacatattaatgcagaaatgggtgatttcgctgacgtcgtattgatgccgggcgacccgctgcgcgcgaagcacattgctgagactttcctcgaaaatgttcgcgaagtgaacaacgttcgcggcatgttaggtttcaccgggacttacaaaggccgtaagatctccgtgatgggccacggtatgggtatcccgtcctgctccatctacaccaaagagctgatcaccgatttcggcgtgaagaaaatcattcgcgtcggctcctgcggcgctgtgcgcatggacgtcaaactgcgcgacgtggtgatcggtatgggtgcctgcaccgactccaaagtgaaccgtatccgttttaaagatcatgacttcgcggctatcgctgacttcgacatggtgcgtaacgcagttgatgcggcaaaagcgctgggcgttgacgcgcgcgtaggcaacctgttctccgctgacctgttctactctccggacggcgaaatgttcgacgtgatggaaaaatacggcgtactgggcgtagagatggaagcggcgggtatctacggcgttgcggctgaatttggcgcgaaagcgctgaccatctgcaccgtatctgaccatatccgtacccacgagcagaccactgccgctgaacgtcagacgaccttcaacgacatgatcaaaatcgcactggaatccgtactgctgggcgataaagagtaa

SEQ ID NO: 45737 - protein, 239 aa, Salmonella typhimurium
MATPHINAEMGDFADVVLMPGDPLRAKHIAETFLENVREVNNVRGMLGFTGTYKGRKISVMGHGMGIPSCSIYTKELITDFGVKKIIRVGSCGAVRMDVKLRDVVIGMGACTDSKVNRIRFKDHDFAAIADFDMVRNAVDAAKALGVDARVGNLFSADLFYSPDGEMFDVMEKYGVLGVEMEAAGIYGVAAEFGAKALTICTVSDHIRTHEQTTAAERQTTFNDMIKIALESVLLGDKE

SEQ ID NO: 45738 - DNA, 699 bp, Thermoanaerobacter tengcongensis
  CDS (1)..(699): transl_table=11
atgagcatacatattggagcaaaagaaggagacattgccgaaacagtactgcttccgggagacccattgagggctaaatatatagcagaaaatttactggaagatgcaaagtgctacaatgaagtcagaggtatgtacggcttcaccggatattacaaggggaaaagagtgtcagtgcaaggaacaggaatgggggtgccttctatatccatttatgtgaatgaacttataacaagttacggcgtgaaaaacttgataagaataggtacatgcggttcattacagccagacataaagataagagatattgtgattgctatgagcgcctcaactgactctgctataaataaaatacgttttaatggaatggattacgctcctacggcaagttttaagcttttgaaaaaagcctatgacaaggctgttgaaatggggatagagccaaaagttggaaatatacttactacagatactttctaccatgacgacccagagagctggaggctttgggcaaaatttggagtgttggctgtagaaatggagacagcggggctttacactttggctgccaagtatggggttgatgctcttactatacttactgtaagcgacagtttggttacaggtgaagcgacctcagctgaggagaggcagaaaactttcatggacatggttaagattgctctggagattgcatag

SEQ ID NO: 45739 - protein, 232 aa, Thermoanaerobacter tengcongensis
MSIHIGAKEGDIAETVLLPGDPLRAKYIAENLLEDAKCYNEVRGMYGFTGYYKGKRVSVQGTGMGVPSISIYVNELITSYGVKNLIRIGTCGSLQPDIKIRDIVIAMSASTDSAINKIRFNGMDYAPTASFKLLKKAYDKAVEMGIEPKVGNILTTDTFYHDDPESWRLWAKFGVLAVEMETAGLYTLAAKYGVDALTILTVSDSLVTGEATSAEERQKTFMDMVKIALEIA

SEQ ID NO: 45740 - DNA, 702 bp, Treponema pallidum
  CDS (1)..(702): transl_table=11
atgagtattcaccttggagcaaagggagaggatattgcgccgcgcgtgctgttgcccggtgacccgctgcgtgcgcgttttgtggcggagcgtttttttcacaatgcgtattgctacaatgaggtgcgtggcatgctcgggtttacgggaacctacaagggggtgcgcgtgtcggtgcaggggacaggtatggggctgccgtcgcactcaatttacgtaacggagctgtttcaagattatggggtgcaaaaggcaatccgcgtggggactgccggtggattgcaggaggaagtggcgctcaaatcggtggtgtgtgcgctgggtgcggcaacggattctgcaataaacgcgcgcaggtttagcggcatgcactttgcgcccacggcaagctggtcgctcctgcgcacggcagtgtcggttgctgatgaaatgggcacgggggtgcaggtggggaatgtaatttcctctgacgtcttttacgatgaatcaggaagctggcgcctgtgggcccggtatggggtgttagcggtggaaatggaaacggcggagctgtacacgcttgctgcaaagttcagacgcgaggcgctgagcattctgactatctctgaccacctggtaaccggcgcggtaactagcgcgcaggagcgggagcgctcctttacccaaatgatagaaattgcgcttgaagccattatccagtag

SEQ ID NO: 45741 - protein, 233 aa, Treponema pallidum
MSIHLGAKGEDIAPRVLLPGDPLRARFVAERFFHNAYCYNEVRGMLGFTGTYKGVRVSVQGTGMGLPSHSIYVTELFQDYGVQKAIRVGTAGGLQEEVALKSVVCALGAATDSAINARRFSGMHFAPTASWSLLRTAVSVADEMGTGVQVGNVISSDVFYDESGSWRLWARYGVLAVEMETAELYTLAAKFRREALSILTISDHLVTGAVTSAQERERSFTQMIEIALEAIIQ

SEQ ID NO: 45742 - DNA, 717 bp, Xenorhabdus nematophilus
  CDS (1)..(717): transl_table=11
atggctaccccacatattaatgctgagatgggcgattttgcagacgtagttttaatgccgggagatccactgcgggcacaatacatcgcagaaacctttttggaagatgcccgtcaggttaacaatgttcgcggtatgctgggcttcaccggtacttacaaaggccgccgcatttctgttatgggtcatggtatgggtatcccatcttgttctatttatgctaaagaactgatcactgaatttggtgttaaaaaaatcattcgtatcggctcctgcggtgcggtgagtgaagatgttaaaattcgtgatgttgttattggtatgggagcatgtactgattccaaagtaaaccgtatgcgttttaaggatcacgattttgcggcaattgctgactttgatctggttcgtcatgctgttgatgctgctaaggcaaaaaatattaatacgcgtgttggtaatatcttttccgtagatttgttctattccccggatccccaaatgttcgacgtaatggaaaaatacggcattctgggtgttgaaatggaagccgcaggtatttacggtgttgctgctgaatttggtgcgaaagcattggcgatttgtactgtatctgatcatattcgtaccggcgagcaaacaacggctgaagagcgtcaacacacatttaatgacatgattgagattgcgcttgagtccattttgttgggtgataattaa

SEQ ID NO: 45743 - protein, 238 aa, Xenorhabdus nematophilus
MATPHINAEMGDFADVVLMPGDPLRAQYIAETFLEDARQVNNVRGMLGFTGTYKGRRISVMGHGMGIPSCSIYAKELITEFGVKKIIRIGSCGAVSEDVKIRDVVIGMGACTDSKVNRMRFKDHDFAAIADFDLVRHAVDAAKAKNINTRVGNIFSVDLFYSPDPQMFDVMEKYGILGVEMEAAGIYGVAAEFGAKALAICTVSDHIRTGEQTTAEERQHTFNDMIEIALESILLGDN

SEQ ID NO: 45744 - DNA, 720 bp, Yersinia pestis
  CDS (1)..(720): transl_table=11
atggcaacgccacatattaatgctgaaatgggtgatttcgccgacgttgtattgatgccaggggacccactgcgggcaaagtttattgcagaaactttcctgcaagacgtgcgtgaagtgaataacgtacgcggcatgttgggtttcaccggcacctataaaggccggaagatttctgtgatgggccatggcatggggatcccatcctgttctatctatgctaaagagctgatcactgattttggtgtgaagaaaatcatccgcgtgggctcctgtggtgccgtacgcaccgatgttaaactgcgtgatgtagtgatcggaatgggggcgtgcacggattccaaagttaaccgtatgcgttttaaagatcacgactatgcggcgattgctgattttgagatgacccgtaatgcggttgatgcagccaaagcgaaaggggtcaatgtccgtgtcggtaacctcttctctgcggatcttttctacacaccagatccacaaatgtttgatgtgatggaaaaatacggcatcttgggcgtagaaatggaagccgccggtatctgcggcgtagcggcagagtttggtgcgaaggcactgactatctgcaccgtttctgaccatatccgtaccggcgagcagactaccgcggctgaacgtcagaccacttttaatgacatgattgagatcgcactggaatctgtgttactgggtgataacgcgtaa

SEQ ID NO: 45745 - protein, 239 aa, Yersinia pestis
MATPHINAEMGDFADVVLMPGDPLRAKFIAETFLQDVREVNNVRGMLGFTGTYKGRKISVMGHGMGIPSCSIYAKELITDFGVKKIIRVGSCGAVRTDVKLRDVVIGMGACTDSKVNRMRFKDHDYAAIADFEMTRNAVDAAKAKGVNVRVGNLFSADLFYTPDPQMFDVMEKYGILGVEMEAAGICGVAAEFGAKALTICTVSDHIRTGEQTTAAERQTTFNDMIEIALESVLLGDNA

SEQ ID NO: 45746 - DNA, 720 bp, Yersinia pseudotuberculosis
  CDS (1)..(720): transl_table=11
atggcaacgccacatattaatgctgaaatgggtgatttcgccgacgttgtattgatgccaggggacccactgcgggcaaagtttattgcagaaactttcctgcaagacgtgcgtgaagtgaataacgtacgcggcatgttgggtttcaccggcacctataaaggccggaagatttctgtgatgggccatggcatggggatcccatcctgttctatctatgctaaagagctgatcactgattttggtgtgaagaaaatcatccgcgtgggctcctgtggtgccgtgcgcaccgatgttaaactgcgtgatgtagtgatcgggatgggggcgtgcacggattccaaagttaaccgtatgcgttttaaagatcacgactatgcggcgattgctgattttgagatgacccgtaatgcggttgatgcagccaaagcgaaaggggtcaatgtccgtgtcggtaacctcttctccgcggatcttttctacacgccagacccacaaatgtttgatgtgatggaaaaatacggcatcttgggtgtagaaatggaagccgccggtatctacggcgtagcggcagagtttggtgcgaaggcactgactatctgcaccgtttctgaccatatccgtaccggcgaacagactaccgcagctgaacgtcagaccacttttaatgacatgattgagatcgcactggaatctgtgttactgggtgataacgcgtaa

SEQ ID NO: 45747 - protein, 239 aa, Yersinia pseudotuberculosis
MATPHINAEMGDFADVVLMPGDPLRAKFIAETFLQDVREVNNVRGMLGFTGTYKGRKISVMGHGMGIPSCSIYAKELITDFGVKKIIRVGSCGAVRTDVKLRDVVIGMGACTDSKVNRMRFKDHDYAAIADFEMTRNAVDAAKAKGVNVRVGNLFSADLFYTPDPQMFDVMEKYGILGVEMEAAGIYGVAAEFGAKALTICTVSDHIRTGEQTTAAERQTTFNDMIEIALESVLLGDNA

SEQ ID NO: 45748 - DNA, 23 bp, Artificial sequence
  primer
atggctaccccacacattaatgc

SEQ ID NO: 45749 - DNA, 24 bp, Artificial sequence
  primer
ttactctttatcgcccagcagaac

SEQ ID NO: 45750 - protein, 235 aa, Artificial sequence
  consensus sequence
  Variant (3)..(3): Xaa in position 3 is any amino acid
  Variant (5)..(5): Xaa in position 5 is any amino acid
  Variant (6)..(7): Xaa in position 6 to 7 is any or no amino acid
  Variant (9)..(10): Xaa in position 9 to 10 is any amino acid
  Variant (12)..(14): Xaa in position 12 to 14 is any amino acid
  Variant (16)..(16): Xaa in position 16 is any amino acid
  Variant (25)..(25): Xaa in position 25 is any amino acid
  Variant (29)..(29): Xaa in position 29 is any amino acid
  Variant (32)..(39): Xaa in position 32 to 39 is any amino acid
  Variant (42)..(42): Xaa in position 42 is any amino acid
  Variant (44)..(44): Xaa in position 44 is any amino acid
  Variant (46)..(46): Xaa in position 46 is any amino acid
  Variant (49)..(49): Xaa in position 49 is any amino acid
  Variant (53)..(55): Xaa in position 53 to 55 is any amino acid
  Variant (57)..(58): Xaa in position 57 to 58 is any amino acid
  Variant (60)..(60): Xaa in position 60 is any amino acid
  Variant (64)..(64): Xaa in position 64 is any amino acid
  Variant (67)..(68): Xaa in position 67 to 68 is any amino acid
  Variant (71)..(72): Xaa in position 71 to 72 is any amino acid
  Variant (75)..(78): Xaa in position 75 to 78 is any amino acid
  Variant (79)..(79): Xaa in position 79 is any or no amino acid
  Variant (81)..(83): Xaa in position 81 to 83 is any amino acid
  Variant (86)..(86): Xaa in position 86 is any amino acid
  Variant (88)..(89): Xaa in position 88 to 89 is any amino acid
  Variant (91)..(99): Xaa in position 91 to 99 is any amino acid
  Variant (101)..(106): Xaa in position 101 to 106 is any amino acid
  Variant (108)..(108): Xaa in position 108 is any amino acid
  Variant (110)..(110): Xaa in position 110 is any amino acid
  Variant (112)..(122): Xaa in position 112 to 122 is any amino acid
  Variant (123)..(128): Xaa in position 123 to 128 is any or no amino acid
  Variant (130)..(136): Xaa in position 130 to 136 is any amino acid
  Variant (138)..(139): Xaa in position 138 to 139 is any amino acid
  Variant (140)..(140): Xaa in position 140 is any or no amino acid
  Variant (142)..(150): Xaa in position 142 to 150 is any amino acid
  Variant (151)..(152): Xaa in position 151 to 152 is any or no amino acid
  Variant (154)..(158): Xaa in position 154 to 158 is any amino acid
  Variant (160)..(160): Xaa in position 160 is any amino acid
  Variant (163)..(172): Xaa in position 163 to 172 is any amino acid
  Variant (173)..(176): Xaa in position 173 to 176 is any or no amino acid
  Variant (178)..(180): Xaa in position 178 to 180 is any amino acid
  Variant (185)..(185): Xaa in position 185 is any amino acid
  Variant (187)..(188): Xaa in position 187 to 188 is any amino acid
  Variant (190)..(191): Xaa in position 190 to 191 is any amino acid
  Variant (193)..(198): Xaa in position 193 to 198 is any amino acid
  Variant (201)..(203): Xaa in position 201 to 203 is any amino acid
  Variant (205)..(205): Xaa in position 205 is any amino acid
  Variant (208)..(211): Xaa in position 208 to 211 is any amino acid
  Variant (212)..(213): Xaa in position 212 to 213 is any or no amino acid
  Variant (215)..(219): Xaa in position 215 to 219 is any amino acid
  Variant (222)..(224): Xaa in position 222 to 224 is any amino acid
  Variant (225)..(226): Xaa in position 225 to 226 is any or no amino acid
  Variant (228)..(229): Xaa in position 228 to 229 is any amino acid
  Variant (231)..(233): Xaa in position 231 to 233 is any amino acid
HIXAXXXGXXAXXXLXPGDPLRAKXIAEXFLXXXXXXXXVRXMXGXTGXYKGXXXSXXGXGMGXPSXXIYXXELXXXXXVXXXIRXGXXGXXXXXXXXXDXXXXXXAXTXSXXXXXXXXXXXXXXXXXAXXXXXXXAXXXAXXXXXXXXXXXGXXXXXDXFYXXXXXXXXXXXXXXGXXXVEMEXAXXYXXAXXXXXXALXXXTXSDXXXXXXEXXXXXERXXXXXFXXMXXXAL

SEQ ID NO: 45751 - protein, 60 aa, Artificial sequence
  protein pattern
  Variant (2)..(2): Xaa in position 2 is any amino acid
  Variant (10)..(11): Xaa in position 10 to 11 is any amino acid
  Variant (12)..(12): Xaa in position 12 is Ile, Met or Val
  Variant (13)..(13): Xaa in position 13 is Ala or Ser
  Variant (14)..(16): Xaa in position 14 to 16 is any amino acid
  Variant (17)..(17): Xaa in position 17 is Phe, Leu or Met
  Variant (18)..(23): Xaa in position 18 to 23 is any amino acid
  Variant (24)..(24): Xaa in position 24 is Cys, Asn, Ser or Thr
  Variant (25)..(26): Xaa in position 25 to 26 is any amino acid
  Variant (28)..(28): Xaa in position 28 is Gly, Asn or Ser
  Variant (29)..(31): Xaa in position 29 to 31 is any amino acid
  Variant (32)..(32): Xaa in position 32 is Phe or Tyr
  Variant (35)..(35): Xaa in position 35 is any amino acid
  Variant (36)..(36): Xaa in position 36 is Phe, Trp or Tyr
  Variant (37)..(37): Xaa in position 37 is any amino acid
  Variant (38)..(38): Xaa in position 38 is Gly, Asn or Ser
  Variant (39)..(40): Xaa in position 39 to 40 is any amino acid
  Variant (41)..(41): Xaa in position 41 is Ile, Leu or Val
  Variant (42)..(42): Xaa in position 42 is Ser or Thr
  Variant (43)..(43): Xaa in position 43 is Ile or Val
  Variant (44)..(44): Xaa in position 44 is any amino acid
  Variant (45)..(45): Xaa in position 45 is Ala, Gly or Ser
  Variant (46)..(46): Xaa in position 46 is any amino acid
  Variant (48)..(48): Xaa in position 48 is Ile or Met
  Variant (50)..(50): Xaa in position 50 is any amino acid
  Variant (51)..(51): Xaa in position 51 is Ala or Pro
  Variant (53)..(54): Xaa in position 53 to 54 is any amino acid
  Variant (56)..(58): Xaa in position 56 to 58 is any amino acid
LXPGDPLRAXXXXXXXXXXXXXXXXXRXXXXXTGXXXXXXXXXXXXGXGXXSXXIXXXEL

SEQ ID NO: 45752 - protein, 19 aa, Artificial sequence
  protein pattern
  Variant (2)..(4): Xaa in position 2 to 4 is any amino acid
  Variant (7)..(7): Xaa in position 7 is Ile or Val
  Variant (9)..(9): Xaa in position 9 is Ser or Thr
  Variant (10)..(10): Xaa in position 10 is Ala or Cys
  Variant (12)..(12): Xaa in position 12 is Ala, Gly, Ser or Thr
  Variant (13)..(16): Xaa in position 13 to 16 is any amino acid
  Variant (17)..(17): Xaa in position 17 is Ile, Leu or Val
  Variant (18)..(18): Xaa in position 18 is any amino acid
  Variant (19)..(19): Xaa in position 19 is Ile, Leu or Val
VXXXIRXGXXGXXXXXXXX

SEQ ID NO: 45753 - protein, 18 aa, Artificial sequence
  protein pattern
  Variant (2)..(3): Xaa in position 2 to 3 is any amino acid
  Variant (4)..(4): Xaa in position 4 is Ala, Cys or Gly
  Variant (5)..(5): Xaa in position 5 is Ile or Val
  Variant (6)..(6): Xaa in position 6 is Asp or Glu
  Variant (9)..(9): Xaa in position 9 is any amino acid
  Variant (10)..(10): Xaa in position 10 is any or no amino acid
  Variant (12)..(12): Xaa in position 12 is any amino acid
  Variant (13)..(13): Xaa in position 13 is any or no amino acid
  Variant (15)..(16): Xaa in position 15 to 16 is any amino acid
  Variant (17)..(17): Xaa in position 17 is any or no amino acid
GXXXXXMEXXAXXYXXXA

SEQ ID NO: 45754 - protein, 14 aa, Artificial sequence
  protein pattern
  Variant (2)..(2): Xaa in position 2 is any or no amino acid
  Variant (4)..(4): Xaa in position 4 is Glu or Gln
  Variant (5)..(5): Xaa in position 5 is any amino acid
  Variant (6)..(6): Xaa in position 6 is Ser or Thr
  Variant (8)..(8): Xaa in position 8 is any amino acid
  Variant (9)..(9): Xaa in position 9 is Ala, Asp, Glu, Gly, Asn, Gln or Thr
  Variant (11)..(12): Xaa in position 11 to 12 is any amino acid
  Variant (13)..(13): Xaa in position 13 is Ile, Leu, Met or Val
  Variant (14)..(14): Xaa in position 14 is Ala, Gly, Ser or Thr
EXRXXXFXXMXXXX

SEQ ID NO: 45755 - protein, 32 aa, Artificial sequence
  protein pattern
  Variant (2)..(2): Xaa in position 2 is Asp, Asn, Ser or Thr
  Variant (3)..(4): Xaa in position 3 to 4 is any amino acid
  Variant (5)..(5): Xaa in position 5 is Ile, Leu or Met
  Variant (6)..(22): Xaa in position 6 to 22 is any amino acid
  Variant (24)..(26): Xaa in position 24 to 26 is any amino acid
  Variant (27)..(27): Xaa in position 27 is Ala, Cys, Ser or Thr
  Variant (28)..(28): Xaa in position 28 is any amino acid
  Variant (30)..(30): Xaa in position 30 is any amino acid
AXXXXXXXXXXXXXXXXXXXXXGXXXXXDXFY

SEQ ID NO: 45756 - protein, 15 aa, Artificial sequence
  protein pattern
  Variant (3)..(3): Xaa in position 3 is Ala, Cys, Gly, Ser or Thr
  Variant (4)..(4): Xaa in position 4 is Ile, Leu, Met or Val
  Variant (5)..(5): Xaa in position 5 is any amino acid
  Variant (6)..(6): Xaa in position 6 is Ser or Thr
  Variant (7)..(7): Xaa in position 7 is Ile or Val
  Variant (10)..(10): Xaa in position 10 is any amino acid
  Variant (11)..(11): Xaa in position 11 is Phe, Ile, Leu or Val
  Variant (12)..(14): Xaa in position 12 to 14 is any amino acid
  Variant (15)..(15): Xaa in position 15 is Ala, Asp, Glu, Ser or Thr
ALXXXXXSDXXXXXX

SEQ ID NO: 45757 - DNA, 573 bp, Physcomitrella patens
  CDS (1)..(573)
atgttgccatcatctcaagcgatggtgagcagggcgggaggctcaccgtccggtctcttcaggaacaatttctcgaatgcaggatatgggacttcacggcagaatccgctgatgggtagcgggagattgcagcgagtgtcgtggaaacaacaaggaaagacgggatacggcgcattggaggcccaggtgggcaagagtaaccagataatttcccctgcgggagttcggtgccaggtgatcagcgtcaatcaggacaatttcgacgcggaggtgctgcaatcgaagcttccggtgctcgttgatttctgggctgattggtgtggaccgtgcaaactcgttgccaccagcatggaggaggtggacagtaagtacgaggggaagttgaaggttgtgaagattgagactgatcctaaccctgagcttgtagcggagtataaggtttatggattgccgacgcttatcatgttcgttgatggcaaagccgttcctgatggacgctacgaaggggcgatatcgtttacgaaaatcgtgtcgatgattgagaaatgcctcccttctcttgcagctgcttaa

SEQ ID NO: 45758 - protein, 190 aa, Physcomitrella patens
MLPSSQAMVSRAGGSPSGLFRNNFSNAGYGTSRQNPLMGSGRLQRVSWKQQGKTGYGALEAQVGKSNQIISPAGVRCQVISVNQDNFDAEVLQSKLPVLVDFWADWCGPCKLVATSMEEVDSKYEGKLKVVKIETDPNPELVAEYKVYGLPTLIMFVDGKAVPDGRYEGAISFTKIVSMIEKCLPSLAAA

SEQ ID NO: 45759 - DNA, 760 bp, Arabidopsis thaliana
  CDS (98)..(613)
aaacgtgttcttctgaatatgagtcaaacacagagaagattaggagaacgtggaagaagaagccatggactctatcgtctccagttcgacgattcttatgcgatcatatctcactcctccggttcgttcatgttctccggcaacctccgtttccgtcaaacctctgagctcagtccaggtcacctccgtcgcggctaaccgccacctgctttcgttaagctccggtgctagaagaaccagaaaaagctctagttcggtgataagatgcggcggaatcaaagagattggagagagtgagttttcgagtacggttctcgaatcagcccagccggttttggttgaattcgtcgctacttggtgcggtccctgcaaattgatctatccagctatggaagccttatctcaggaatatggtgacaaattgacgattgtaaagattgatcacgacgctaatccaaagttaatagcggagttcaaggtttatggtttaccgcatttcattctcttcaaggacgggaaggaagttccagggagcagaagggaaggtgctattacaaaggccaagcttaaggagtacattgatggtctcttgaactcaatatctgttgcttaatcgtctctctccccaccggtattcttctgtctcaacactgtttttttaatgtaatcaaatctcttcaattgtgatgatcttcatccccggtttctcatttgatgtgtatatcttgcaacaaattttacgaatagaaaagagttgttc

SEQ ID NO: 45760 - protein, 171 aa, Arabidopsis thaliana
MRSYLTPPVRSCSPATSVSVKPLSSVQVTSVAANRHLLSLSSGARRTRKSSSSVIRCGGIKEIGESEFSSTVLESAQPVLVEFVATWCGPCKLIYPAMEALSQEYGDKLTIVKIDHDANPKLIAEFKVYGLPHFILFKDGKEVPGSRREGAITKAKLKEYIDGLLNSISVA

SEQ ID NO: 45761 - DNA, 808 bp, Sorghum bicolor
  CDS (42)..(569)
gaagattcctctcctccccacgcgctgcctctgctccgctcatggcgtccgcgccgagcaccacggcgcacaccctcgcgccctctcaccgcacgccggtttcctcggccccccgcggggcccgccttccggccgcgttccgcctctcgtgcgctcagcccgggccggccggatgccgcgcggcgtcaggtcggctcgttcgccctcgcgcgcgcgtccggtgcggcgcggcggcaagcccacgcgggcagccacgcgtccgcgcggaggtgctggagtcggagctgcctgtgctcgtggacttcgtcgccgactggtgcgggccgtgccgcctcatcgcgcccgtcgtcgattgggcctcggaggaatacaatgagcggttaaaaattgtcaagattgatcatgatgccaatccacagctgattgaagaatacaaggtttttggtctcccgactttgattctcttcaagaatggccaagaggtgccaggtagccgatatgaaggggcaatgacaaaagataagttcaagcaatacctggagcctctcttgactacaacagtcgcttaaggtcattgcctgcagcttgagcactgtggatgccagtggcattggcttaccctacgtattgggaatgttgaagaatttttccttacatgagcgtcatttttagtttgtaattaactacgctgtgttatcatgtttgactgtatgattgtcctttttgcttatattcggtacagtatacatgaagggttgtgatgagataagccacacactaattttaatacaagccaagcttgttttcg

SEQ ID NO: 45762 - protein, 175 aa, Sorghum bicolor
MASAPSTTAHTLAPSHRTPVSSAPRGARLPAAFRLSCAQPGPAGCRAASGRLVRPRARVRCGAAASPRGQPRVRAEVLESELPVLVDFVADWCGPCRLIAPVVDWASEEYNERLKIVKIDHDANPQLIEEYKVFGLPTLILFKNGQEVPGSRYEGAMTKDKFKQYLEPLLTTTVA

SEQ ID NO: 45763 - DNA, 1008 bp, Mesorhizobium loti MAFF303099
  CDS (1)..(1008): transl_table=11
atgagcgacaacaagccgtttggcgggtcattcggcagcaatggcggccaatatgcgaccaccgttcagtatggcggaaccgcagccgcgcctgcgaaggtctcgcttggagatacgccggccgccgcccccgcgggcgatgtcatcaaggacaccacgaccgccgcctttgccgccgacgtcatccaggaatcgcgccgccagccggtgctggtcgatttctgggcgccgtggtgcggcccttgcaagcagctgacgccgcagctggaaaaggcggtccgggccgccggcggcaaggtcaagctggtcaagatgaacatcgacgaccatccctcgatcgccggccagctcggcatccagtcgattccggcggtcatcgccttcaaggacggccagccggtcgacggcttcatgggtgccatcccggagagccagatcgccgagttcatcaccaaggtcggcggcaagggcaatggtgctccggccgtggccgaggcgctggcggctgcgaccgaagcgcgcgaggccggcgacatgcagaccgccgccgacatttttgacgccatcctggcgcaggcaccggagacgatcgaggcgatcgccgggctgggcgagctgctgttcgaggccggcgacacggaaggcgccgaggcgttgctggcaacggcgcccgaggccaagaaggacgcgcctgttctggccgccttgcgcgccaagatggcgctggccgcgcaagcggcggaactgggcaatcccgcagagttcgagcgccgcctggccgaaaaccccaaagaccatcaggcgcgtttcgatctggccatgatccagaacgccaggggcgaacgcacggcggccgccgataatctgctggccatcatcaaggccgatcgcggctggaacgaggatggcgccaggacgcaattgctgcagtttttcgaggcctggggcatgaccgacgaggcgacgctggccgcgcggcgcaaattgtcggcgctgctgttttcctga

SEQ ID NO: 45764 - protein, 335 aa, Mesorhizobium loti MAFF303099
MSDNKPFGGSFGSNGGQYATTVQYGGTAAAPAKVSLGDTPAAAPAGDVIKDTTTAAFAADVIQESRRQPVLVDFWAPWCGPCKQLTPQLEKAVRAAGGKVKLVKMNIDDHPSIAGQLGIQSIPAVIAFKDGQPVDGFMGAIPESQIAEFITKVGGKGNGAPAVAEALAAATEAREAGDMQTAADIFDAILAQAPETIEAIAGLGELLFEAGDTEGAEALLATAPEAKKDAPVLAALRAKMALAAQAAELGNPAEFERRLAENPKDHQARFDLAMIQNARGERTAAADNLLAIIKADRGWNEDGARTQLLQFFEAWGMTDEATLAARRKLSALLFS

SEQ ID NO: 45765 - DNA, 1302 bp, Drosophila melanogaster
  CDS (1)..(1302)
atgaggcaactggcgagcattttgttgctggcatttgtcgtgggcagcgttagtgccttctattcgcccagcgatggcgttgtggagctgacgccctcgaatttcgaccgggaggtgctgaaagacgacgccatctgggtcgtggagttctatgctccatggtgcggccattgtcagagcctggtgcccgagtacaagaagctggccaaggcattgaagggagtcgtgaaagtgggctccgtgaatgccgatgcggacagcacgctgagtggccagttcggtgtacgtggctttcccaccatcaagatctttggcgccaacaagaagtcgcccacggactacaatggtcagcgaaccgctaaggccatcgctgaagccgctctggcggaggtcaagaagaaggtgcagggtgtcctgggcggcggcggtggatcgtcttccggcggttccggcagctcgtccggcgatgatgtcatcgaactcaccgaggacaactttgacaaactggtcctgaactccgacgacatatggctggtggaattcttcgccccctggtgtggtcactgcaagaacctggcacccgaatgggccaaggccgccaaagaattgaagggcaaggttaagttgggcgccctggatgccaccgcgcatcagagcaaggccgccgaatacaatgtgcgtgggtatcctaccattaagttcttccctgcgggctccaagcgagccagtgatgcccaggagtatgatggcggacgcactgcctcggatattgtatcctgggccagtgacaagcatgtggccaatgtgccagcacccgaactcatcgagattatcaatgaatcgacttttgaaactgcctgcgaaggaaagccattgtgcgtcgtgtccgttctgccacacattctcgactgcgatgccaagtgccgcaacaagttcctcgacacattgcgcaccctgggcgagaagttcaagcagaagcaatggggctgggcctgggcagaaggtggccagcagttggccctggaagagtcgctcgaagtgggcggattcggctatccggccatggctgtggtcaacttcaagaagatgaaattctccgtgctcaagggctccttctccaaggacggcatcaacgagttcctgcgcgacatctcctacggacgtggccacacggcgcctgttcgcggagccaaaaagccggcgattgtgtccgtggatccttgggacggcaaagatggccaactgcccaccgaggaggacatcgatctgagcgacatcgatctggataaggacgagctgtaa

SEQ ID NO: 45766 - protein, 433 aa, Drosophila melanogaster
MRQLASILLLAFVVGSVSAFYSPSDGVVELTPSNFDREVLKDDAIWVVEFYAPWCGHCQSLVPEYKKLAKALKGVVKVGSVNADADSTLSGQFGVRGFPTIKIFGANKKSPTDYNGQRTAKAIAEAALAEVKKKVQGVLGGGGGSSSGGSGSSSGDDVIELTEDNFDKLVLNSDDIWLVEFFAPWCGHCKNLAPEWAKAAKELKGKVKLGALDATAHQSKAAEYNVRGYPTIKFFPAGSKRASDAQEYDGGRTASDIVSWASDKHVANVPAPELIEIINESTFETACEGKPLCVVSVLPHILDCDAKCRNKFLDTLRTLGEKFKQKQWGWAWAEGGQQLALEESLEVGGFGYPAMAVVNFKKMKFSVLKGSFSKDGINEFLRDISYGRGHTAPVRGAKKPAIVSVDPWDGKDGQLPTEEDIDLSDIDLDKDEL

SEQ ID NO: 45767 - DNA, 426 bp, Bordetella pertussis Tohama I
  CDS (1)..(426): transl_table=11
atgacagtggtatgctttaatccttcctacacgtcgaacaagaacagcggccgcatgctccatgcacgggtcgcgcagcggaatccgagaatcaccatcatgagcgagcaaatcaagaacgtcagcgacgccagcttcgaggcagatgtgctgaaatccggccagccggtgctggtggactactgggccgcctggtgtggcccctgcaagatgatcgcccccatcctcgaagaggtggctgccgaatacgccggccgcctgaccgtggccaagctgaacgtggacgaaaaccaggacacggcggccaagtacggcgtgcgcggcattccgaccctgatgctgttcaaggacggccaggccgccgccactaaggtcggcgccctgtccaaatcgcaactgaccgcattcctggacggcgcgttgtaa

SEQ ID NO: 45768 - protein, 141 aa, Bordetella pertussis Tohama I
MTVVCFNPSYTSNKNSGRMLHARVAQRNPRITIMSEQIKNVSDASFEADVLKSGQPVLVDYWAAWCGPCKMIAPILEEVAAEYAGRLTVAKLNVDENQDTAAKYGVRGIPTLMLFKDGQAAATKVGALSKSQLTAFLDGAL

SEQ ID NO: 45769 - DNA, 750 bp, Ostreococcus tauri
  CDS (1)..(750)
atgtcgcgcgcgcgcgtagggcgatcacgcgcgcgcgtgacatcggcgctaaaatcggaccgatggcgcgcgcgcggcgcttttgcgacgaaggggtctccacgagtgcgcactcgtgggggacccaagaagggcacctctccgcgcgcgcgcgtcgcgcggtgcgaaaacgggtcgaaatttgcactaacactgcgaacgaggtgcacccacccctcgaccgtgcaaccggccacgtcgacggggcgacgtcgtcgagggggcgacgcggacgacgcgatcggcacgtcgtggcgacgaacgatggcgacgtgcgcggcgtcgatcgcgtcgcggacgccgcgcgcgacgcgatcgcgaggggtggggacggcgcgggcgaacgcgcgggcgtcgtggaccacggcgcgggcgatcgcggacgtggacgaggggtcgttcgacgccgaagtcttgagggcggacgcgcccgtgctcgtggatttctgggcgtcgtggtgcgggccgtgcaagctgatcggtaagattgtcgaaaaggcggataaggagtacgacggtgcgattaaggtggtcaaggtggagtgcgatgggaatccggcgttggtggagaagtactccgtgtacggattgccgacgctcatcatgttcaaggatggggtcgaggtgaaggggtcgaagaacgagggcgcgatctcgtacgataagcttaagacgtgggtgcacacgcacagcggtgtggcgattccgtga

SEQ ID NO: 45770 - protein, 249 aa, Ostreococcus tauri
MSRARVGRSRARVTSALKSDRWRARGAFATKGSPRVRTRGGPKKGTSPRARVARCENGSKFALTLRTRCTHPSTVQPATSTGRRRRGGDADDAIGTSWRRTMATCAASIASRTPRATRSRGVGTARANARASWTTARAIADVDEGSFDAEVLRADAPVLVDFWASWCGPCKLIGKIVEKADKEYDGAIKVVKVECDGNPALVEKYSVYGLPTLIMFKDGVEVKGSKNEGAISYDKLKTWVHTHSGVAIP

SEQ ID NO: 45771 - DNA, 546 bp, Medicago truncatula
  CDS (1)..(546)
atggatactgtgacctccacttcagcttcactcactctaaccctcccaacgcttccggttcgtacaattaccgcttcaatctccgtatcctcatctcttcccttaccacgctctcaccggcagcaaagactctactctcaaaaaagaagtttctcgaattcttcttcttcttctgttgcggttcctaagtttacagtgagttgcggtatcacggaaatcaatgaaagccagttcaacgtaactgtattgaaatctgagcgtccggttctagttgaattcgttgctacttggtgcggtccatgccgtttgatcactccagctatggaatccatagctcaggaatatgcagacagattaacagttgtaaagattgatcatgatgctaacccgcagctaattgaagagtataaagtttatggactgccaaccctgatactcttcaagaatggagaggaattcccaggaagcaggaaggaaggtgcaataacaaaggtgaaacttaaacagcatttggatgctttattggaatcaatatcagttacatag

SEQ ID NO: 45772 - protein, 181 aa, Medicago truncatula
MDTVTSTSASLTLTLPTLPVRTITASISVSSSLPLPRSHRQQRLYSQKRSFSNSSSSSVAVPKFTVSCGITEINESQFNVTVLKSERPVLVEFVATWCGPCRLITPAMESIAQEYADRLTVVKIDHDANPQLIEEYKVYGLPTLILFKNGEEFPGSRKEGAITKVKLKQHLDALLESISVT

SEQ ID NO: 45773 - DNA, 438 bp, Chlamydomonas reinhardtii
  CDS (1)..(438)
atgatgctttccactcgtaccgctgtgccttgctctggccgcaccgctttcggggccgtgcgaccggtctgccggccggcccgcgcttccacggtgacccgtgtagcaaatgtgactgaggcatcattcgatgatgaagtactgaaggccagcgccggccagcctgtgctggttgacttttgggcgagctggtgcgggccatgcaagctggtcgcgccactgatggactgggcggagaaggagtacggtggcaagctgaaggtggtgaagatcgagcatgatgctaacccaaagctcattgctcaatacaaggtgtacggcctgcccaccctcatcgtgtttaaggagggtcaggagctggccaacagcaagcgcgagggcgccatcaccaaggccctgctcgagcagtacctgaccaagaacggcatcactaagtaa

SEQ ID NO: 45774 - protein, 145 aa, Chlamydomonas reinhardtii
MMLSTRTAVPCSGRTAFGAVRPVCRPARASTVTRVANVTEASFDDEVLKASAGQPVLVDFWASWCGPCKLVAPLMDWAEKEYGGKLKVVKIEHDANPKLIAQYKVYGLPTLIVFKEGQELANSKREGAITKALLEQYLTKNGITK

SEQ ID NO: 45775 - DNA, 549 bp, Arabidopsis thaliana
  CDS (1)..(549)
atggactctatcgtctccagttcgacgattcttatgcgatcatatctcactcctccggttcgttcatgttctccggcaacctccgtttccgtcaaacctctgagctcagtccaggtcacctccgtcgcggctaaccgccacctgctttcgttaagctccggtgctagaagaaccagaaaaagctctagttcggtgataagatgcggcggaatcaaagagattggagagagtgagttttcgagtacggttctcgaatcagcccagccggttttggttgaattcgtcgctacttggtgcggtccctgcaaattgatctatccagctatggaagccttatctcaggaatatggtgacaaattgacgattgtaaagattgatcacgacgctaatccaaagttaatagcggagttcaaggtttatggtttaccgcatttcattctcttcaaggacgggaaggaagttccagggagcagaagggaaggtgctattacaaaggccaagcttaaggagtacattgatggtctcttgaactcaatatctgttgcttaa

SEQ ID NO: 45776 - protein, 182 aa, Arabidopsis thaliana
MDSIVSSSTILMRSYLTPPVRSCSPATSVSVKPLSSVQVTSVAANRHLLSLSSGARRTRKSSSSVIRCGGIKEIGESEFSSTVLESAQPVLVEFVATWCGPCKLIYPAMEALSQEYGDKLTIVKIDHDANPKLIAEFKVYGLPHFILFKDGKEVPGSRREGAITKAKLKEYIDGLLNSISVA

SEQ ID NO: 45777 - DNA, 543 bp, Oryza sativa
  CDS (1)..(543)
atggcgtccgcaccgagcaccaccgcgtccggcctcgcgccgccgccgttctcctcggcgcgcggcgcgcgcctcctccccggcgcgctgctgcgcctcccgccgcctccggcctcggtgggtagcttccgcgtggtggggcccgccgccgccccacccggcggccgccgcatcgccagcgcgcgcgtgcggtgtggcgcggcggtgaggttcatcgggcagagcgagttcgaggcggaggtgttgcagtcggacctgcccgtgctcgtcgacttcgtcgccgactggtgcgggccgtgccgcctcatcgcgcccgtcgtcgactgggccgccgaggaatatgaagggagattaaagattgtcaagattgatcatgatgccaatcctcaactgattgaagagtataaggtttatggtctcccatctcttattctattcaaggatgggaaagaggtaccagggagcagaagagaaggcgcaattacaaaagccaagttcaaggaatacctcgaacctctcttgtcaacctcaacagttgcttaa

SEQ ID NO: 45778 - protein, 180 aa, Oryza sativa
MASAPSTTASGLAPPPFSSARGARLLPGALLRLPPPPASVGSFRVVGPAAAPPGGRRIASARVRCGAAVRFIGQSEFEAEVLQSDLPVLVDFVADWCGPCRLIAPVVDWAAEEYEGRLKIVKIDHDANPQLIEEYKVYGLPSLILFKDGKEVPGSRREGAITKAKFKEYLEPLLSTSTVA

SEQ ID NO: 45779 - DNA, 546 bp, Brassica napus
  CDS (1)..(546)
atggctgctttcgcgtgtactactcgtccgccaatttctctccggtcagagaagatgatcgcatcttcaacgaaagtttcactctctactactcgacaaatgttctccgtgggaggaggattgaggactcgcgtttctctatcatcggtctccaagaattctagggattctcgattacgacgacgaggagggatcatcatctgtgaagctcaggacactactacagggattccaatggtgaacgattcaacatgggagtcgctagtactcaaggctgatgagcctgttgttgtggacttttgggcaccatggtgtggaccctgcaaaatgattgatcccattgtcaacgaactagcgcagcattacacagggaagatcaagttcttcaaactaaacactgacgattctcctgcgaccccgggaaagtacggtgttagaagcattccaaccatcatgatctttgttaaaggcgagaagaaagatacgatcattggtgcagtgcctaaaaccacattagcaacgagcattgataaattcttgcagtga

SEQ ID NO: 45780 - protein, 181 aa, Brassica napus
MAAFACTTRPPISLRSEKMIASSTKVSLSTTRQMFSVGGGLRTRVSLSSVSKNSRDSRLRRRGGIIICEAQDTTTGIPMVNDSTWESLVLKADEPVVVDFWAPWCGPCKMIDPIVNELAQHYTGKIKFFKLNTDDSPATPGKYGVRSIPTIMIFVKGEKKDTIIGAVPKTTLATSIDKFLQ

SEQ ID NO: 45781 - DNA, 549 bp, Zea mays
  CDS (1)..(549)
atggccgccggcctcgccttccccgtcgcctcctttccactcgcctgcgtctcctcacctccccaccccgggcaccgcatctgctgcgcgatcccgtcgtcgtcctcgcgccgcaccgtcaaatcctcgccgctccgcgcgactaccgtcctctccagggaacgacggggcacgggccgtggcgcgtccgtagtgtgcgctgtccaaggccaggacacgaccatccaagtcccagatgtgacaaagtcaacatggcaatcactcgtgatcgagagcgagcttcctgtcctggttgagttctcggcggcatggtgcgggccatgcaagatgatagaaccagttgttggcaagctctcgaaggactacgaggggaagctgaaatgctacaagctaaacacagatgagagcccggacatcgcaagccagtacggggtccggagcatccccaccacgatgatcttcaaggatggcgagaagaaggattcggttatcggggccgtgccagagagcacactggtcacatgcatcgagaaatttgtcgagaggtag

SEQ ID NO: 45782 - protein, 182 aa, Zea mays
MAAGLAFPVASFPLACVSSPPHPGHRICCAIPSSSSRRTVKSSPLRATTVLSRERRGTGRGASVVCAVQGQDTTIQVPDVTKSTWQSLVIESELPVLVEFSAAWCGPCKMIEPVVGKLSKDYEGKLKCYKLNTDESPDIASQYGVRSIPTTMIFKDGEKKDSVIGAVPESTLVTCIEKFVER

SEQ ID NO: 45783 - DNA, 546 bp, Brassica napus
  CDS (1)..(546)
atggctgctttcgcgtgtactactcgtccgccaatttctctccggtcagagaagaggatcgcatcctcaacgaaagtttcactctccactactcgacaaatgttctccgtgggaggaggattgaggactcgcgtctctctatcatcggtctccaagaattctagcgattctcgattacgacgacgaggagggatcatcatctgtgaagctcaggacactactacagggattccaatggtgaacgattcaacatgggagtcgctagtactcaaggctgatgagcctgttgttgtggacttttgggcaccatggtgtggaccctgcaaaatgattgatcccattgtcaacgaactagcacagcagtacacagggaagatcaagttcttcaaactaaacactgacgattctccggcgaccccgggaaagtacggtgtcagaagcataccaaccatcatgatcttcgttaagggagagaagaaggatacgatcatcggtgcagtgcctaaaaccacattagcaacaagcattgataaattcttgcagtga

SEQ ID NO: 45784 - protein, 181 aa, Brassica napus
MAAFACTTRPPISLRSEKRIASSTKVSLSTTRQMFSVGGGLRTRVSLSSVSKNSSDSRLRRRGGIIICEAQDTTTGIPMVNDSTWESLVLKADEPVVVDFWAPWCGPCKMIDPIVNELAQQYTGKIKFFKLNTDDSPATPGKYGVRSIPTIMIFVKGEKKDTIIGAVPKTTLATSIDKFLQ

SEQ ID NO: 45785 - DNA, 1104 bp, Zea mays
  CDS (1)..(1104)
atggcgatctcccagatctcacgcatattcctggccatccttctcctggccgccgccttcgccgccgccccagctgcgcttgcggacggcgacgacgtggtggcccttaccgaatccacgttcgagaaggaggtcggaaaggaccgcggcgcgctcgtcgagttctacgctccctggtgtggccactgcaagaagcttgctcctgagtatgaaagacttggtgcaagctttaaaaaggctaaatcagtcttgattgccaaggttgactgcgatgagcacaagagtgtgtgcagcaagtatggagtttctggctaccccacaatccagtggtttcccaaaggttccttggagcccaagaagtatgagggtcaacgcactgccgaagcccttacagagtatgttaactctgaagcagcgactaatgtgaagatagcagcagttccttcaagtgttgtggttctgaccccagagacctttgactcagttgtccttgatgaaaccaaagatgtccttgttgagttctatgccccatggtgtggtcactgcaagagtcttgcaccgacgtatgagaaggtggcttctgttttcaagttggatgaaggagttgttattgctaaccttgacgctgacaaacacagggatttggctgagaagtatggagttagtggatttcctaccttgaagtttttcccaaagggaaacaaagctggtgaagattatgatggtgatagggacttggttgactttgtcaagttcattaacgagaagagtggtaccagccgtgacacaaagggtcaactaacctcagaggctggccgtatagcaagtctggatgtcctggctaaggagttccttggtgcttccggtgacaagcgaaaggaagtcctctccagtatggaggaggaggcagataagctcagtggttctgctgcaaggcatggaaaggtctatgtaaccatcgcaaagaagattctagagaaaggcaacgagtatactgagaaggaaaccaagaggcttgatcgcatcttggagaagtccatcagcccctccaaggccgacgagtttatcatcaagaagaacgttctttcgactttctcatcctaa

SEQ ID NO: 45786 - protein, 367 aa, Zea mays
MAISQISRIFLAILLLAAAFAAAPAALADGDDVVALTESTFEKEVGKDRGALVEFYAPWCGHCKKLAPEYERLGASFKKAKSVLIAKVDCDEHKSVCSKYGVSGYPTIQWFPKGSLEPKKYEGQRTAEALTEYVNSEAATNVKIAAVPSSVVVLTPETFDSVVLDETKDVLVEFYAPWCGHCKSLAPTYEKVASVFKLDEGVVIANLDADKHRDLAEKYGVSGFPTLKFFPKGNKAGEDYDGDRDLVDFVKFINEKSGTSRDTKGQLTSEAGRIASLDVLAKEFLGASGDKRKEVLSSMEEEADKLSGSAARHGKVYVTIAKKILEKGNEYTEKETKRLDRILEKSISPSKADEFIIKKNVLSTFSS

SEQ ID NO: 45787 - DNA, 549 bp, Zea mays
  CDS (1)..(549)
atggccgccggcctcgccttccccgtcgcctcctttcaactcgcctgcgtctcctcacatccccaccccgggcaccgcatctgctgcgcgatcccgtcgtcgtcctcgcgccgcaccgtcaaatcctcgccgctccgcgcgactaccgtcctctccagggaacgacggggcacgggccgtggcgcgtccgtagtgtgcgccgtccaaggccaggacacgaccatccaagtcccagatgtgacaaagtcaacatggcaatcactcgtgatcgagagcgagcttcctgtcctggttgagttctcggcggcatggtgcgggccatgcaagatgatagaaccagttgttggcaagctctcgaaggactacgaggggaagctgaaatgctacaagctaaacacagatgagagcccggacatcgcaagccagtacggggtccggagcatccccaccacgatgatcttcaaggatggcgagaagaaggattcggttatcggggccgtgccagagagcacactggtcacatgcatcgagaaatttgtcgagaggtag

SEQ ID NO: 45788 - protein, 182 aa, Zea mays
MAAGLAFPVASFQLACVSSHPHPGHRICCAIPSSSSRRTVKSSPLRATTVLSRERRGTGRGASVVCAVQGQDTTIQVPDVTKSTWQSLVIESELPVLVEFSAAWCGPCKMIEPVVGKLSKDYEGKLKCYKLNTDESPDIASQYGVRSIPTTMIFKDGEKKDSVIGAVPESTLVTCIEKFVER

SEQ ID NO: 45789 - DNA, 1101 bp, Zea mays
  CDS (1)..(1101)
atggcgttccctcagatctcccgcagagccctcggcctcctgctcgtcatcgccgcagcggccgcgatcgtctcgcccgccaccgccgacgaggtggtggccctgacggaagccgacttcgagaaggaggtcggccaggaccgcggcgccctcgtcgagttctacgcgccatggtgtggccactgcaaaaagcttgcccccgagtatgaaaaacttggcgccagcttcaagaaggctaaatctgtactgatagcaaaggttgactgtgatgagcacaagagtgtatgcagcaagtatggagtttctgggtaccccacaattcaatggtttcccaaaggttccctggagccaaagaagtatgagggtcaacgttctgtggaagcccttgcagaatttgttaacagcgaagcaggtaccaatgtcaagatagctgccattccttcaagcgtcgtggttctgacttcagagacctttgactcaattgtccttgatgaaaccaaagatgtccttgttgagttttatgccccatggtgtggtcactgcaagcatcttgctccgatttatgagaagctggcttcagttttcaagcaggacgacggtgttgtgattgccaatattgatgctgacaagcacactgacttggctgaaaaatatggtgtttctggtttccctacattgaagttcttccctaagggaaacaaagccggtgaagattatgatggtggccgggacttggatgactttgtcaagttcattaatgagaagtgtggcaccagccgggatccaaagggccacctgaatcaagaggctgggcttgtgccaagcttgaatcctcttgtgaaggagtttctcaatgctgctgatgacaagcggaaggaagtcctctctaaaatagaagaggatgttgctaagctcagcggttctgcagccaagcatggaaagatatatgtgacagctgcaaagaagatcatagacaagggctctgactacactaagaaggagactgagaggcttcaccgcatgctggagaagtcaatcagtccttccaaagctgatgaattcatcgttaagaagaacattctttcgatattctcttcgtga

SEQ ID NO: 45790 - protein, 366 aa, Zea mays
MAFPQISRRALGLLLVIAAAAAIVSPATADEVVALTEADFEKEVGQDRGALVEFYAPWCGHCKKLAPEYEKLGASFKKAKSVLIAKVDCDEHKSVCSKYGVSGYPTIQWFPKGSLEPKKYEGQRSVEALAEFVNSEAGTNVKIAAIPSSVVVLTSETFDSIVLDETKDVLVEFYAPWCGHCKHLAPIYEKLASVFKQDDGVVIANIDADKHTDLAEKYGVSGFPTLKFFPKGNKAGEDYDGGRDLDDFVKFINEKCGTSRDPKGHLNQEAGLVPSLNPLVKEFLNAADDKRKEVLSKIEEDVAKLSGSAAKHGKIYVTAAKKIIDKGSDYTKKETERLHRMLEKSISPSKADEFIVKKNILSIFSS

SEQ ID NO: 45791 - DNA, 20 bp, Artificial sequence
  primer
atgttgccatcatctcaagc

SEQ ID NO: 45792 - DNA, 24 bp, Artificial sequence
  primer
ttaagcagctgcaagagaagggag

SEQ ID NO: 45793 - protein, 86 aa, Artificial sequence
  consensus sequence
  Variant (3)..(6): Xaa in position 3 to 6 is any amino acid
  Variant (7)..(8): Xaa in position 7 to 8 is any or no amino acid
  Variant (13)..(13): Xaa in position 13 is any amino acid
  Variant (15)..(15): Xaa in position 15 is any amino acid
  Variant (17)..(17): Xaa in position 17 is any amino acid
  Variant (24)..(26): Xaa in position 24 to 26 is any amino acid
  Variant (28)..(43): Xaa in position 28 to 43 is any amino acid
  Variant (44)..(45): Xaa in position 44 to 45 is any or no amino acid
  Variant (47)..(49): Xaa in position 47 to 49 is any amino acid
  Variant (51)..(58): Xaa in position 51 to 58 is any amino acid
  Variant (60)..(60): Xaa in position 60 is any amino acid
  Variant (62)..(64): Xaa in position 62 to 64 is any amino acid
  Variant (66)..(69): Xaa in position 66 to 69 is any amino acid
  Variant (71)..(72): Xaa in position 71 to 72 is any amino acid
  Variant (74)..(80): Xaa in position 74 to 80 is any amino acid
  Variant (81)..(84): Xaa in position 81 to 84 is any or no amino acid
VLXXXXXXPVLVXFXAXWCGPCKXXXPXXXXXXXXXXXXXXXXXXKXXXDXXXXXXXXYXVXXXPXXXXFXXGXXXXXXXXXXXGA

SEQ ID NO: 45794 - protein, 24 aa, Artificial sequence
  protein pattern
  Variant (2)..(2): Xaa in position 2 is any amino acid
  Variant (3)..(3): Xaa in position 3 is any or no amino acid
  Variant (5)..(5): Xaa in position 5 is Asp or Glu
  Variant (6)..(6): Xaa in position 6 is Phe or Tyr
  Variant (7)..(7): Xaa in position 7 is any amino acid
  Variant (9)..(9): Xaa in position 9 is Ala, Asp, Pro, Ser or Thr
  Variant (15)..(15): Xaa in position 15 is Lys or Arg
  Variant (16)..(16): Xaa in position 16 is any amino acid
  Variant (17)..(17): Xaa in position 17 is Ile, Leu or Val
  Variant (18)..(20): Xaa in position 18 to 20 is any amino acid
  Variant (21)..(21): Xaa in position 21 is Leu, Met or Val
  Variant (22)..(22): Xaa in position 22 is Asp, Glu, Gly or Asn
  Variant (23)..(23): Xaa in position 23 is any amino acid
  Variant (24)..(24): Xaa in position 24 is Ala, Ile, Leu or Val
PXXVXXXAXWCGPCXXXXXXXXXX

SEQ ID NO: 45795 - DNA, 360 bp, Glycine max
  CDS (1)..(360)
atggtggcacattcgagttcttggggaagggcactcgtcgccatctcgccctacaccttctccgccatcggcatcgccgtcgctatcggcgtctccgtcctcggcgccgcctgggggatctacatcaccggaagcagcttgatcggcgctgcaatcagggctcctcgaatcacttccaaaaatctcattaggttgtgtgtaggaataattggaagcagctgtgcattgtctgatgcccagaactcctctctctttgtgaaaattcttgtgatcgagatctttggtagtgcgctggggctatttggagttattgttggaataattatgtcagctcaagcaacatggccaacgaaagtttag

SEQ ID NO: 45796 - protein, 119 aa, Glycine max
MVAHSSSWGRALVAISPYTFSAIGIAVAIGVSVLGAAWGIYITGSSLIGAAIRAPRITSKNLIRLCVGIIGSSCALSDAQNSSLFVKILVIEIFGSALGLFGVIVGIIMSAQATWPTKV

SEQ ID NO: 45797 - DNA, 887 bp, Zea mays subsp. mays
  CDS (172)..(702)
acctgacgggctcgcatcgcacccgccacccccaccgcacgcaccctctcgtcctctctgcgccgacccggctcttctcccccaacacaatcctccttccccgatccagtctcgcggtcgcggccacgctgagggacagcgagaagagacagacacagatcgcgcgcggagatgtcgtcggactcgtcgtcgtgggcgcgcgccctggtgcagatctcgccctacaccttctccgcaatcggtatcgccgtctccatcggcgtctccgtcctcggcgcggcatggggtatcttcatcacggggagcagcctcatcggggccgccatcaaggcgcccaggatcacttctaagaacctcatcagtgtcatcttctgtgaggctgtcgcaatttatggcgtaattgtggcaatcatcctccagacaaagcttgaaagtgtgccaacatctcaaatgtatgatccggagtctcttcgagctggctatgcaatctttgcatctggccttatcgttggctttgctaatcttgtttgcggggtatgcgtggggataattggaagcagctgcgcactgtctgatgctcagaactcatcactcttcgtaaagattttggtgattgagatcttcggcagcgctctgggactgttcggtgtcattgtgggcatcattatgtcatctcaagcgacatggccagcaaaagcttgattttcaccatttgtagctctgtaaattattcagatggagtgtatcgaaatgtgcatgtggtctaactgcattttcatgttccttttatgtggcgtcttttttggcagaacacgaaatgcggcgcgcgtaccgccaccgattgtagagttgctattcttactgccggagtactccatgtgtgttgg

SEQ ID NO: 45798 - protein, 176 aa, Zea mays subsp. mays
MSSDSSSWARALVQISPYTFSAIGIAVSIGVSVLGAAWGIFITGSSLIGAAIKAPRITSKNLISVIFCEAVAIYGVIVAIILQTKLESVPTSQMYDPESLRAGYAIFASGLIVGFANLVCGVCVGIIGSSCALSDAQNSSLFVKILVIEIFGSALGLFGVIVGIIMSSQATWPAKA

SEQ ID NO: 45799 - DNA, 979 bp, Sorghum bicolor
  CDS (145)..(675)
  misc_feature (951)..(951): n is a, g, c or t
ttggggacgggctcgcatcgcaccgcaccctctcgtcctcggggcgccgacgcggctcttcttccccaatcctccttccccgatccagtcccgcagcgacgccgaggcagagcgagaagagacagacacagatcgcgcgcggagatgtcgtcggactcctcgtcgtgggcgcgcgccctggttcagatctcgccctacaccttctccgccatcggcatcgccgtctccatcggcgtctccgtcctcggcgccgcatggggtatcttcattacggggagcagcctcatcggggccgccatcaaggcccccaggatcacatctaagaacctcatcagtgtcatcttctgtgaggctgttgcaatttatggtgtaatcgtggcaatcatcctccagacaaagcttgaaagtgtgccaacatctcaaatgtatgctccggagtctcttcgagctggctatgcaatctttgcatctggccttatcgtcggctttgctaatcttgtttgcggggtatgcgtggggataattggaagcagctgcgcactgtctgatgctcagaactcatcactctttgtaaagatcttggtgattgagatctttggcagtgctctgggactgttcggagtaattgtgggtatcattatgtcagctcaagcgacatggccagcaaaagcttgatttttcaacattagtagctctgtaaattactcggatggaatgtatcggaatgtgcatgtggtccaactgccttttcctgttctttttcttttgcatctttttggcagaacacgaaatctggcgcgcgtagcgttaccgattgtagagttgctattcctactgccggagtactccatgtgtgttggatatcttgtaggtgctgttgccgttgcaagacacacttggcattggcatattgaataaatgctttgaactgaataagagggaagttattanagaaaaaaaaaaaaaaaaaaggccccta

SEQ ID NO: 45800 - protein, 176 aa, Sorghum bicolor
MSSDSSSWARALVQISPYTFSAIGIAVSIGVSVLGAAWGIFITGSSLIGAAIKAPRITSKNLISVIFCEAVAIYGVIVAIILQTKLESVPTSQMYAPESLRAGYAIFASGLIVGFANLVCGVCVGIIGSSCALSDAQNSSLFVKILVIEIFGSALGLFGVIVGIIMSAQATWPAKA

SEQ ID NO: 45801 - DNA, 795 bp, Glycine max
  CDS (12)..(542)
tttctgcgacgatggtggcacattcgagttcttggggcagggcactcgtggccatctcgccctataccttctctgccatcggcatcgccgtcgctatcggcgtctccgttctcggcgccgcctgggggatctacatcaccggtagtagcttgatcggcgctgcaatcagggctcctcgaatcacttccaaaaatctcattagtgtaatcttctgtgaagctgttgctatatatggtgttattgtggctattattcttcaaacaaaattagaaagtgttccagcatcaaatatctatgcacctgagtctcttagggctggatatgcaatctttgcatcgggattaatcgtgggctttgcaaatcttgtttgtgggttgtgtgtaggaataattggaagcagctgtgcattgtctgatgcccagaactcttctctctttgtgaaaattcttgtgattgagatctttggtagtgcgctggggctattcggagttattgtcggaattattatgtcagctcaagcaacatggccgacaaaagtttagtttcccttgtatcagaatgtggtgtgggaatgctattatggtagagtgcaatatatcctctgcactgcccgggattaaaagttttctctgtttcctgttggtagaaatgtaaaatccagcgtaatagtttgcctccattacaacattaggctgtattatttaccaatgagttgttaggtcttgtgtatcatcagatatatctgtctgttggttgaattttaatatttttggaggactaaatctttcattaatc

SEQ ID NO: 45802 - protein, 176 aa, Glycine max
MVAHSSSWGRALVAISPYTFSAIGIAVAIGVSVLGAAWGIYITGSSLIGAAIRAPRITSKNLISVIFCEAVAIYGVIVAIILQTKLESVPASNIYAPESLRAGYAIFASGLIVGFANLVCGLCVGIIGSSCALSDAQNSSLFVKILVIEIFGSALGLFGVIVGIIMSAQATWPTKV

SEQ ID NO: 45803 - DNA, 883 bp, Triticum aestivum
  CDS (94)..(627)
cctttcccagtcaccgatccaaaccatcgcgagaaaaaaaaaagatccccgatccagcaacgagcgcgcaccggtgaagatcgtggtgggaggatgtcgtcggactactcgtcgtcgtgggcgcgcgcgctcgtgcatatctcgccctacaccttctccgccatcggcatcgccgtctccatcggtgtctctgtcctcggcgcagcatgggggatcttcatcacggggagcagcctcatcggggccgccatcaaggcgcccaggatcacctccaagaacctcatcagtgtcatcttctgtgaggccgttgcaatttatggtgtaatcgtggcgatcatcctccaaacaaagcttgaaagtgtgccaacatcccgaatgcatgatccagagtctatgcgagctggttatgcaatctttgcctcaggtcttattgtcggctttgctaatcttgtttgcggggtatgcgtgggaataatcggaagcagctgtgcactgtctgatgcccagaattcaacactctttgtaaagatcctggtgattgagatctttggcagtgctttgggcctctttggagtgatcgtgggcataatcatgtcagctcaagcaacatggccaacaaaagtctaattccatccatctgggaatctctgtaaattattttgggtgaagccctttggaatgtcaacatgtgttcaactgtttcttatctattcttttttcttttgcacgtttttggtaaatcacgtattttggtgcttgatgcatctgatcgtagagatactgttcctactgtaaagactccatatgcctgccaggtatcatcttgtaggtgctattgcttttgcagaacgtggactgcctgttgaataaaagtattgaactt

SEQ ID NO: 45804 - protein, 177 aa, Triticum aestivum
MSSDYSSSWARALVHISPYTFSAIGIAVSIGVSVLGAAWGIFITGSSLIGAAIKAPRITSKNLISVIFCEAVAIYGVIVAIILQTKLESVPTSRMHDPESMRAGYAIFASGLIVGFANLVCGVCVGIIGSSCALSDAQNSTLFVKILVIEIFGSALGLFGVIVGIIMSAQATWPTKV

SEQ ID NO: 45805 - DNA, 627 bp, Aedes aegypti
  CDS (1)..(627)
atgcgatacactctcggttactccttcactggcaccctggtctcggtgtcaacagtgttgatcctgtaccacgtcctgacgggcaaaggggaacgggtcagcgtcggatggttcctggaggagacctccccctacatgtgggccaccctgggcatcggatttgccgtcgcgctgtccgtcgtcggagcggccatgggaatccacacgaccggagtcagcatcgttggcgggggtgtcaaagcgcccaggatcaagaccaagaatttgatctcggttatcttctgcgaggctgttgccatttacggtctgatcacggctatcgtcctgtccggtatgttggaaagcttctcctggggaacgattgtggccaacgagaacgtccggtacaacaactggttctccggttatgtaatgttcggtgctggcctggccgtcggtctggttaatctgttctgtggtatcgctgtcggaattgtgggttccggtgctgctctggcagatgcggccaactctgctctgttcgtcaagattctcatcgtggaaatcttcggatcggctatcggtttgttcggactgattgttggcatctacatgacctccaaggttaagatgggagacaaggagtaa

SEQ ID NO: 45806 - protein, 208 aa, Aedes aegypti
MRYTLGYSFTGTLVSVSTVLILYHVLTGKGERVSVGWFLEETSPYMWATLGIGFAVALSVVGAAMGIHTTGVSIVGGGVKAPRIKTKNLISVIFCEAVAIYGLITAIVLSGMLESFSWGTIVANENVRYNNWFSGYVMFGAGLAVGLVNLFCGIAVGIVGSGAALADAANSALFVKILIVEIFGSAIGLFGLIVGIYMTSKVKMGDKE

SEQ ID NO: 45807 - DNA, 618 bp, Bombyx mori
  CDS (1)..(618)
atgagatacttcttaagttacttattcgtgctcctggtgggacttgcaatcccgatattttcgctgtactacgtcctcaatggaaagggtgagcagataagtttgggatggttcttggagaacacttccccgtatatgtggggtaccctcggaatcgccttttccgttgccctgtccgttgtcggagcagccatgggcatccacactactggtgtcagcatagtgggaggaggtgtcaaagcacctagaatcaagactaagaatttgatctccgtcatcttctgcgaggccgtcgccatttacggtttgatcactgctatcgtgctctctggtatgctggagaaatattctgaaccatttactagtgtgtccgtcaagcagcagaactggatggcgggatacgtgatgttcggcgctggactcgctgttggcttggtgaatctattctgtggaattgctgttggtatcgtgggctctggtgctgctctagcggatgctgccaacgctgccttgttcgtcaagatcctcatcgttgagatttttggatctgccattggtctttttggccttattgttggcatttatatgacatcaaaagtaaaaatgggcaaccagtaa

SEQ ID NO: 45808 - protein, 205 aa, Bombyx mori
MRYFLSYLFVLLVGLAIPIFSLYYVLNGKGEQISLGWFLENTSPYMWGTLGIAFSVALSVVGAAMGIHTTGVSIVGGGVKAPRIKTKNLISVIFCEAVAIYGLITAIVLSGMLEKYSEPFTSVSVKQQNWMAGYVMFGAGLAVGLVNLFCGIAVGIVGSGAALADAANAALFVKILIVEIFGSAIGLFGLIVGIYMTSKVKMGNQ

SEQ ID NO: 45809 - DNA, 537 bp, Arabidopsis thaliana
  CDS (1)..(537)
atgtccggtgtggctattcatgcgagttcatggggcgcggctctggtgagaatctccccgtacactttctccgccatcggaatcgccatctccatcggcgtctctgttcttggtgctgcctggggaatttacattaccggaagtagtttgatcggtgccgccattgaagctcctcgaatcacttccaagaatctcatcagtgtaatcttctgtgaagccgtggctatatacggtgttattgtggcaatcatattacaaacgaagttggagagtgtaccatcatcaaagatgtatgatgctgagtctctaagagctggatatgcaatctttgcttctggaatcattgttggattcgcaaaccttgtatgcgggttatgtgtaggaatcattggaagcagttgcgcattgtctgatgctcagaactcgacgctctttgttaagattcttgtgattgagatctttgggagtgctctcgggttatttggagttatcgttgggattattatgtcagctcaagctacatggcctacaaaatag

SEQ ID NO: 45810 - protein, 178 aa, Arabidopsis thaliana
MSGVAIHASSWGAALVRISPYTFSAIGIAISIGVSVLGAAWGIYITGSSLIGAAIEAPRITSKNLISVIFCEAVAIYGVIVAIILQTKLESVPSSKMYDAESLRAGYAIFASGIIVGFANLVCGLCVGIIGSSCALSDAQNSTLFVKILVIEIFGSALGLFGVIVGIIMSAQATWPTK

SEQ ID NO: 45811 - DNA, 543 bp, Arabidopsis thaliana
  CDS (1)..(543)
atgtctggtgtggttgctcttggtcatgcgagctcgtggggcgcagcgctggtaaggatctcgccgtatactttctccgcaatcggaatcgccatctcgatcggtgtctcagtcctcggtgccgcctggggaatttacattacgggaagtagtttgatcggtgcggctatagaagctcctcgtattacttcgaagaatctcatcagtgtcatcttttgcgaagctgttgctatatatggagttattgttgcaatcatactgcaaacaaagttggagagtgtcccatcttcaaagatgtatgatgctgagtctcttagagctggatatgcaatctttgcatctggaattatagttggattcgccaaccttgtatgcgggttatgtgtaggaatcattggaagcagttgtgcattgtccgatgctcagaactccacactttttgtaaagattcttgtgatcgagatattcgggagtgctctcgggttgtttggagttattgtgggaattattatgtctgcacaagcgacatggccaacgaaatag

SEQ ID NO: 45812 - protein, 180 aa, Arabidopsis thaliana
MSGVVALGHASSWGAALVRISPYTFSAIGIAISIGVSVLGAAWGIYITGSSLIGAAIEAPRITSKNLISVIFCEAVAIYGVIVAIILQTKLESVPSSKMYDAESLRAGYAIFASGIIVGFANLVCGLCVGIIGSSCALSDAQNSTLFVKILVIEIFGSALGLFGVIVGIIMSAQATWPTK

SEQ ID NO: 45813 - DNA, 606 bp, Drosophila melanogaster
  CDS (1)..(606)
atgctgttcgtactgggcgccgcctcgttgggcgcggttggcataatcttcgccaacgtgatggtcaatatgggtgagcgcatggggctcggctggttcctgtacacctcgaatcccttcctgtggtccggcatgggcatcttcctcgcctgcgccctgtccgttctgggcgccgccagtggaatctacatgattggatgcagtgtggcgggcggcggagtgcgatcgcctcgcatcaagaccaagaacctgatctcagtcatcttttgcgaggcggtggccatctatggcctgatcacggccatcctgctgtccggcaacgtcaacaagttcagcagcgtgcgtctgatcaccgacagcacggtcatggcgaccaatatgtttacgggattcgctacttttggggcaggtctctgcgttggaatggtgaacgtggcctgcggcattgctgtgggcatcgtgggatccggcgctgccctggcggatgcggccaactcggcgctcttcgtcaagatcctcattgtggagatttttggctcggctatcggactgtttggcctgattgtggccatctacatgacctccaaggcggaaaccattaattag

SEQ ID NO: 45814 - protein, 201 aa, Drosophila melanogaster
MLFVLGAASLGAVGIIFANVMVNMGERMGLGWFLYTSNPFLWSGMGIFLACALSVLGAASGIYMIGCSVAGGGVRSPRIKTKNLISVIFCEAVAIYGLITAILLSGNVNKFSSVRLITDSTVMATNMFTGFATFGAGLCVGMVNVACGIAVGIVGSGAALADAANSALFVKILIVEIFGSAIGLFGLIVAIYMTSKAETIN

SEQ ID NO: 45815 - DNA, 639 bp, Drosophila melanogaster
  CDS (1)..(639)
atggcggcccaaatacgcaccgtggtgtcccaaacgttcctgtggctcttcctcgccgtggccaccatcctgaccctgtacttcgtgatgacgggcaagggcgagcgggtgagcgtgggctggttcctggcctcctcaaacccgtacatgtgggcctgcctgggcatcggactctccgtctcgctgtccgtcgtgggcgccgccctgggcatccatacgacgggcacgagcatcgtgggcggtggtgtgaaggcgccccgcatcaagaccaagaatctgatctcggtcatcttctgcgaggccgtggccatctacggcctgatcaccgccatcgttctgtccggccagctggagcagttctcgatggagacggccctttcgcaggcggctattcagaacacgaactggttctccggctacctcatcttcggtgctggcctggctgtcggcctggtcaatctgttctgcggcattgctgtgggcattgtgggttcgggtgccgccctctcggacgccgccaatgccgccctgttcgtcaagatccttattgtggagatcttcggttcggccatcggtctgttcggcctcatcgtgggcatctacatgacctccaagtccaagatgggcgacaaggagtag

SEQ ID NO: 45816 - protein, 212 aa, Drosophila melanogaster
MAAQIRTVVSQTFLWLFLAVATILTLYFVMTGKGERVSVGWFLASSNPYMWACLGIGLSVSLSVVGAALGIHTTGTSIVGGGVKAPRIKTKNLISVIFCEAVAIYGLITAIVLSGQLEQFSMETALSQAAIQNTNWFSGYLIFGAGLAVGLVNLFCGIAVGIVGSGAALSDAANAALFVKILIVEIFGSAIGLFGLIVGIYMTSKSKMGDKE

SEQ ID NO: 45817 - DNA, 468 bp, Strongylocentrotus purpuratus
  CDS (1)..(468)
atggcagaaaatccagcttacacgcccttttttggtgtaatgggagctacatcggcgatggtattcagtgccctaggagcagcttatgggactgcaaagagtggtacaggagtggctgcaatgagtgtgatgaggcctgagctgatcatgaaatccatcatccctgtggtcatggctggtattgttggtatctatggtctggtcgtcgctgctgtcattgccaatggaatcccttcagatccatctgcttacacactatacaagagtttcatgcacctgggtgctggcctgagtgttggtttgagtggactggctgctggctttgcaatcggaatagtaggtgatgctggtgtgagaggtacagcacaacaaccaaggctttttgtaggaatgattatcatccttatctttgcagaagttctaggtctatatggtctcatcgtggctttggtgttgtcaacaaagtag

SEQ ID NO: 45818 - protein, 155 aa, Strongylocentrotus purpuratus
MAENPAYTPFFGVMGATSAMVFSALGAAYGTAKSGTGVAAMSVMRPELIMKSIIPVVMAGIVGIYGLVVAAVIANGIPSDPSAYTLYKSFMHLGAGLSVGLSGLAAGFAIGIVGDAGVRGTAQQPRLFVGMIIILIFAEVLGLYGLIVALVLSTK

SEQ ID NO: 45819 - DNA, 630 bp, Strongylocentrotus purpuratus
  CDS (1)..(630)
atgggttacagctacagattgtactcaattttagggatactgagcgccgtagccactggaatagtcctgtggtatctgctgacagatcaactatacagactagattttggatggttcctgctagccataccgccctacatgtgggctgacattggtgtgggtttatcaatctcactctctgtcgtaggagcagcatggggtatttttacaacaggaacaagtatagtcggaggaggtgtaaaagctccacgtatcagaacaaaaaatcttatcagcattattttctgtgaagctgtggccatctacggaatcatcatggccatcgtcctctcgggtctagtcaaggattttggaaccaatccacttaaagaagagacggtggctgctaattatctagcaggttatgccatctttggtgctggtttgactgtaggctttaccaatctagcctgtggtatctgtgtgggcattgtgggtagcggagcggccctagctgatgcccagaatgctagtctctttgtgaaggtcctcatcgttgagatctttggaagcgctattggtctgtttggcgtcatcgtcggtattttacaggccagcaaatattctttcaagactgacagtacagcataa

SEQ ID NO: 45820 - protein, 209 aa, Strongylocentrotus purpuratus
MGYSYRLYSILGILSAVATGIVLWYLLTDQLYRLDFGWFLLAIPPYMWADIGVGLSISLSVVGAAWGIFTTGTSIVGGGVKAPRIRTKNLISIIFCEAVAIYGIIMAIVLSGLVKDFGTNPLKEETVAANYLAGYAIFGAGLTVGFTNLACGICVGIVGSGAALADAQNASLFVKVLIVEIFGSAIGLFGVIVGILQASKYSFKTDSTA

SEQ ID NO: 45821 - DNA, 348 bp, Nasonia vitripennis
  CDS (1)..(348)
atgtgggcacacctcaaaaccaataatttgataaatgttttatatgttggtgctgttgctatttatggactcattacagccattgtactgtctctggactgcttgacacatttaaattttatggcaggacacttgatgtttggagctggtcttactgtggggcttgttaatcttgtctgtggtattgctgttacaatcattggttttggtgcagctcttttggatgctgccaatccagccctctttgtgaaaatgctcattgtcgaaatttttggctctgccattggtctctttggactgattgtcggcgtttatggtactagtcaagcagtggttgttaatcagtaa

SEQ ID NO: 45822 - protein, 115 aa, Nasonia vitripennis
MWAHLKTNNLINVLYVGAVAIYGLITAIVLSLDCLTHLNFMAGHLMFGAGLTVGLVNLVCGIAVTIIGFGAALLDAANPALFVKMLIVEIFGSAIGLFGLIVGVYGTSQAVVVNQ

SEQ ID NO: 45823 - DNA, 636 bp, Nasonia vitripennis
  CDS (1)..(636)
atgcatctgagatacatcctgagctccgctttcgtgggcaccgctacggctgcctccacgattctagtgctctactacatgttcactggcaagggagaacaagttagcattggctggttcctcgagaatgcttcgccttacatgtgggccactcttggcattggacttactgtcgcactctccgttgttggtgctgcattaggcatacacacaactggagtctccatcattggaggtggtgtaaaagcaccacgtatcaaaaccaagaacttgatctctgttatcttctgtgaagctgttgctatttatggactcattacagccattgtactttctggaatgcttgaagcattcagtgaagagaaactagaagcaaatcttgccctcaagggccagaactttatggcaggacacttgatgtttggagctggtcttgctgtggggcttgttaatcttttctgtggtattgctgttggaatcgttggttctggtgcagctctttcggatgctgccaattcggccctcttcgtgaaaatcctcattgtcgaaattttcggctctgccattggtctctttggactgattgttggcatttacatgacttcaaaagtcaggatgggaaatgacaccaagtaa

SEQ ID NO: 45824 - protein, 211 aa, Nasonia vitripennis
MHLRYILSSAFVGTATAASTILVLYYMFTGKGEQVSIGWFLENASPYMWATLGIGLTVALSVVGAALGIHTTGVSIIGGGVKAPRIKTKNLISVIFCEAVAIYGLITAIVLSGMLEAFSEEKLEANLALKGQNFMAGHLMFGAGLAVGLVNLFCGIAVGIVGSGAALSDAANSALFVKILIVEIFGSAIGLFGLIVGIYMTSKVRMGNDTK

SEQ ID NO: 45825 - DNA, 489 bp, Magnaporthe grisea 70-15
  CDS (1)..(489)
atgccttcagaactttgcccggcctacgcgcccttcttcggcgctatgggctgcactgctgccattgtcttcacttgcctcggcgcctcgtacggcacagccaagtccggtgtcggtattgctgccatgggtgtcctgcgccctgacctgattgtcaagaacattgttcccgtcattatggctggtatcattggtatttacggtctcgtcgtgtccgtcctgatttcggacaacctgaagcaggacgaatacgccttgttcactggcttcatccagctcggtgccggtcttgccgtcggtttggctggtcttgctgctggtttcgccatcggtatcgttggtgatgccggtgtccgtggtaccgctcaacagccaaggctcttcgtcggcatgattctgattctcattttcgccgaagttttgggtctttacggtttgatcgttgcgctgctgatgaactcaaaggcgaccctcaacaccacatgctaa

SEQ ID NO: 45826 - protein, 162 aa, Magnaporthe grisea 70-15
MPSELCPAYAPFFGAMGCTAAIVFTCLGASYGTAKSGVGIAAMGVLRPDLIVKNIVPVIMAGIIGIYGLVVSVLISDNLKQDEYALFTGFIQLGAGLAVGLAGLAAGFAIGIVGDAGVRGTAQQPRLFVGMILILIFAEVLGLYGLIVALLMNSKATLNTTC

SEQ ID NO: 45827 - DNA, 606 bp, Magnaporthe grisea 70-15
  CDS (1)..(606)
atgagcttaacttatggactcgggggcactgggtctgccctcgcagtggtaggagcatacatgctctttactggcagtggtgaatcctttgacatcggggctaccattgaagagatatcacctttcgcgtgggccagcttgggcattgcgctatgcattggattgtccgttgttggagctgcttggggcatcttcatcacaggttcctccatccttggaggtggtgttaaggctcctcgaatccggaccaagaacttgatctcaattatcttttgtgaggtcgtcgccatctatggagtcatcatggccatcgtcttccaggccaaaatcaacaccctcgaccgcaccggctactactctgccaacgcgtactttacaggttatgctctcttctggtcaggcctgaccgttggcgcgtgtaacctcatatgcggcgttgctgttggaatcaatggcagtggtgctgcattggccgatgctgcggacccgaccttgttcgtcaagattctcgtcattgagattttcagctctattctcggcctctttggactcattattggtctcctcacgtcgggcaaggccaatgactttggatccagtggatga

SEQ ID NO: 45828 - protein, 201 aa, Magnaporthe grisea 70-15
MSLTYGLGGTGSALAVVGAYMLFTGSGESFDIGATIEEISPFAWASLGIALCIGLSVVGAAWGIFITGSSILGGGVKAPRIRTKNLISIIFCEVVAIYGVIMAIVFQAKINTLDRTGYYSANAYFTGYALFWSGLTVGACNLICGVAVGINGSGAALADAADPTLFVKILVIEIFSSILGLFGLIIGLLTSGKANDFGSSG

SEQ ID NO: 45829 - DNA, 606 bp, Gibberella zeae PH-1
  CDS (1)..(606)
atgagtctatactatggagtgggcggaattgggtcgttcctgaccatcgttggaggctatatgctcttcacgggcagcggtgagtccttcgatgtcggcgcgttcctcgaggccgtttcgccttatacctgggctacactgggcatcgccttttgtattggtctctctgttgttggcgctgcatggggcatcttcattaccggctcatcgattctcggtggtggtgtcaaggcaccccgtattcgaaccaagaacttgatctccattatcttctgtgaggtcgtcgccatctacggcgtcatcatggccatcgtcttttcccaaaaggtcgagaacgtttcaggcgccgatctctacgccgccgaatcttactacactggatatgccctcttctggtctggtatcactgtcggcatgtgcaacctcatctgcggtgtcgctgttggtatcaacggaagtggtgctgctctggctgatgctgccgatccctctctcttcgtcaagattctggtcattgagatcttcagctcagtactcggcctgttcggtcttatcattggcctcctggtttccagcaaggcccctgcctttggcgagaagaaataa

SEQ ID NO: 45830 - protein, 201 aa, Gibberella zeae PH-1
MSLYYGVGGIGSFLTIVGGYMLFTGSGESFDVGAFLEAVSPYTWATLGIAFCIGLSVVGAAWGIFITGSSILGGGVKAPRIRTKNLISIIFCEVVAIYGVIMAIVFSQKVENVSGADLYAAESYYTGYALFWSGITVGMCNLICGVAVGINGSGAALADAADPSLFVKILVIEIFSSVLGLFGLIIGLLVSSKAPAFGEKK

SEQ ID NO: 45831 - DNA, 486 bp, Gibberella zeae PH-1
  CDS (1)..(486)
atggtcagcgaactttgccccgtttactcgcccttcttcggtgccatgggctgcacctgcgccattgtcttcacctgtctcggtgcctcttacggtaccgccaagtctggtgttggtatcgccgctatgggtgtcctccgccctgacttgatcgtcaagaacattgttcccgtcattatggctggtatcattggtatctacggtctcgtcgtctcagtccttatctccgatggtctcaagcaggacttgcccctgttcactagcttcatccaattcggtgctggtctttccgttggtctcgcaggtctcgctgccggtttcgccattggtattgtcggtgatgctggtgtccgaggaactgcccaacagccccgtctcttcgtcggaatgattctgattctcattttcgccgaagtcctcggtctctatggtcttattgttgctctgctcatgaactccaaggccaccgtcgacgctgtctgctaa

SEQ ID NO: 45832 - protein, 161 aa, Gibberella zeae PH-1
MVSELCPVYSPFFGAMGCTCAIVFTCLGASYGTAKSGVGIAAMGVLRPDLIVKNIVPVIMAGIIGIYGLVVSVLISDGLKQDLPLFTSFIQFGAGLSVGLAGLAAGFAIGIVGDAGVRGTAQQPRLFVGMILILIFAEVLGLYGLIVALLMNSKATVDAVC

SEQ ID NO: 45833 - DNA, 624 bp, Apis mellifera
  CDS (1)..(624)
atgagatacattttgggtactacttttgcgggtactgcttcagcaacaattctagtattagtattatatcatctatttactggaaaaggtgaacgtgttagtattgcatggtttttagaaaatacctcaccgtatatgtgggcaactcttggtattggacttgcagtagctttatctgttgttggtgctgcattgggaatacatacaacaggagtttcaattattggaggtggtgtaaaagcaccaagaattaaaacaaaaaatttaatttcggtaatattttgtgaagctgtagctatttacggtttgattactgccattgtattatctggaatgttagaaaaatttactgctgaagctattcagaaagaagaagttcgtgatcaaaattggtttgctggttatttaatgtttggagcaggcttagctgttggtcttgttaatttattttgtggtatagctgttggcattgttggttctggtgcagccctttctgatgcagcgaattctgctctttttgttaaaattcttattgtagaaatctttggttctgccattggactttttggattaattgttggaatttatatgacatctaaagtaaagatgggaaataaagtataa

SEQ ID NO: 45834 - protein, 207 aa, Apis mellifera
MRYILGTTFAGTASATILVLVLYHLFTGKGERVSIAWFLENTSPYMWATLGIGLAVALSVVGAALGIHTTGVSIIGGGVKAPRIKTKNLISVIFCEAVAIYGLITAIVLSGMLEKFTAEAIQKEEVRDQNWFAGYLMFGAGLAVGLVNLFCGIAVGIVGSGAALSDAANSALFVKILIVEIFGSAIGLFGLIVGIYMTSKVKMGNKV

SEQ ID NO: 45835 - DNA, 483 bp, Candida glabrata CBS 138
  CDS (1)..(483)
atgtctgaattgtgtccagtttatgcgccattcttcggtgccattggttgtgcagctgccatcattttcacttctttgggtgctgcttacggtaccgcaaagtctggtgttggtgtatgtgtaacctgtgttctaagaccagatcttttgattaagagtattgttccaattgttatggccggtattattgccatttacggtctagttgtttccgtgttgatcagttcgtctctgacccaaaaacaagctctatacaccggtttcgtccaattgggtgcaggtctttcagttggtttgagtggtctagctgctggtttcgccattggtattgttggtgatgccggtgtcagaggtactgctcaacaaccaagattatttgtaggtatgattttgattttaattttctcagaagttttaggtttgtacggtttgattgtcgctctattgatgaattccagagctactcaagacgttatctgttaa

SEQ ID NO: 45836 - protein, 160 aa, Candida glabrata CBS 138
MSELCPVYAPFFGAIGCAAAIIFTSLGAAYGTAKSGVGVCVTCVLRPDLLIKSIVPIVMAGIIAIYGLVVSVLISSSLTQKQALYTGFVQLGAGLSVGLSGLAAGFAIGIVGDAGVRGTAQQPRLFVGMILILIFSEVLGLYGLIVALLMNSRATQDVIC

SEQ ID NO: 45837 - DNA, 636 bp, Candida glabrata CBS 138
  CDS (1)..(636)
atggctgttgttgctgataagcctcttgtcggcaagattaactattcccgctatttctactacttggtgctatttgtggtggtggtctatgcacttcgcaaaatgttgacaggacatgggtccgatattgatatcggcagattcctgtcaaaaacctctccatatatgtgggcaaatcttggtattgcctcttgtataggtctaagtgttgtgggtgccgcatggggtatctttatcacggggtcatctatgattggtgctggtgtgcgggcacctagaatcactacaaagaacttgatctccattatcttctgtgaagtggtggctatctatggtttaattatggcaatcgtcttttcttctaaattaactgtgtcatcgaaggattcgctttactcaaaatctaacctgtacaccggctactccttattttgggctggtctgacagtgggtgtctcaaatctaatatgtggtgtatctgtcggtatcacaggagctactgctgctgttgcagatgccgcagactcctccttgtttgttaagattctagttatagaaatttttggttctattttgggtctattgggtttgatcgttggtttgctgatggccggtaaagcagccgatttccagtag

SEQ ID NO: 45838 - protein, 211 aa, Candida glabrata CBS 138
MAVVADKPLVGKINYSRYFYYLVLFVVVVYALRKMLTGHGSDIDIGRFLSKTSPYMWANLGIASCIGLSVVGAAWGIFITGSSMIGAGVRAPRITTKNLISIIFCEVVAIYGLIMAIVFSSKLTVSSKDSLYSKSNLYTGYSLFWAGLTVGVSNLICGVSVGITGATAAVADAADSSLFVKILVIEIFGSILGLLGLIVGLLMAGKAADFQ

SEQ ID NO: 45839 - DNA, 744 bp, Kluyveromyces lactis NRRL Y-1140
  CDS (1)..(744)
atgagacctttagaagcagagaggttcctcggctgcaggggttacagctttatcaagtgggttcaagcattgacgcatagtacacttgtagaaatttttttgtttaagatgtctaagactggatcatcttcaagagctgcatggcagtataccaagagtgcaatcaattacacgataataacagttatcttggtatacgttctttacaagctatttaccaatcatggtgaggatataaattttggtaagttcttgatgaagacttctccttatatgtgggcgaatctagggatcgctttgtgcataggtctttcggtggtgggagctgcttggggtattttcatcactggttcttcaattattggtgctggtgtgcgtgcaccaagaatcactaccaagaacttgatttcgatcattttctgtgaagtggtggctatctacgggctaattatggccattgtgttttcttccaaggtaaccgttgccaattctgcgacgatgttcgataagtccaatctatacaccgggtactcgatattctgggctgggattaccgttggtgtttcgaatttgatttgtggtgtggctgtgggtatcactggtgccactgcagctatatcagatgctgcagactcgtctcttttcgttaagatcttggttattgaaatttttggttctgtacttggattattgggattgattgtcggattattgatggcaggtaaagcggttgaattccaatag

SEQ ID NO: 45840 - protein, 247 aa, Kluyveromyces lactis NRRL Y-1140
MRPLEAERFLGCRGYSFIKWVQALTHSTLVEIFLFKMSKTGSSSRAAWQYTKSAINYTIITVILVYVLYKLFTNHGEDINFGKFLMKTSPYMWANLGIALCIGLSVVGAAWGIFITGSSIIGAGVRAPRITTKNLISIIFCEVVAIYGLIMAIVFSSKVTVANSATMFDKSNLYTGYSIFWAGITVGVSNLICGVAVGITGATAAISDAADSSLFVKILVIEIFGSVLGLLGLIVGLLMAGKAVEFQ

SEQ ID NO: 45841 - DNA, 483 bp, Kluyveromyces lactis NRRL Y-1140
  CDS (1)..(483)
atgagtgatttgtgtccagtgtatgctccattctttggtgccatcggttgtgctgcagccattattttcacctctttcggtgctgcttacggtactgccaagtcaggtgtcggtatttgtgcgacatgtgtcttgagaccagatctattgttcaagaatattgttccggttattatggctggtatcattgccatttacggtttagttgtttctgttttggtgtgttactctttgggccaaaagcaagctttatacactgggttcatccaattaggtgctggtttgtctgttgggttaagtggtctagctgctggtttcgccattggtattgttggtgatgcaggtgttagaggtactgctcaacaaccaagattattcgttggtatgattttgatcttgattttcgctgaagttttgggtttgtacggtttgattgttgccctattgttgaactctagagctactcaagatgtcgtttgttaa

SEQ ID NO: 45842 - protein, 160 aa, Kluyveromyces lactis NRRL Y-1140
MSDLCPVYAPFFGAIGCAAAIIFTSFGAAYGTAKSGVGICATCVLRPDLLFKNIVPVIMAGIIAIYGLVVSVLVCYSLGQKQALYTGFIQLGAGLSVGLSGLAAGFAIGIVGDAGVRGTAQQPRLFVGMILILIFAEVLGLYGLIVALLLNSRATQDVVC

SEQ ID NO: 45843 - DNA, 537 bp, Debaryomyces hansenii CBS767
  CDS (1)..(537)
atgttatttaataattcaggggaatcgttcaatataggagagtttttagaatcaacgtctccttatatgtgggcgaatttaggtatcgctagttgcattggattttcagttgttggcgctgcatggggtatttttattactgggtcgtctattatcggtgcaggtgtcaaggctccaaggattacgactaaaaatttaatttctattattttctgtgaagttgtggccatttatggattgattatggcaattgttttctcatccaagttaactaacgttccgcagacagaattatttacgaaggaaaacttgtatactgggtactctttgttttgggccggtttgactgttggtatttccaatttaatttgtggtttagcagttggtgtgactggttccacagcagctataagtgacgccgctgattcatcgcttttcgtcaagattttagttattgaaatctttggttctgtcttaggtttattcggattaattgttggattattaatggctggtaaagctttagaattccaataa

SEQ ID NO: 45844 - protein, 178 aa, Debaryomyces hansenii CBS767
MLFNNSGESFNIGEFLESTSPYMWANLGIASCIGFSVVGAAWGIFITGSSIIGAGVKAPRITTKNLISIIFCEVVAIYGLIMAIVFSSKLTNVPQTELFTKENLYTGYSLFWAGLTVGISNLICGLAVGVTGSTAAISDAADSSLFVKILVIEIFGSVLGLFGLIVGLLMAGKALEFQ

SEQ ID NO: 45845 - DNA, 591 bp, Yarrowia lipolytica CLIB122
  CDS (1)..(591)
atggctacgaaaatcctggcttcgacactgttcctgtttggactagttgttgctggctacctgcttttccagggcgaaggcgagtccttcaatgtcggcgagtttctgtccaccacaagtccgctcatgtgggccaatctgggcattggcatgtgtatcactctgagtgtgattggagctgcttggggaattttcatcaccggaagtacaatcatcggagccggcgtcaaggcgccacgaatcacaaccaaaaacctcatctccattattttctgtgaggtggtggccatctacggtctgattatggccattgtcttttcggccaagctggcgagcgtggaagacgtgtacaccaagtcgaacatgtacaccggcttctcgctcttctgggccggtctgactgtcggtctgggcaacctcgtttgtggtatctgtgttggaatcaccggatccactgccgccgttgctgacgccgccgactcggctctgtttgtcaaaattctggtcattgagattttcggctctgttctcggacttttcggtctcattgtcggtcttctcatggccggcaaggcctcggaaatctcctga

SEQ ID NO: 45846 - protein, 196 aa, Yarrowia lipolytica CLIB122
MATKILASTLFLFGLVVAGYLLFQGEGESFNVGEFLSTTSPLMWANLGIGMCITLSVIGAAWGIFITGSTIIGAGVKAPRITTKNLISIIFCEVVAIYGLIMAIVFSAKLASVEDVYTKSNMYTGFSLFWAGLTVGLGNLVCGICVGITGSTAAVADAADSALFVKILVIEIFGSVLGLFGLIVGLLMAGKASEIS

SEQ ID NO: 45847 - DNA, 603 bp, Aspergillus nidulans FGSC A4
  CDS (1)..(603)
atgggtctctcttatccgtttggtttcgcaaccgtgtcactgctggtgatcggaggctatatgctctttcatggagagggcgaacaattcaatgttggccaatttctcgaatccgtgtctccgtatgtctgggcgaatattggtattgcaatgtgcattggactatcagtagtgggcgctgcatggggtatcttcctgaccggctcatcgattgtcggtggaggtgtcaaggctccccgaatccgaaccaagaacctgatttcgatcattttctgcgaagtcgtcgctatctacggtgttattatggctattgtcttctcctcgaagctcaacctcgcaaccggcgacgaaattcattcacccagcagttactacaccggctatgcgcttttctggggaggaatcactgttggcgcctgcaacctgatttgcggtatctccgttggtataaacggtagcggtgctgctctggccgacgccgctgatcccagcttgttcgttaagattcttgtcgtcgaaatctttagctctgtcctgggcttgtttggtcttatcgtcggtctcttggtccagggcaaggccaccgagtttggagccgcgtaa

SEQ ID NO: 45848 - protein, 200 aa, Aspergillus nidulans FGSC A4
MGLSYPFGFATVSLLVIGGYMLFHGEGEQFNVGQFLESVSPYVWANIGIAMCIGLSVVGAAWGIFLTGSSIVGGGVKAPRIRTKNLISIIFCEVVAIYGVIMAIVFSSKLNLATGDEIHSPSSYYTGYALFWGGITVGACNLICGISVGINGSGAALADAADPSLFVKILVVEIFSSVLGLFGLIVGLLVQGKATEFGAA

SEQ ID NO: 45849 - DNA, 591 bp, Candida albicans SC5314
  CDS (1)..(591): transl_table=12
atgtctgttccatcaatattagcaacaacagcattattaactgttggaggatatatgttattcactggagcaggagagtcattcaatattggagaatttttagaatcaacatcaccttatatgtggacatcattaggaattggatcatgtattggattctctgttgttggagccgcatgggggattttcattacggggacatcaattttaggtgctggtgtaaaagcaccaagaattactactaaaaatttaatttcaattattttttgtgaagttgtagctatttatggattgattatggccattgttttttctgctaaattaactagtgtaccatcgaaaagtttatatactaaagaaaatttatatacgggttattcattattttgggctggattaactgttggaatatcgaatttgatttgtggtattgctgttggaattacggggtctactgctgctattagtgatgctgctgattcttcactttttgtgaaaatattggtggtggagatttttggatctgttttagggttatttggattgattgttggattattaatgactggtaaagctcaagaatttagttaa

SEQ ID NO: 45850 - protein, 196 aa, Candida albicans SC5314
MSVPSILATTALLTVGGYMLFTGAGESFNIGEFLESTSPYMWTSLGIGSCIGFSVVGAAWGIFITGTSILGAGVKAPRITTKNLISIIFCEVVAIYGLIMAIVFSAKLTSVPSKSLYTKENLYTGYSLFWAGLTVGISNLICGIAVGITGSTAAISDAADSSLFVKILVVEIFGSVLGLFGLIVGLLMTGKAQEFS

SEQ ID NO: 45851 - DNA, 762 bp, Cryptococcus neoformans var. neoformans B-3501A
  CDS (1)..(762)
atggctttcctcccacgtctcctcatatcgtccacctcgctcgccacagtcgtcggcctctatctcctcttcacagggcaaggcgaggcgttcaatgtcggcaactttctcgcagagtcgtcgccgtatgcgtgggcgcttgtcggcgtggggctgtgtatcggtctgagcgtatctggcgccgcatggggtatctttgtgacgggtgcgtccatcttgggcggcggtgtgcgagcaccaaggatcaggaccaagaacttgatttccatcatcttctgcgaggttgtcgccatctatggtgtgatcatggcgattgtattctcatccaaaatcaatggagacgttccgaatatctatacagccaacaactattacaccggctttgcgctcttctggggcggtctcgctgtgggagtgtgcaaccttctctgtggcgtgtcggtgggtatcaccgggtcgactgctgcggtagcggacgcggcggatcctcagctgtttgtcaagattcttattgtcgagatctttgggtctgttcttggtttgttcgggcttattgttggcctcctcatcgtcagtcgtccccccactctgtctcgccacccactgacccagcgtgcagtccggcaaggccgaagagtttgcgtaaatctagacaacgttattacaatgcattattatttcgatatgtctacaagtgccgcttggcgatgctcttcaccctggcttcgaacgccgggctttttatcggcgtgttggtggtaa

SEQ ID NO: 45852 - protein, 253 aa, Cryptococcus neoformans var. neoformans B-3501A
MAFLPRLLISSTSLATVVGLYLLFTGQGEAFNVGNFLAESSPYAWALVGVGLCIGLSVSGAAWGIFVTGASILGGGVRAPRIRTKNLISIIFCEVVAIYGVIMAIVFSSKINGDVPNIYTANNYYTGFALFWGGLAVGVCNLLCGVSVGITGSTAAVADAADPQLFVKILIVEIFGSVLGLFGLIVGLLIVSRPPTLSRHPLTQRAVRQGRRVCVNLDNVITMHYYFDMSTSAAWRCSSPWLRTPGFLSACWW

SEQ ID NO: 45853 - DNA, 630 bp, Tribolium castaneum
  CDS (1)..(630)
atgagggctatattgggctacaccttcgttgggacctcctccctggtcataacaatcctaaccctttaccatgtcttgactggcaaaggcgaaagggttagtgtggggtggtttctagagaaaacatccccgtacatgtggtgcacaataggcatcgggctagccgttgccttatcggtggttggggcggcagccggtattcacaccacaggcgtcagtattatcggtggtggagtgaaagccccacgcatcaaaaccaaaaatttaatctcagttatcttctgtgaagccgtcgctatttatggtctcatcactgctatagtgttgtctggttatttggagaaattcacttggtctagagccatggagaacgacgagattaaagcgagaaattggctcgctggttattcgatgtttggagctggagttgctgttggtctagtgaatttattctgcggcattgctgttggaattgttggctcaggagccgctttagccgacgcggcaaacgcagctttgttcgttaaaatcctgattgtggagattttcggcagtgcgattggcttgtttgggctcattgtgggcatttacatggtttcgaaagcctcaatgggcgacaagtcatcctaa

SEQ ID NO: 45854 - protein, 209 aa, Tribolium castaneum
MRAILGYTFVGTSSLVITILTLYHVLTGKGERVSVGWFLEKTSPYMWCTIGIGLAVALSVVGAAAGIHTTGVSIIGGGVKAPRIKTKNLISVIFCEAVAIYGLITAIVLSGYLEKFTWSRAMENDEIKARNWLAGYSMFGAGVAVGLVNLFCGIAVGIVGSGAALADAANAALFVKILIVEIFGSAIGLFGLIVGIYMVSKASMGDKSS

SEQ ID NO: 45855 - DNA, 630 bp, Maconellicoccus hirsutus
  CDS (1)..(630)
atggggttgcggaaaacggtgttctacgtatacatgctgtccatggcaacagtatccaccggagtgatactcttctacgttctaacaggcagaggtgagaaactcagcatcggatggtttttagaaaacaccactccgtatatgtgggcaacgcttggtatagccctatctgtagccttttcggtcgtcggagctgccgcagggatatacaccactggcgtcagcatcatcggcggaggtgttaaaacaccacgtataaaaaccaaaaatctgatctctgtaatcttctgcgaagctgtagccatctatgggctaatcttggctatcgtattgtccggtcaattggatcctttcaccgataacaagcttaccgaggcgtcagttcgaaaccaaaactatctctctggatatttaatgttcggtgctggattaagcgtcggtttagtaaatctattctgcggaatggccgtaggaattgttggttctggagctgcgttagctgatgctgccaattcttcgttatttgtcaaagttctcatcgttgaaattttcggtagcgctattggtttatttggattaattgtaggtatctatatgacatccaagatcaaaatgggtgataaattgtaa

SEQ ID NO: 45856 - protein, 209 aa, Maconellicoccus hirsutus
MGLRKTVFYVYMLSMATVSTGVILFYVLTGRGEKLSIGWFLENTTPYMWATLGIALSVAFSVVGAAAGIYTTGVSIIGGGVKTPRIKTKNLISVIFCEAVAIYGLILAIVLSGQLDPFTDNKLTEASVRNQNYLSGYLMFGAGLSVGLVNLFCGMAVGIVGSGAALADAANSSLFVKVLIVEIFGSAIGLFGLIVGIYMTSKIKMGDKL

SEQ ID NO: 45857 - DNA, 534 bp, Vitis vinifera
  CDS (1)..(534)
  misc_feature (21)..(21): w is a or t
  misc_feature (25)..(25): k is g or t
  misc_feature (29)..(29): r is g or a
atggcgggaccatccagctcwtggkcgcrcgcacttgttcagatctcgccctataccttctccgccatcggcatcgccgtcgccatcggcgtctctgtcttaggcgcagcttggggaatttacataactggaagcagtctgatcggcgctgcaattaaagccccacgtatcacttccaagaatctcattagtgtaatcttctgtgaagctgttgctatatatggtgtcattgtggcaatcatcctacaaacgaagttagagagtgttccagcatccaaaatatatgcacctgagtctcttagagcaggatatgcaatatttgcctctgggattattgtgggctttgcaaaccttgtctgcgggttgtgtgtagggataattggaagcagctgtgcattgtcggatgcccaaaactcctctctttttgtgaagattctggtgattgaaatatttggtagtgcactgggattgtttggagtgattgttggcataatcatgtcagcacaggcaacctggcctgcaggatcagcatga

SEQ ID NO: 45858 - protein, 177 aa, Vitis vinifera
  misc_feature (9)..(9): The Xaa at location 9 stands for Ala, or Ser.
  misc_feature (10)..(10): The Xaa at location 10 stands for Arg, or His.
MAGPSSSWXXALVQISPYTFSAIGIAVAIGVSVLGAAWGIYITGSSLIGAAIKAPRITSKNLISVIFCEAVAIYGVIVAIILQTKLESVPASKIYAPESLRAGYAIFASGIIVGFANLVCGLCVGIIGSSCALSDAQNSSLFVKILVIEIFGSALGLFGVIVGIIMSAQATWPAGSA

SEQ ID NO: 45859 - DNA, 591 bp, Pichia guilliermondii
  CDS (1)..(591)
atgtcttactttcaattggcaccagtggcagccatcgccgtggtcggtggctacatgctattcactgggtctggagaatcatttaatgtgggcgaatttctccaaacaacctccccatacatgtgggcaactttgggaatcgccgcctgtattggattatctgtcgtgggggcagcatggggaatattcgttactggttcctccattataggtgccggagtcaaggctcccagaatcaccaccaaaaatttgatttccatcattttctgtgaagtggtggccatctatggtttgatcatggccattgtgttttcttcaaaactcaccaatgtgctggaatcggcattgttttcgaaagaaaacctctatactggctactcattgttctgggcgggaataaccgtgggtgtttccaacttgatttgtggagttgccgttggtataactgggtccacggcggccatcagtgatgccgctgattcgtcattattcgtcaagattttggtcattgagatctttggctcggtgttggggttgttcggcttgattgttgggttgttgatggccgccaaggcccaggaattccagtga

SEQ ID NO: 45860 - protein, 196 aa, Pichia guilliermondii
MSYFQLAPVAAIAVVGGYMLFTGSGESFNVGEFLQTTSPYMWATLGIAACIGLSVVGAAWGIFVTGSSIIGAGVKAPRITTKNLISIIFCEVVAIYGLIMAIVFSSKLTNVLESALFSKENLYTGYSLFWAGITVGVSNLICGVAVGITGSTAAISDAADSSLFVKILVIEIFGSVLGLFGLIVGLLMAAKAQEFQ

SEQ ID NO: 45861 - DNA, 495 bp, Acetabularia acetabulum
  CDS (1)..(495): transl_table=6
atggcagacgaaactaaaggccccgttcaattgacagcttctttctacggcttcttaggtgctgcgtttgccctaatattttcttgtatgggtgctgcctacggtacagctaaatccggtatcggtattgcccaaatgggcgtgatgaaacccgagctggtgatgaaatcaattgtgcctgttgtgatggccggtgttttgggaatttatggattgattattgctgtcattatctccacaaatgttaagaaaacagcgtatactttatatgatggatatgcacacatgggcgccggtattgcgtgcggtatggctggtatgccggcaggaatggcaattggtatagtgggagacgctggtgttcgtgccaatgcttaacaacccaaattgtttgtgggggtgattttaattcttattttcgccgaggctttggctttgtatggtttgattgttggaatcattcttgcttcaaaggcgtctggaggaagttcatga

SEQ ID NO: 45862 - protein, 164 aa, Acetabularia acetabulum
MADETKGPVQLTASFYGFLGAAFALIFSCMGAAYGTAKSGIGIAQMGVMKPELVMKSIVPVVMAGVLGIYGLIIAVIISTNVKKTAYTLYDGYAHMGAGIACGMAGMPAGMAIGIVGDAGVRANAQQPKLFVGVILILIFAEALALYGLIVGIILASKASGGSS

SEQ ID NO: 45863 - DNA, 711 bp, Ostreococcus tauri
  CDS (1)..(711)
atggtttttttcaatcagtttccttattcggtggcgcgtcgtccagcgacagcgactgagcgtgagaaaatgcccggaatacttaacgagcgatcgattcccgtccttgccgcgttgtggacgctcacgctcgtcctcatcgtgcggggaactcgcgtggaggaaggatctgcgttgggcatcgactgggctcgtctctggctgctgttcactcgaatcaacccttacttcttttccgccctcggtatcgccgccgcggtcggacttagcgttgcgggcgcggcgtgggggatctttatcacgggaagcaccttgctcggagctgcggtgcacgtgcctcgcatcacaagcaaaaacttgatcagcgtcatcttctgcgaagcggttgcgatttacggagtcatcatcgccatcatcctgagcacaaaattgagtgatgttcctcgcgatccggataccggggcgtatcacccgtcaacgatgatggctggatacgcagtgtttgcgagcggtttgacgtgtgggctggcgaacttggtgtgcgggatatgcgtgggtgtggttggtagttcttgtgcgcttgcggacgccgcgaatccggcgctgttcgtcaaaattctggtgattgaaatttttggcagcgctctcggtctattcggcgttatcgttgccatcatcctcagctcaaatgctgtgttcgagaaggtgtag

SEQ ID NO: 45864 - protein, 236 aa, Ostreococcus tauri
MVFFNQFPYSVARRPATATEREKMPGILNERSIPVLAALWTLTLVLIVRGTRVEEGSALGIDWARLWLLFTRINPYFFSALGIAAAVGLSVAGAAWGIFITGSTLLGAAVHVPRITSKNLISVIFCEAVAIYGVIIAIILSTKLSDVPRDPDTGAYHPSTMMAGYAVFASGLTCGLANLVCGICVGVVGSSCALADAANPALFVKILVIEIFGSALGLFGVIVAIILSSNAVFEKV

SEQ ID NO: 45865 - DNA, 600 bp, Phaeosphaeria nodorum
  CDS (1)..(600)
atgtctcttacttacggaaccggcggcgccacagctgcgcttggcgtggttgggctttacatgctcttccagaacgagggtgaagccttcaatgtcggacaatttctcgaaaccgtctcgccgtacacattcgccagtttgggcatcgcgctatgcatcggtctctccgttgtaggctcagcatggggaatctggactaccggtgtctcgatcgtcggtggtggtgtcaaggcaccccggataagaacgaagaacttgatctccatcattttctgcgaagtcgtcgccatctacggcgtcatcatggccatcatcttctcttccaagatgaaccagatcgatgacattgaacaaatcttcagcccatcaaacatcttcaccggatacgcactgttctgggctggcttgaccgttggcatgtgcaacttgatctgcggtgtctgtgtcggcatcaacggaagtagtgctgccctagcagatgctgctgacccctccctgttcgtgaagattctcaccattgagatcttcgctgctattcttggactattcggtctcattattggactgctcatgcaaagcaacgcgcacgattttgagtga

SEQ ID NO: 45866 - protein, 199 aa, Phaeosphaeria nodorum
MSLTYGTGGATAALGVVGLYMLFQNEGEAFNVGQFLETVSPYTFASLGIALCIGLSVVGSAWGIWTTGVSIVGGGVKAPRIRTKNLISIIFCEVVAIYGVIMAIIFSSKMNQIDDIEQIFSPSNIFTGYALFWAGLTVGMCNLICGVCVGINGSSAALADAADPSLFVKILTIEIFAAILGLFGLIIGLLMQSNAHDFE

SEQ ID NO: 45867 - DNA, 597 bp, Aspergillus oryzae
  CDS (1)..(597)
atgggtctcgtctatccagctggtgctgctaccgtgtcactcctggtgatcgggggctatatgcttttccacggagatggcgaacaatttaatgttggtcaattcctcgaatcggtatctccatatgcttgggcaaacatcggtatcgcgatgtgcataggtttatcagtcgttggagcagcgtggggtatctttctcacaggttcatctattgtcggcggaggtgtcaaggcaccaagaatccggacgaagaacttgatctctattatcttctgcgaagtagtggctatttatggtgtcatcatggcaatagttttctcttcgaagctcaatctcgtcggcgatgatgaaatcttctccggcagcaaccaatataccggatacgcactcttttggggtggtatcactgtgggcatgtgcaatttgatctgtggtatctctgtcggtatcaatggaagcagtgcagctctagccgatgctgctgatggaagcttgtttgtgaagatccttgttatcgagatcttcagctccgtccttggcttattcggtcttatcatcggactcctggtgacacagaaggctaacgaatttaagtaa

SEQ ID NO: 45868 - protein, 198 aa, Aspergillus oryzae
MGLVYPAGAATVSLLVIGGYMLFHGDGEQFNVGQFLESVSPYAWANIGIAMCIGLSVVGAAWGIFLTGSSIVGGGVKAPRIRTKNLISIIFCEVVAIYGVIMAIVFSSKLNLVGDDEIFSGSNQYTGYALFWGGITVGMCNLICGISVGINGSSAALADAADGSLFVKILVIEIFSSVLGLFGLIIGLLVTQKANEFK

SEQ ID NO: 45869 - DNA, 534 bp, Xerophyta viscosa
  CDS (1)..(534)
atgatggctgattcgagctcatggggacgagcgcttgttcagatctcgccgtacactttcgccgccatcggcatcgcaatctccatcggcgtctctgtcctcggcgccgcctgggggatcttcataacgggtagcagtttgatcggtgcggcgatcaaagcgccgagaatcacttctaagaacctcatcagcgtcatcttctgtgaggcagttgctatatatggagtcatagttgcaattatcttgcaaacgaagttagaaagtgttccagcggcacagatttacaccgcagagtcacttagagctggttatgcaatctttgcttctgggattattgtgggttttgcaaatcttgtatgtgggctttgtgtcggaataatcggaagcagttgcgcactgtcagatgctcaaaattcctccctctttgtgaagattttggtaattgaaatctttggcagcgcactcggtttgtttggagttatcgtaggaatcattatgtcatctcaagctacttggccggcaaggggagcgtga

SEQ ID NO: 45870 - protein, 177 aa, Xerophyta viscosa
MMADSSSWGRALVQISPYTFAAIGIAISIGVSVLGAAWGIFITGSSLIGAAIKAPRITSKNLISVIFCEAVAIYGVIVAIILQTKLESVPAAQIYTAESLRAGYAIFASGIIVGFANLVCGLCVGIIGSSCALSDAQNSSLFVKILVIEIFGSALGLFGVIVGIIMSSQATWPARGA

SEQ ID NO: 45871 - DNA, 549 bp, Citrus limon
  CDS (1)..(549)
atgtcgggctccgtaatgttgggagaatcaagctcatggtcacgcgcgctcgttaagatatcaccatataccttctccgccatcggcatcgctgtggccatcggcgtctccgtcctcggtgccgcctgggggatctacataacggggagtagtttaatcggtgccgcaatcaaggctcctcgtatcacctccaagaatctcatcagtgtaattttttgtgaagctgttgctatatatggggtcattgttgcaattattttacaaacaaagttagaaagtgttccggcatcacagatatatgcacctgaatcactaagagctggatatgccatctttgcctctgggatcatcgtgggctttgctaacctagtttgtgggttgtgtgtaggaataattggaagcagctgtgcattgtctgatgcccaaaactcgtccttgtttgtgaagattttggtgattgagatctttggtagtgctcttgggttgtttggagtgattgttggaataattatgtcagctcaagcatcatggcctgcaaaaccagtgtaa

SEQ ID NO: 45872 - protein, 182 aa, Citrus limon
MSGSVMLGESSSWSRALVKISPYTFSAIGIAVAIGVSVLGAAWGIYITGSSLIGAAIKAPRITSKNLISVIFCEAVAIYGVIVAIILQTKLESVPASQIYAPESLRAGYAIFASGIIVGFANLVCGLCVGIIGSSCALSDAQNSSLFVKILVIEIFGSALGLFGVIVGIIMSAQASWPAKPV

SEQ ID NO: 45873 - DNA, 504 bp, Tortula ruralis
  CDS (1)..(504)
atgtcgactgccgcggtgttcaacggcgacgaggtcgcgcccttcttcggcttcatcggagccgcggccgcgctcgtcttctcatgtatgggagctgcctatggaacagctaagagtggagtgggagtggcgtccatgggtgtgatgcgccccgagctcgtgatgaagtccatcgtgcccgtggtcatggcgggagtgctgggtatctacggactgattattgctgtgattatcagcacaggaatcaaccccaagtccaagccgtactacgtgtttgacggctacgcgcatctgtcgtctggattgtcctgcggtttggctggtctttcggcaggcagggccattggcatggtgggagatcccggtggcagggccaacgcgcagcagcccaagctgtttggtggcatgatcttgatcctcattttcgctgaggcgcttgctttgtacggtctgatcgtgggcatcatctggtcgtcgcgcgctggacagtcccgggccgactaa

SEQ ID NO: 45874 - protein, 167 aa, Tortula ruralis
MSTAAVFNGDEVAPFFGFIGAAAALVFSCMGAAYGTAKSGVGVASMGVMRPELVMKSIVPVVMAGVLGIYGLIIAVIISTGINPKSKPYYVFDGYAHLSSGLSCGLAGLSAGRAIGMVGDPGGRANAQQPKLFGGMILILIFAEALALYGLIVGIIWSSRAGQSRAD

SEQ ID NO: 45875 - DNA, 486 bp, Aspergillus oryzae
  CDS (1)..(486)
atggccacagaactttgtcccgtctatgcacccttcttcggtgccttgggttgcacctcggccatcgtcttcacctgcttcggtgccgcctatggaaccgctaaggccggtgtcggtgtctgtggaatggctgtcctcagacccgatttgatcgtcaagaacatcgttcccattgtcatggcgggtatcatcggtatctacggactggtcgtgtccgtcctgatcgcgaacgacttggcacagacggtccctctatacaccggattcattcagctgggagcaggtctcgctgtcggtctggctggtctggcagctggttttgccatcggtattgtcggtgacgctggtgtccgcggaacagcccagcaacctaggctctatgttggcatgattcttatcctcattttcgctgaagttttgggtctttacggtctcatcgttgcccttttgatgaactctcgggccaagatcgatgccaagtgctaa

SEQ ID NO: 45876 - protein, 161 aa, Aspergillus oryzae
MATELCPVYAPFFGALGCTSAIVFTCFGAAYGTAKAGVGVCGMAVLRPDLIVKNIVPIVMAGIIGIYGLVVSVLIANDLAQTVPLYTGFIQLGAGLAVGLAGLAAGFAIGIVGDAGVRGTAQQPRLYVGMILILIFAEVLGLYGLIVALLMNSRAKIDAKC

SEQ ID NO: 45877 - DNA, 483 bp, Saccharomyces cerevisiae
  CDS (1)..(483)
atgactgaattgtgtcctgtctacgcccctttctttggtgccattggttgtgcctctgcaattatcttcacctcattaggtgctgcttacggtactgctaagtctggtgttggtatctgtgccacttgtgtgttgagaccagacctattattcaagaacattgttcctgttattatggctggtatcattgccatttacggtttagttgtttccgttttggtttgttattcgttgggtcaaaagcaagctttgtacaccggtttcatccaattgggtgccggtctatcagtcggtttgagtggtctagctgctggtttcgctattggtattgtcggtgatgcaggtgttagaggttcctctcaacaaccaagattattcgtcggtatgattttgattttgatttttgctgaagttttgggtctatacggtttgattgttgctttgttgttgaactccagggctactcaagatgttgtctgttaa

SEQ ID NO: 45878 - protein, 160 aa, Saccharomyces cerevisiae
MTELCPVYAPFFGAIGCASAIIFTSLGAAYGTAKSGVGICATCVLRPDLLFKNIVPVIMAGIIAIYGLVVSVLVCYSLGQKQALYTGFIQLGAGLSVGLSGLAAGFAIGIVGDAGVRGSSQQPRLFVGMILILIFAEVLGLYGLIVALLLNSRATQDVVC

SEQ ID NO: 45879 - DNA, 483 bp, Candida tropicalis
  CDS (1)..(483): transl_table=12
atgtctgatttatgtccagtttatgctccattctttggttctatcggttgtgctgccgccattgttttcacatgtttcggtgcctcttacggtactgctaaatcaggtgttggtatttgtgccacttctgtcaccagaccagatttattggttaagaatgttgttccagttgttatggccggtattattgccatttatggtttggttgtttccgttttggtttctgattctttgagtcaaaaacaagctttgtacactggtttcattcaattaggtgctggtttatctgttggtttgtctggtttggctgctggttttgccattggtattgttggtgatgccggtgttagaggtactgctcaacaaccaagattattcgtcggtatgattttgatcttgattttcgctgaagttttgggtttgtatggtttgattgttgccttattattgaactccagagcttcccaagatgtcacctgttaa

SEQ ID NO: 45880 - protein, 160 aa, Candida tropicalis
MSDLCPVYAPFFGSIGCAAAIVFTCFGASYGTAKSGVGICATSVTRPDLLVKNVVPVVMAGIIAIYGLVVSVLVSDSLSQKQALYTGFIQLGAGLSVGLSGLAAGFAIGIVGDAGVRGTAQQPRLFVGMILILIFAEVLGLYGLIVALLLNSRASQDVTC

SEQ ID NO: 45881 - DNA, 486 bp, Schizosaccharomyces pombe
  CDS (1)..(486)
atgtctacagatctttgccctgtttacgctcccttcttcggtgtcatgggatgtaccgccgctatcgtttttgctagctttggtgctgcctatggtacagccaaagctggtgtcggtattagtgcaatgggtgtgttgcgccctgatttgattgttaagaataccattcctgttgttatggctggtattattgctatttatggtcttgttgtttctgtcttgatttccggaaacttaaagcaaattctcagtctttacagtggatttatccaactcggtgctggtttgtcagtcggcttggctggtctggctgctggtttcgcaattggtattgttggtgatgctggtgtgcgtggtaccgctcaacaacctcgtctctttgtagccatgattttaattcttatttttgctgaagtcttgggactttatggccttattgttgctcttttacttaatactcgtgctaccgataacgttacttgctaa

SEQ ID NO: 45882 - protein, 161 aa, Schizosaccharomyces pombe
MSTDLCPVYAPFFGVMGCTAAIVFASFGAAYGTAKAGVGISAMGVLRPDLIVKNTIPVVMAGIIAIYGLVVSVLISGNLKQILSLYSGFIQLGAGLSVGLAGLAAGFAIGIVGDAGVRGTAQQPRLFVAMILILIFAEVLGLYGLIVALLLNTRATDNVTC

SEQ ID NO: 45883 - DNA, 600 bp, Schizosaccharomyces pombe
  CDS (1)..(600)
atgtctttgtttagcacatctttatggacaaccacagttatgtcaataattgttgggctgtatatgcttttccataacagtggagaatcttttgattttggaagctttcttttagacactagtccgtacacatggggccttcttggcattgctagctgtgttgcatttggtattataggtgctgcatggggtatttttatttgtggaacatccattttaggaggtgctgtaaaagctcctcgcatcaagaccaaaaatttgattagtattatcttttgtgaggtcgttgccatttattcacttattatagctattgtcttttccgctaaaattaacgacatcaatcctgcaggtttttatacaaaatcccattattatactggttttgccttgttttggggaggtattactgttggtctctgcaatctcatttgtggtgtctgcgtcggtatcacaggaagcagtgctgcccttgcggatgcccaagacgcttctcttttcgtaaaagttcttgttgtcgaaattttcggaagtgtcttgggattatttggattgatcgttggattgttaattggtggaaaagctagtgatttttcttaa

SEQ ID NO: 45884 - protein, 199 aa, Schizosaccharomyces pombe
MSLFSTSLWTTTVMSIIVGLYMLFHNSGESFDFGSFLLDTSPYTWGLLGIASCVAFGIIGAAWGIFICGTSILGGAVKAPRIKTKNLISIIFCEVVAIYSLIIAIVFSAKINDINPAGFYTKSHYYTGFALFWGGITVGLCNLICGVCVGITGSSAALADAQDASLFVKVLVVEIFGSVLGLFGLIVGLLIGGKASDFS

SEQ ID NO: 45885 - DNA, 642 bp, Saccharomyces cerevisiae
  CDS (1)..(642)
atgaacaaggaatctaaagatgatgatatgtccttggggaagttttccttctcccacttcctatattacttggtgctaatagtagtaatagtgtacggtttgtacaagcttttcactggacatggatccgacattaatttcgggaagttcttgttaaggacatccccttatatgtgggccaatcttggtattgccctttgtgtaggcttaagtgtcgtgggggcagcatggggtattttcattactggttcatccatgattggtgccggtgtgcgtgctccaaggattaccaccaagaatttaatttccattattttctgtgaagtggttgccatttacggtctgattattgccattgtcttttcttcgaaattgactgtggctactgctgagaacatgtactcgaaatcaaacctgtacactggttattctcttttctgggcaggtatcactgtcggtgcttccaatttgatttgtggtatcgctgtcggtatcaccggtgcgactgctgccatttccgatgctgctgattccgcattgtttgttaaaattttggtcattgaaattttcgggtccattttaggtttattaggtttgattgttggtttattgatggccggtaaagcttctgaatttcagtaa

SEQ ID NO: 45886 - protein, 213 aa, Saccharomyces cerevisiae
MNKESKDDDMSLGKFSFSHFLYYLVLIVVIVYGLYKLFTGHGSDINFGKFLLRTSPYMWANLGIALCVGLSVVGAAWGIFITGSSMIGAGVRAPRITTKNLISIIFCEVVAIYGLIIAIVFSSKLTVATAENMYSKSNLYTGYSLFWAGITVGASNLICGIAVGITGATAAISDAADSALFVKILVIEIFGSILGLLGLIVGLLMAGKASEFQ

SEQ ID NO: 45887 - DNA, 531 bp, Oryza sativa
  CDS (1)..(531)
atgtcgtctgattcgtcgtcgtgggcgcgcgcgctcgtgcagatctcgccctacaccttctccgccatcggcatagccgtctccatcggcgtctccgtcctcggcgccgcctgggggatcttcatcacggggagcagcctcatcggggccgccatcaaggcccccaggatcacctccaagaacctcatcagtgtcatcttctgtgaggctgttgcaatttatggtgttatcgtggcaatcatcctccaaactaagcttgaaagtgtaccaactgctctagtgcatcatccagagtctctccgggctggctatgcaatctttgcgtctggtcttattgttggctttgctaatcttgtttgcggggtttgtgtgggaataattggaagcagctgtgcattgtctgatgctcagaattcatcactctttgtaaagatcttggtgattgagatcttcggcagcgccttgggtctgtttggagtgattgtgggcataatcatgtcatctcaagcaacatggcctgcaaaagcctag

SEQ ID NO: 45888 - protein, 176 aa, Oryza sativa
MSSDSSSWARALVQISPYTFSAIGIAVSIGVSVLGAAWGIFITGSSLIGAAIKAPRITSKNLISVIFCEAVAIYGVIVAIILQTKLESVPTALVHHPESLRAGYAIFASGLIVGFANLVCGVCVGIIGSSCALSDAQNSSLFVKILVIEIFGSALGLFGVIVGIIMSSQATWPAKA

SEQ ID NO: 45889 - DNA, 534 bp, Brassica napus
  CDS (1)..(534)
atgtctggaatggttgatgcgagctcgtggggcgcggcgttggtaaggatctcgccgtacactttctccgcaatcggaatcgccatctcgatcggcgtctccgtcctcggtgccgcctgggggatttacataacgggaagtagtttgatcggtgcggccattgaagcgcctcgtatcacttccaagaatctcatcagtgttatcttttgcgaagctgttgctatatatggcgttattgttgctatcatcctgcaaacgaagttggagagtgtaccgacttcaaagatgtatgacgcggagtctctcagagctggatatgcaatcttcgcatctggaatcatagttggattcgccaaccttgtatgcgggttatgtgtaggaatcattggaagcagttgcgcattatctgatgctcaaaactcaacactctttgtgaagattcttgtgattgagatcttcggaagcgctctggggttgtttggagttatcgtggggatcattatgtccgcacaagcaacatggccgaccaaatag

SEQ ID NO: 45890 - protein, 177 aa, Brassica napus
MSGMVDASSWGAALVRISPYTFSAIGIAISIGVSVLGAAWGIYITGSSLIGAAIEAPRITSKNLISVIFCEAVAIYGVIVAIILQTKLESVPTSKMYDAESLRAGYAIFASGIIVGFANLVCGLCVGIIGSSCALSDAQNSTLFVKILVIEIFGSALGLFGVIVGIIMSAQATWPTK

SEQ ID NO: 45891 - DNA, 534 bp, Brassica napus
  CDS (1)..(534)
atgtctggaatggtagatgcgagctcgtggggcgcagcgttggtaaggatctcgccgtacacattctcggcaatcggaatcgccatctcgatcggcgtctctgtcctcggcgccgcctgggggatttacatcaccgggagtagtttgatcggtgcggccattgaagctcctcgtatcacttccaagaatctcatcagtgtaatcttttgcgaagctgtagctatatatggcgtcattgttgcaatcattctgcaaacgaagttggagagtgtcccgtcttcaaagatgtatgacgctgagtctcttagagctggatatgcaatcttcgcgtctggaatcatagttggattcgccaaccttgtatgcgggttatgtgtagggatcattggaagcagttgcgcattgtcagatgctcagaactccacactctttgtgaagattcttgtgattgagatcttcggaagcgctcttggtttgtttggagttattgtggggatcattatgtccgcacaagcaacatggccgaccaaatag

SEQ ID NO: 45892 - protein, 177 aa, Brassica napus
MSGMVDASSWGAALVRISPYTFSAIGIAISIGVSVLGAAWGIYITGSSLIGAAIEAPRITSKNLISVIFCEAVAIYGVIVAIILQTKLESVPSSKMYDAESLRAGYAIFASGIIVGFANLVCGLCVGIIGSSCALSDAQNSTLFVKILVIEIFGSALGLFGVIVGIIMSAQATWPTK

SEQ ID NO: 45893 - DNA, 20 bp, Artificial sequence
  primer
atggtggcacattcgagttc

SEQ ID NO: 45894 - DNA, 20 bp, Artificial sequence
  primer
ctaaactttcgttggccatg

SEQ ID NO: 45895 - protein, 152 aa, Artificial sequence
  consensus sequence
  Variant (2)..(11): Xaa in position 2 to 11 is any amino acid
  Variant (15)..(15): Xaa in position 15 is any amino acid
  Variant (17)..(20): Xaa in position 17 to 20 is any amino acid
  Variant (22)..(31): Xaa in position 22 to 31 is any amino acid
  Variant (33)..(36): Xaa in position 33 to 36 is any amino acid
  Variant (39)..(39): Xaa in position 39 is any amino acid
  Variant (41)..(41): Xaa in position 41 is any amino acid
  Variant (42)..(42): Xaa in position 42 is any or no amino acid
  Variant (44)..(48): Xaa in position 44 to 48 is any amino acid
  Variant (53)..(55): Xaa in position 53 to 55 is any amino acid
  Variant (57)..(71): Xaa in position 57 to 71 is any amino acid
  Variant (72)..(84): Xaa in position 72 to 84 is any or no amino acid
  Variant (86)..(91): Xaa in position 86 to 91 is any amino acid
  Variant (93)..(94): Xaa in position 93 to 94 is any amino acid
  Variant (97)..(99): Xaa in position 97 to 99 is any amino acid
  Variant (101)..(102): Xaa in position 101 to 102 is any amino acid
  Variant (104)..(106): Xaa in position 104 to 106 is any amino acid
  Variant (109)..(109): Xaa in position 109 is any amino acid
  Variant (111)..(117): Xaa in position 111 to 117 is any amino acid
  Variant (119)..(122): Xaa in position 119 to 122 is any amino acid
  Variant (126)..(131): Xaa in position 126 to 131 is any amino acid
  Variant (134)..(137): Xaa in position 134 to 137 is any amino acid
  Variant (140)..(140): Xaa in position 140 is any amino acid
  Variant (142)..(142): Xaa in position 142 is any amino acid
  Variant (145)..(151): Xaa in position 145 to 151 is any amino acid
GXXXXXXXXXXGAAXGXXXXGXXXXXXXXXXPXXXXKNXIXXIXXXXXAIYGXXXAXXXXXXXXXXXXXXXXXXXXXXXXXXXXGXXXXXXGXXVGXXXLXXGXXXGIXGXXXXXXXAXXXXLFVXXXXXXIFXXXXGLXGXIVXXXXXXXA

SEQ ID NO: 45896 - protein, 46 aa, Artificial sequence
  protein pattern
  Variant (3)..(3): Xaa in position 3 is any amino acid
  Variant (5)..(5): Xaa in position 5 is any amino acid
  Variant (6)..(7): Xaa in position 6 to 7 is any or no amino acid
  Variant (9)..(11): Xaa in position 9 to 11 is any amino acid
  Variant (12)..(13): Xaa in position 12 to 13 is any or no amino acid
  Variant (15)..(15): Xaa in position 15 is Ala or Gln
  Variant (16)..(16): Xaa in position 16 is Asp, Asn or Gln
  Variant (17)..(17): Xaa in position 17 is Ala, Pro or Ser
  Variant (18)..(18): Xaa in position 18 is any amino acid
  Variant (22)..(22): Xaa in position 22 is any amino acid
  Variant (23)..(23): Xaa in position 23 is Ile, Met or Val
  Variant (24)..(24): Xaa in position 24 is Ile or Leu
  Variant (25)..(25): Xaa in position 25 is Ile, Leu or Val
  Variant (26)..(26): Xaa in position 26 is Ile or Val
  Variant (27)..(27): Xaa in position 27 is any amino acid
  Variant (30)..(30): Xaa in position 30 is Ala, Gly or Ser
  Variant (31)..(31): Xaa in position 31 is Glu or Ser
  Variant (32)..(32): Xaa in position 32 is Ala, Ile or Val
  Variant (33)..(33): Xaa in position 33 is Ile or Leu
  Variant (36)..(36): Xaa in position 36 is any amino acid
  Variant (38)..(38): Xaa in position 38 is Leu or Val
  Variant (40)..(40): Xaa in position 40 is Ile or Val
  Variant (41)..(41): Xaa in position 41 is Ala or Gly
  Variant (42)..(42): Xaa in position 42 is Ile or Leu
  Variant (43)..(45): Xaa in position 43 to 45 is any amino acid
  Variant (46)..(46): Xaa in position 46 is Ala, Gly, Ser or Thr
GIXGXXXAXXXXXAXXXXLFVXXXXXXIFXXXXGLXGXIXXXXXXX

SEQ ID NO: 45897 - DNA, 411 bp, Glycine max
  CDS (1)..(411)
atggcgggaaaaggagggaaggggcttcttgcagcgaaaaccaccgcggcgaataaggacaaagacaaggacaagaagagacctatttctcgctcttcccgtgctggaatccagtttcctgtgggacgtatccataggcagctgaaacaaagggtccaagccaatggacgtgttggggcaacagctgcagtgtacttagcctcaattctagagtatctgactgctgaagttcttgaacttgctgggaatgcaagcaaggatctgaaggtgaagaggatcacaccaaggcatttgcagctggctatcaggggagatgaggagctggacactcttatcaaagggaccattgctggtggtggtgtcattcctcacattcacaagtccttgatcaacaaaaccgccaaggattga

SEQ ID NO: 45898 - protein, 136 aa, Glycine max
MAGKGGKGLLAAKTTAANKDKDKDKKRPISRSSRAGIQFPVGRIHRQLKQRVQANGRVGATAAVYLASILEYLTAEVLELAGNASKDLKVKRITPRHLQLAIRGDEELDTLIKGTIAGGGVIPHIHKSLINKTAKD

SEQ ID NO: 45899 - DNA, 645 bp, Zea mays subsp. mays
  CDS (115)..(531)
gacgggagaaaatctccaaacgcagcagagcccctcgcgccgccgacctcttcagcctcgcagcacaccgccgccagcccgagtgaccgctgcagcctagggtttccgtcggcgatggcgggtaagggagggaagggtctgctggcggccaagacgacggcggccaagagcaccgacaaggacaaggacaggaagaaggcccccgtgtcgcgctcctcccgcgccggcctccagttcccggtgggtcgcatccaccgccagctcaagtcgcgtgcctctgcgcacggccgcgtcggcgccaccgccgccgtctattccgccgccatcctcgagtacctcaccgccgaggtcctcgagctggccggcaacgccagcaaggacctcaaggtcaagcgcatcaccccgcgccacctgcagctcgccatccgcggggacgaggagctcgacaccctcatcaagggcaccatcgccgggggcggcgtcatcccgcacatccacaagtcgctcatcaacaagaccgccaaggagtgaatcaaggccgtgctgctgcttctgcctgactacagtcccatctcgttctgtacttgtgcaatctgagtttaagtgcatgttggcacagttctagtaaactcatcctgttcacct

SEQ ID NO: 45900 - protein, 138 aa, Zea mays subsp. mays
MAGKGGKGLLAAKTTAAKSTDKDKDRKKAPVSRSSRAGLQFPVGRIHRQLKSRASAHGRVGATAAVYSAAILEYLTAEVLELAGNASKDLKVKRITPRHLQLAIRGDEELDTLIKGTIAGGGVIPHIHKSLINKTAKE

SEQ ID NO: 45901 - DNA, 823 bp, Sorghum bicolor
  CDS (113)..(529)
  misc_feature (711)..(711): n is a, g, c or t
  misc_feature (712)..(712): n is a, g, c or t
  misc_feature (713)..(713): n is a, g, c or t
  misc_feature (714)..(714): n is a, g, c or t
  misc_feature (715)..(715): n is a, g, c or t
  misc_feature (716)..(716): n is a, g, c or t
  misc_feature (717)..(717): n is a, g, c or t
  misc_feature (718)..(718): n is a, g, c or t
  misc_feature (719)..(719): n is a, g, c or t
  misc_feature (720)..(720): n is a, g, c or t
  misc_feature (721)..(721): n is a, g, c or t
  misc_feature (722)..(722): n is a, g, c or t
  misc_feature (723)..(723): n is a, g, c or t
  misc_feature (724)..(724): n is a, g, c or t
  misc_feature (725)..(725): n is a, g, c or t
  misc_feature (726)..(726): n is a, g, c or t
  misc_feature (727)..(727): n is a, g, c or t
  misc_feature (728)..(728): n is a, g, c or t
  misc_feature (729)..(729): n is a, g, c or t
  misc_feature (730)..(730): n is a, g, c or t
  misc_feature (731)..(731): n is a, g, c or t
  misc_feature (732)..(732): n is a, g, c or t
  misc_feature (733)..(733): n is a, g, c or t
  misc_feature (734)..(734): n is a, g, c or t
  misc_feature (735)..(735): n is a, g, c or t
  misc_feature (736)..(736): n is a, g, c or t
  misc_feature (737)..(737): n is a, g, c or t
  misc_feature (738)..(738): n is a, g, c or t
  misc_feature (739)..(739): n is a, g, c or t
  misc_feature (740)..(740): n is a, g, c or t
  misc_feature (741)..(741): n is a, g, c or t
  misc_feature (742)..(742): n is a, g, c or t
  misc_feature (743)..(743): n is a, g, c or t
  misc_feature (744)..(744): n is a, g, c or t
  misc_feature (745)..(745): n is a, g, c or t
  misc_feature (746)..(746): n is a, g, c or t
  misc_feature (747)..(747): n is a, g, c or t
  misc_feature (748)..(748): n is a, g, c or t
  misc_feature (749)..(749): n is a, g, c or t
  misc_feature (750)..(750): n is a, g, c or t
  misc_feature (751)..(751): n is a, g, c or t
  misc_feature (752)..(752): n is a, g, c or t
  misc_feature (753)..(753): n is a, g, c or t
  misc_feature (754)..(754): n is a, g, c or t
  misc_feature (755)..(755): n is a, g, c or t
  misc_feature (756)..(756): n is a, g, c or t
  misc_feature (757)..(757): n is a, g, c or t
  misc_feature (758)..(758): n is a, g, c or t
  misc_feature (759)..(759): n is a, g, c or t
  misc_feature (760)..(760): n is a, g, c or t
  misc_feature (761)..(761): n is a, g, c or t
  misc_feature (762)..(762): n is a, g, c or t
  misc_feature (763)..(763): n is a, g, c or t
  misc_feature (764)..(764): n is a, g, c or t
  misc_feature (765)..(765): n is a, g, c or t
  misc_feature (766)..(766): n is a, g, c or t
  misc_feature (767)..(767): n is a, g, c or t
  misc_feature (768)..(768): n is a, g, c or t
  misc_feature (769)..(769): n is a, g, c or t
  misc_feature (770)..(770): n is a, g, c or t
  misc_feature (771)..(771): n is a, g, c or t
  misc_feature (772)..(772): n is a, g, c or t
  misc_feature (773)..(773): n is a, g, c or t
  misc_feature (774)..(774): n is a, g, c or t
  misc_feature (775)..(775): n is a, g, c or t
  misc_feature (776)..(776): n is a, g, c or t
  misc_feature (777)..(777): n is a, g, c or t
  misc_feature (778)..(778): n is a, g, c or t
  misc_feature (779)..(779): n is a, g, c or t
  misc_feature (780)..(780): n is a, g, c or t
  misc_feature (781)..(781): n is a, g, c or t
  misc_feature (782)..(782): n is a, g, c or t
  misc_feature (783)..(783): n is a, g, c or t
  misc_feature (784)..(784): n is a, g, c or t
  misc_feature (785)..(785): n is a, g, c or t
  misc_feature (786)..(786): n is a, g, c or t
  misc_feature (787)..(787): n is a, g, c or t
  misc_feature (788)..(788): n is a, g, c or t
  misc_feature (789)..(789): n is a, g, c or t
  misc_feature (790)..(790): n is a, g, c or t
  misc_feature (791)..(791): n is a, g, c or t
  misc_feature (792)..(792): n is a, g, c or t
  misc_feature (793)..(793): n is a, g, c or t
  misc_feature (794)..(794): n is a, g, c or t
  misc_feature (795)..(795): n is a, g, c or t
  misc_feature (796)..(796): n is a, g, c or t
  misc_feature (797)..(797): n is a, g, c or t
  misc_feature (798)..(798): n is a, g, c or t
  misc_feature (799)..(799): n is a, g, c or t
  misc_feature (800)..(800): n is a, g, c or t
  misc_feature (801)..(801): n is a, g, c or t
  misc_feature (802)..(802): n is a, g, c or t
  misc_feature (803)..(803): n is a, g, c or t
  misc_feature (804)..(804): n is a, g, c or t
  misc_feature (805)..(805): n is a, g, c or t
  misc_feature (806)..(806): n is a, g, c or t
  misc_feature (807)..(807): n is a, g, c or t
  misc_feature (808)..(808): n is a, g, c or t
  misc_feature (809)..(809): n is a, g, c or t
  misc_feature (810)..(810): n is a, g, c or t
  misc_feature (811)..(811): n is a, g, c or t
  misc_feature (812)..(812): n is a, g, c or t
  misc_feature (813)..(813): n is a, g, c or t
  misc_feature (814)..(814): n is a, g, c or t
  misc_feature (815)..(815): n is a, g, c or t
  misc_feature (816)..(816): n is a, g, c or t
  misc_feature (817)..(817): n is a, g, c or t
  misc_feature (818)..(818): n is a, g, c or t
  misc_feature (819)..(819): n is a, g, c or t
  misc_feature (820)..(820): n is a, g, c or t
  misc_feature (821)..(821): n is a, g, c or t
  misc_feature (822)..(822): n is a, g, c or t
  misc_feature (823)..(823): n is a, g, c or t
gccggccgggctgggctccaaacgcagcaaagccccccgcgtctccggccctcctccacctcgccgcgcgcagcaacgagcctccagctccaccctagggtttccggcggcgatggcgggcaagggagggaagggtctgctggccgccaagacgacggcggccaagagcgccgacaaggacaaggacaggaagaaggcccccgtgtcccgttcctcccgcgccggcctccagttcccggtgggccgcatccaccgccagctcaagtcgcgtgcctccgcgcacggccgcgtcggcgccaccgccgccgtctactccgccgccatcctcgagtacctcaccgccgaggtcctcgagctggccggcaacgccagcaaggacctcaaggtgaagcgtatcgccccgcgccacctgcagctcgccatccgcggggacgaggagctcgacaccctcatcaagggcaccatcgctggcggtggcgtcatcccgcacatccacaagtcgctcatcaacaagaccgccaaggagtgaaggagggcaccccccgtgctgctgcttctgcctgactacagtccatctagctgtgtacttgtgctattgttaatttaagtgtctggtgtcacagtcggtgtaagctcatcgcgtttacctgtacttctatggtgttaaattaagttttcttctgctgaaaaaaaaaaaaaaaaaggccctannnnnnnnnnnnnnnnnnnnnnnnnnnnnnnnnnnnnnnnnnnnnnnnnnnnnnnnnnnnnnnnnnnnnnnnnnnnnnnnnnnnnnnnnnnnnnnnnnnnnnnnnnnnnnnnn

SEQ ID NO: 45902 - protein, 138 aa, Sorghum bicolor
MAGKGGKGLLAAKTTAAKSADKDKDRKKAPVSRSSRAGLQFPVGRIHRQLKSRASAHGRVGATAAVYSAAILEYLTAEVLELAGNASKDLKVKRIAPRHLQLAIRGDEELDTLIKGTIAGGGVIPHIHKSLINKTAKE

SEQ ID NO: 45903 - DNA, 725 bp, Zea mays subsp. mays
  CDS (130)..(540)
aaaaactcgcatcccattcacttctaccagatttcgtttattactctcgtcacactctctctccgtctcccatctcccatctcatcgtctctcagatctagaagcgagcagcatcaattgcgagcgaacatggcaggcaaaggaggtaaaggtctcatcgctacaaaaaccatggctggtaacaaggacaaagacaaggacaagaagaaacccatcactcgctctgctcgtgctggtattcagtttccggtgggtcgtatccataggcaactcaagacgagagtttcagcacacggaagggttggtgccactgctgctgtctacacggcttcgatcctcgagtacttaactgcggaggttcttgagttagctggaaacgcgagcaaagatctgaaagtgaagaggataactcctaggcatttgcagctggccatcagaggagatgaggagcttgacacgctcatcaaagggactattgctggaggaggtgtgattcctcacatccacaagtctctaatcaacaaggccatcaaggagtgatttgttttcttaggcagtgtggttatgtggtctgctaattagtagcttatggtgttaatgtttgtgtttgtttagtcttggactgcttttctttctcgtagtttctctgtcagtgtgttgaactcttctggacatcctcagatgtacattagttaatctgaacgcttaggcttctcgtttgagtt

SEQ ID NO: 45904 - protein, 136 aa, Zea mays subsp. mays
MAGKGGKGLIATKTMAGNKDKDKDKKKPITRSARAGIQFPVGRIHRQLKTRVSAHGRVGATAAVYTASILEYLTAEVLELAGNASKDLKVKRITPRHLQLAIRGDEELDTLIKGTIAGGGVIPHIHKSLINKAIKE

SEQ ID NO: 45905 - DNA, 683 bp, Zea mays subsp. mays
  CDS (69)..(479)
agattccgtttcatcgcctctcgtctcaggatctagaagtaagggaacaccaaatcgtgagcgagaacatggcaggcaagggagggaaagggctcgttgctgcaaagacgatggctgctaacaaggacaaagacaagggcaagatgaaacccatctctcgatctgctcgtgctggtattcagtttccagtgggccgtatccataggcaactcaagaccagggtttcagcacacggaagagttggtgccactgctgctgtgtacactgcttcgattctagagtacctgactgcagaagttcttgagttggctggaaacgcaagcaaggatctgaaagtgaagaggataactccaaggcatttgcagttggcaatcagaggagatgaggagcttgacacgctcatcaaaggaaccattgccggaggtggtgtgatccctcacatccacaagtctctcatcaacaaaaccaccaatgagtgatttgtttcctaagcactaaggttgtttgatcggctagttagtagcttatcatgtcagtgtttgttaagtcttggactgcttttcttttccttttttagtgtcgcctttaattggacatcttcaggtgtacatgagttaatttgaactcttatgcttctcctttgcatactcttgttgttttctgtcaagtaaaccaatttaatt

SEQ ID NO: 45906 - protein, 136 aa, Zea mays subsp. mays
MAGKGGKGLVAAKTMAANKDKDKGKMKPISRSARAGIQFPVGRIHRQLKTRVSAHGRVGATAAVYTASILEYLTAEVLELAGNASKDLKVKRITPRHLQLAIRGDEELDTLIKGTIAGGGVIPHIHKSLINKTTNE

SEQ ID NO: 45907 - DNA, 375 bp, Drosophila melanogaster
  CDS (1)..(375)
atgtctggacgtggaaaaggtggcaaagtgaagggaaaggcaaagtcccgctcagaccgtgccggtcttcaattccctgtgggccgtattcaccgtttgctccggaagggaaactacgcagagcgtgttggtgcaggcgctccagtttacctagctgccgtaatggaatatctggccgctgaggttctcgagttggctggcaatgctgctcgtgacaacaagaagactagaattattccgcgtcatctgcaactggccatccgcaacgacgaggagttaaacaagctgctctccggcgtcacaattgcacaaggtggcgtgttgcctaatatacaggctgttctgttgcccaagaagaccgagaagaaggcctaa

SEQ ID NO: 45908 - protein, 124 aa, Drosophila melanogaster
MSGRGKGGKVKGKAKSRSDRAGLQFPVGRIHRLLRKGNYAERVGAGAPVYLAAVMEYLAAEVLELAGNAARDNKKTRIIPRHLQLAIRNDEELNKLLSGVTIAQGGVLPNIQAVLLPKKTEKKA

SEQ ID NO: 45909 - DNA, 375 bp, Bombyx mori
  CDS (1)..(375)
atgtccggtcgcggaaaaggcggaaaagttaagggcaaggtcaagtcccgttcgaaccgtgccggtcttcagtttccggtcggtcgtatacacagattgttgcgcaacggaaattacgctgaacgcgttggtgccggtgcaccggtttacctggccgccgtcatggaatacttggccgctgaagttttggaattggccggtaacgcagcaagagacaacaagaagactagaattattcctagacatcttcaactcgccataaggaacgacgaggaactgaacaaactcccttccggtgtgacaatcgctcaaggcggagttttaccaaacattcaagcggtactactcccgaagaagaccgagaagaaagcttaa

SEQ ID NO: 45910 - protein, 124 aa, Bombyx mori
MSGRGKGGKVKGKVKSRSNRAGLQFPVGRIHRLLRNGNYAERVGAGAPVYLAAVMEYLAAEVLELAGNAARDNKKTRIIPRHLQLAIRNDEELNKLPSGVTIAQGGVLPNIQAVLLPKKTEKKA

SEQ ID NO: 45911 - DNA, 390 bp, Bombyx mori
  CDS (1)..(390)
atgggcggtggtaaagcgggtaaagattctggtaaagccaaggcgaaagctgtctcaagatcagctagagcaggacttcagtttcccgttggaagaattcataggcatcttaagaataggacaacaagccacgggcgcgtaggagctacggcagcagtttattctgccgctattttggaatatcttacagcagaggttttggagttggcgggaaatgcgtctaaagatttaaaagtgaagcgtattactcctcggcacttacaacttgctattagaggagatgaagaattggacagcctcataaaagcaactatcgctggcggaggcgtcatcccacacatacacaaatctctcattggaaagaaaggcggtcctggtgcacccgtttaa

SEQ ID NO: 45912 - protein, 129 aa, Bombyx mori
MGGGKAGKDSGKAKAKAVSRSARAGLQFPVGRIHRHLKNRTTSHGRVGATAAVYSAAILEYLTAEVLELAGNASKDLKVKRITPRHLQLAIRGDEELDSLIKATIAGGGVIPHIHKSLIGKKGGPGAPV

SEQ ID NO: 45913 - DNA, 375 bp, Apis mellifera
  CDS (1)..(375)
atgtctggtcgtggaaaagggggaaaagcaaaagcaaaagcaaagtctcgttcgaatagagctggattacaatttccagttggacgtattcatcgacttttaagaaaaggaaattacgcagaacgagttggcgctggtgctcctgtttatttggctgccgttatggaatatttagccgctgaagttctggaattggcgggaaatgctgcacgagataacaagaaaacgagaattatcccaagacatttacaacttgcaatccgcaatgatgaagaattgaacaagcttttgtctggtgttactattgctcaaggaggagttcttcctaatattcaagctgtacttttaccaaaaaaaacagagaaaaaggcttaa

SEQ ID NO: 45914 - protein, 124 aa, Apis mellifera
MSGRGKGGKAKAKAKSRSNRAGLQFPVGRIHRLLRKGNYAERVGAGAPVYLAAVMEYLAAEVLELAGNAARDNKKTRIIPRHLQLAIRNDEELNKLLSGVTIAQGGVLPNIQAVLLPKKTEKKA

SEQ ID NO: 45915 - DNA, 375 bp, Apis mellifera
  CDS (1)..(375)
atgtctggacgaggtaaaggtggtaaagctaagggaaaggcgaagtctcgttccaacagagctggtttgcaattccctgttggtcgtattcatagacttcttcgcaaaggaaattacgcagaacgtgtcggtgcaggagcaccagtgtatttagcagccgttatggaatatttggctgctgaagtgttggaattggcgggaaatgctgctcgtgataataaaaaaaccagaattataccacgtcatcttcaacttgctatccgtaatgatgaagaattaaataaattactttctggagtaactattgctcaaggtggtgttttaccaaatattcaagcagttttattgccaaagaaaactgaaaaaaaagcttaa

SEQ ID NO: 45916 - protein, 124 aa, Apis mellifera
MSGRGKGGKAKGKAKSRSNRAGLQFPVGRIHRLLRKGNYAERVGAGAPVYLAAVMEYLAAEVLELAGNAARDNKKTRIIPRHLQLAIRNDEELNKLLSGVTIAQGGVLPNIQAVLLPKKTEKKA

SEQ ID NO: 45917 - DNA, 375 bp, Apis mellifera
  CDS (1)..(375)
atgtctggacgtggaaaaggtggaaaaattaaaggaaaggcaaaatctcgatcaaatagagcgggcttgcaatttcctgttggccgaatacatagattacttcgtaaaggcaactacgcagaacgtgttggtgctggtgcacctgtttacttggcagctgttatggaatatttggctgctgaagttttagaattggctggaaatgcagccagagataataaaaagactaggattattccacggcatttacaacttgctatcaggaatgacgaggagctgaacaaacttttatctggagttacaattgcacaaggtggtgttctgcctaatattcaagcagttttattgcctaaaaaaactgagaaaaaagcataa

SEQ ID NO: 45918 - protein, 124 aa, Apis mellifera
MSGRGKGGKIKGKAKSRSNRAGLQFPVGRIHRLLRKGNYAERVGAGAPVYLAAVMEYLAAEVLELAGNAARDNKKTRIIPRHLQLAIRNDEELNKLLSGVTIAQGGVLPNIQAVLLPKKTEKKA

SEQ ID NO: 45919 - DNA, 375 bp, Apis mellifera
  CDS (1)..(375)
atgtctggacgtggaaaaggcggtaaagttaaaggaaaagttaaatctcgttctaacagagcaggattacaatttcctgttggtcgtattcaccgtcttttgcgaaaaggaaattatgctgaacgggttggtgccggtgctccggtttatttggcagctgtaatggagtacttagctgctgaagttttggaattggctggtaatgctgctcgcgacaataagaaaacaagaattataccacgtcatttacaattagctattcgtaatgatgaagaattgaacaaattactttctggagtaacaatagcacaaggtggtgtactcccaaatatacaagctgtacttttaccaaagaagacagaaaagaaagcttaa

SEQ ID NO: 45920 - protein, 124 aa, Apis mellifera
MSGRGKGGKVKGKVKSRSNRAGLQFPVGRIHRLLRKGNYAERVGAGAPVYLAAVMEYLAAEVLELAGNAARDNKKTRIIPRHLQLAIRNDEELNKLLSGVTIAQGGVLPNIQAVLLPKKTEKKA

SEQ ID NO: 45921 - DNA, 375 bp, Strongylocentrotus purpuratus
  CDS (1)..(375)
atgtctggcagaggaaagagtggaaaggcccgcaccaaggcaaagacgcgctcattccgtgcagggctccagtttccagtaggacgtgttcatcggtttctccgaaagggcaactatgcaaagagggtcggcggtggagctcctgtctacatggctgccgtcctagagtacctcactgccgaaatcttggaactcgcaggcaacgctgcccgcgacagcaagaaatctaggatcatcccacgtcaccttcaactcgctgtgcgtaatgatgaagaactcaacaagcttttgggtggggtgacgatcgctcaaggtggtgttctgcccaacatccaagtcgtgctgctccccaagaaaaccgctaaatcaagctag

SEQ ID NO: 45922 - protein, 124 aa, Strongylocentrotus purpuratus
MSGRGKSGKARTKAKTRSFRAGLQFPVGRVHRFLRKGNYAKRVGGGAPVYMAAVLEYLTAEILELAGNAARDSKKSRIIPRHLQLAVRNDEELNKLLGGVTIAQGGVLPNIQVVLLPKKTAKSS

SEQ ID NO: 45923 - DNA, 387 bp, Strongylocentrotus purpuratus
  CDS (1)..(387)
atggctggaggaaaagctggtaaagactctggaaaggcaaaggcgaaggccgtctctcgatcagccagggcaggtctgcagttcccagtcggtcgtattcacagacatttgaagaacagaacgacgagccatggccgtgtcggtgccacagccgctgtatactctgccgctattttggaatacctcacagctgaagttcttgagttggcaggcaatgctagtaaagatctgaaggtaaagcgtatcacaccccgtcacttgcagctggccatcaggggagacgaagaattggactcgcttatcaaggcaaccatcgctggtggtggtgtcatccctcacatccacaagagtttgatcggaaagaagggatcacagaaggcaacataa

SEQ ID NO: 45924 - protein, 128 aa, Strongylocentrotus purpuratus
MAGGKAGKDSGKAKAKAVSRSARAGLQFPVGRIHRHLKNRTTSHGRVGATAAVYSAAILEYLTAEVLELAGNASKDLKVKRITPRHLQLAIRGDEELDSLIKATIAGGGVIPHIHKSLIGKKGSQKAT

SEQ ID NO: 45925 - DNA, 375 bp, Strongylocentrotus purpuratus
  CDS (1)..(375)
atgtctggcagaggaaagagtggaaatgcccgcaccaaggcaaagacgcgctcatcccgtgcatggctccagttaccagtgggacgtgttcatcggtttctccgaaagggcaactatgcaaagagggtcggcggtggagctcctgtctacatggctgccgtcctagagtacctcactgccgaaatcttggaactcgcaggcaacactgcccacgacaacaagaaatctaggatcatcccacgccaccttcaactcgctgtgcgtaatgatgaagaactcaacaagcttttgggtggggtgacgatcgctcaaggtggtgttctgcccaacatccaatccgtgctgcttcccaagaaaatcgctaaatcaagctag

SEQ ID NO: 45926 - protein, 124 aa, Strongylocentrotus purpuratus
MSGRGKSGNARTKAKTRSSRAWLQLPVGRVHRFLRKGNYAKRVGGGAPVYMAAVLEYLTAEILELAGNTAHDNKKSRIIPRHLQLAVRNDEELNKLLGGVTIAQGGVLPNIQSVLLPKKIAKSS

SEQ ID NO: 45927 - DNA, 378 bp, Strongylocentrotus purpuratus
  CDS (1)..(378)
atgactggacgtggtaaaggaggcaaggcaaagagcaaggccaagagccgctcatcccgtgcaggacttcagttccctgttggccgtgtgcaccgtttcctgaggaagggcaactatgcgggccgcgtcggagctggtgccccagtgtacctctctgccgtactcgagtacctgaccgctgagatcctcgagctcgctggcaacgccgcccgcgacaacaagaagagcaggattatcccccgtcaccttcaactcgccgtccgcaacgacgaggagctcaacaagcttcttggtggagttaccatcgcccaaggtggtgtcctccccaacatccaggctgtactcctccccaagaagaccagcaagattgccctgtaa

SEQ ID NO: 45928 - protein, 125 aa, Strongylocentrotus purpuratus
MTGRGKGGKAKSKAKSRSSRAGLQFPVGRVHRFLRKGNYAGRVGAGAPVYLSAVLEYLTAEILELAGNAARDNKKSRIIPRHLQLAVRNDEELNKLLGGVTIAQGGVLPNIQAVLLPKKTSKIAL

SEQ ID NO: 45929 - DNA, 411 bp, Strongylocentrotus purpuratus
  CDS (1)..(411)
atgtctggacgcggaggaaaaggcggaaaagcacgaagcaaggccaaaagccgatcagcccgagcaggacttcagttcccagttggtcgtgttcatcgtttccttcgcaagggaaactacgcagctcgtgttggagctggagccccagtctacctggctgccgtgctcgagtacttggcagctgagatcctcgagctggctggcaacgccgcacgcgacaacaagaagtcccgcatcatcccccgtcacttgcagcttgctgtccgtaatgacgaggagttgaacaagcttctcagcggagtgaccatcgcacagggaggtgtactgcccaacatccaggccgtccttctccccaagaagtctgctgctgccaagaagagtggaaagagcagccagagccaggaatattaa

SEQ ID NO: 45930 - protein, 136 aa, Strongylocentrotus purpuratus
MSGRGGKGGKARSKAKSRSARAGLQFPVGRVHRFLRKGNYAARVGAGAPVYLAAVLEYLAAEILELAGNAARDNKKSRIIPRHLQLAVRNDEELNKLLSGVTIAQGGVLPNIQAVLLPKKSAAAKKSGKSSQSQEY

SEQ ID NO: 45931 - DNA, 411 bp, Nasonia vitripennis
  CDS (1)..(411)
atgtccggacgtggaaaaggaggtaaagccaaggccaagtccaagacccgttcgaaccgtgctggtctgcagttccccgtcggccgtatccaccgtctcctgcgtaaaggcaattacgccgagcgagtcggtgccggggctccggtctacctcgccgctgtcatggagtacctggccgctgaggttctcgagttggctggcaatgccgctcgcgacaacaagaaaaccaggatcatccctcgccatctccaactggccatacgcaacgacgaggagctgaacaagctactctccggggtcaccatcgctcagggcggcgttttgcccaacatccaggctgtcctcctgccaaagaagaccgagacttccaaatctgcgtctcaggcaaccaagagttctcaagaatattag

SEQ ID NO: 45932 - protein, 136 aa, Nasonia vitripennis
MSGRGKGGKAKAKSKTRSNRAGLQFPVGRIHRLLRKGNYAERVGAGAPVYLAAVMEYLAAEVLELAGNAARDNKKTRIIPRHLQLAIRNDEELNKLLSGVTIAQGGVLPNIQAVLLPKKTETSKSASQATKSSQEY

SEQ ID NO: 45933 - DNA, 399 bp, Nasonia vitripennis
  CDS (1)..(399)
atgtcgtcccgaggcaaaggttctgacaaggctaagcgcaagccgaagtcgcgctccaacagagcaggtcttcagtttcctgttggccgaatccatcgattgctgcgcaaaggtcgttacgctaatcagatcggcgctggcgcatcagtttatctcgcggccgtcatggagtacttggccgctgaaatcttggagttggctggcaatgcagctcgcgacaataagaagacccgcattatcccccgtcatcttcagttggccacgcgcaccgacgaggaactgaacgagctgcttagtggagtcaccatagctcaggctggtgttttaccgaacatccaatctgtccttttgcctaaaaggaccagtcacaaaaccgacaaatccgagtccaacaattaa

SEQ ID NO: 45934 - protein, 132 aa, Nasonia vitripennis
MSSRGKGSDKAKRKPKSRSNRAGLQFPVGRIHRLLRKGRYANQIGAGASVYLAAVMEYLAAEILELAGNAARDNKKTRIIPRHLQLATRTDEELNELLSGVTIAQAGVLPNIQSVLLPKRTSHKTDKSESNN

SEQ ID NO: 45935 - DNA, 408 bp, Nasonia vitripennis
  CDS (1)..(408)
atgaaacaagcaaagctctgcctggctggcggcaaggcgggcaaagattccggcaaggccaaggcgaaggcagtatcccgctcggcgagggctggcctccagtttcccgtgggaagaattcacaggcatctaaagaacagaacaacaagccatggacgtgttggagctacagctgctgtttacagtgctgctatcttggaatatttgactgctgaggtccttgagttggcgggtaacgcatctaaagatttgaaagtaaaacgtatcacacccagacatctgcagctagccattcgtggagacgaggaactcgacagcttaatcaaggcaaccatagctggtggtggtgtcattcctcacattcataaatcgcttatcggcaagaaaggttcgcagaagccagcataa

SEQ ID NO: 45936 - protein, 135 aa, Nasonia vitripennis
MKQAKLCLAGGKAGKDSGKAKAKAVSRSARAGLQFPVGRIHRHLKNRTTSHGRVGATAAVYSAAILEYLTAEVLELAGNASKDLKVKRITPRHLQLAIRGDEELDSLIKATIAGGGVIPHIHKSLIGKKGSQKPA

SEQ ID NO: 45937 - DNA, 273 bp, Nasonia vitripennis
  CDS (1)..(273)
atgtctggacgcggcaaaggcggtggcaaggtcaagggcaagtcaaagacccgctccaacagggccggactccagttccccgtgctcgagttggccggcaacgccgcccgcgacaacaagaagacgaggatcatcccccggcacctccagctggccatccgcaacgacgaggagctgaacaagctcctctccggagtcacgatcgcccagggtggtgtgctgcccaacatccaggcggttcttttgcccaagaagactgagaagagctcataa

SEQ ID NO: 45938 - protein, 90 aa, Nasonia vitripennis
MSGRGKGGGKVKGKSKTRSNRAGLQFPVLELAGNAARDNKKTRIIPRHLQLAIRNDEELNKLLSGVTIAQGGVLPNIQAVLLPKKTEKSS

SEQ ID NO: 45939 - DNA, 396 bp, Nasonia vitripennis
  CDS (1)..(396)
atgtctggacgcggcaaaggtggtggcaaaatcaagggcaagtcaaagacccgctccaacagggctggactccagttccccgtcggacgtatccatcgtctgctgaggaagggcaactatgccgagcgagtgggcgccggtgctccggtctacctggccgccgtcatggagtacttggccgctgaggtcctcgagttggctggcaacgccgctcgcgacaacaagaagacgagaatcattcctcgtcacctccagttggccatccgcaacgacgaagagctgaacaaacttctttccggagtcaccattgcccagggtggtgtcttgcctaatatccaggctgttcttctcccaaagaagaccgaaacaaagaaaagcaattctcaagaatattag

SEQ ID NO: 45940 - protein, 131 aa, Nasonia vitripennis
MSGRGKGGGKIKGKSKTRSNRAGLQFPVGRIHRLLRKGNYAERVGAGAPVYLAAVMEYLAAEVLELAGNAARDNKKTRIIPRHLQLAIRNDEELNKLLSGVTIAQGGVLPNIQAVLLPKKTETKKSNSQEY

SEQ ID NO: 45941 - DNA, 1434 bp, Nasonia vitripennis
  CDS (1)..(1434)
atgtctggacgcggcaaaggtggtggcaaaatcaagggcaagtcaaagacccgttccaacagagccggactccagttccctgtcggacgtatccatcgtctgctgaggaagggcaactacgccgagcgagtgggcgccggtgctccggtctacctggccgccgtcatggagtacttggccgctgaggtcctcgagttggctggtaatgccgctcgcgacaataagaagacgagaatcattcctcgtcacctccagttggccatccgcaacgacgaagagctgaacaaacttctttccggagtcaccattgcccagggtggtgtcttgcctaatatccaggcagttctcttgcctaagaagactgagaaaaagaaaattaaatcgcacggcgatgaatacgttctggaccttgtgccgctcttttcggatctgacgttacaaattatttgtgaatcagcattcggcgttgatctcaacaaattagaccagaaactggttcagcagtacaagggagcacttcatgtcatgtatgatatggttatctacagatcaacaagaccatacatcagagattggatgatgaattttttacccatcggctggaaacagaatcgcgctatcaacatacttcataattttactaacaaggtaattcaagaacggagagagtactacaacaagcatgcctcagaaaatcggtcgtatcaaagtttcgtggatgatgttgatatcgaaagcgattacgttgctgacggacgtaaaaaaaggctggtcatgctcgacgtgttgttatcagcagaaagagaaggcctcattgacgcaaaaggtgtcagagaagaggtggacatatttacggtcgctggtcacgatacaaccgcggttacaatggcatttatgatgatgttgttagctgaaaatctgaaatacagagcggaagttataaaccactttgaagaaaacggaggcaaactaaatatcacggaaattcaaaagtttgaatacttggatcgatgcatcaaagaaactctacggctgtatccacctatttcacaattcgtacgttacatggacaaagacattcaactaaagaagtacctgattcccgctggagttgatgtgctattcttgacttatgatactcaaagggatcctagacactggacagaaccagataagttcgatccagacagattcttgccggaaaatgcaaaaaaacgccatccatttgcatatataccattcagcgctggtcttcgcagctgcattggccagaaatttgcaatgctcgaactaaaggcaatgcttgctcacattttatacaacttttacgtcaagcctgttgatctcacggcaaatatgaaactcgaaacgtatattgtgttgcaaccttctcatccggttcacgtgaaattcatcagaagaaatgttaactga

SEQ ID NO: 45942 - protein, 477 aa, Nasonia vitripennis
MSGRGKGGGKIKGKSKTRSNRAGLQFPVGRIHRLLRKGNYAERVGAGAPVYLAAVMEYLAAEVLELAGNAARDNKKTRIIPRHLQLAIRNDEELNKLLSGVTIAQGGVLPNIQAVLLPKKTEKKKIKSHGDEYVLDLVPLFSDLTLQIICESAFGVDLNKLDQKLVQQYKGALHVMYDMVIYRSTRPYIRDWMMNFLPIGWKQNRAINILHNFTNKVIQERREYYNKHASENRSYQSFVDDVDIESDYVADGRKKRLVMLDVLLSAEREGLIDAKGVREEVDIFTVAGHDTTAVTMAFMMMLLAENLKYRAEVINHFEENGGKLNITEIQKFEYLDRCIKETLRLYPPISQFVRYMDKDIQLKKYLIPAGVDVLFLTYDTQRDPRHWTEPDKFDPDRFLPENAKKRHPFAYIPFSAGLRSCIGQKFAMLELKAMLAHILYNFYVKPVDLTANMKLETYIVLQPSHPVHVKFIRRNVN

SEQ ID NO: 45943 - DNA, 378 bp, Nasonia vitripennis
  CDS (1)..(378)
atgtctggacgcggcaaaggtggtggcaaaatcaagggcaagtcaaagacccgctccaacagggctggactccagttccccgtcggacgtatccatcgtctgctgaggaagggcaactacgccgagcgagtgggcgccggtgctccggtctacctggccgccgttatggagtacttggccgctgaagtcctcgagttggctggtaacgccgctcgcgacaacaagaagacgagaatcattccccgtcatcttcagttagccatccgcaatgacgaagaacttaacaaacttctctcaggagtcaccattgcccagggtggtgtgttgcctaacattcaggctgttcttcttcccaagaagactgagaagagttcttaa

SEQ ID NO: 45944 - protein, 125 aa, Nasonia vitripennis
MSGRGKGGGKIKGKSKTRSNRAGLQFPVGRIHRLLRKGNYAERVGAGAPVYLAAVMEYLAAEVLELAGNAARDNKKTRIIPRHLQLAIRNDEELNKLLSGVTIAQGGVLPNIQAVLLPKKTEKSS

SEQ ID NO: 45945 - DNA, 378 bp, Nasonia vitripennis
  CDS (1)..(378)
atgtccggacgcggcaaaggcggtggcaaggtcaagggaaagtcaaagacccgctccaacagggccggactccagttccccgtcggtcgtatccatcggctgctgaggaagggtaactacgccgagcgcgtgggagccggtgctccggtctacctggccgctgtcatggagtacttggccgctgaggtgctcgagttggcaggcaacgccgctcgcgacaacaagaagacgagaatcatcccccgtcacctccagctggccatccgcaacgacgaggagctgaacaaactgctctccggagtcacgatcgcccagggtggtgtgctgcctaacatccaggccgtacttctgcccaaaaagaccgagaagagctcttaa

SEQ ID NO: 45946 - protein, 125 aa, Nasonia vitripennis
MSGRGKGGGKVKGKSKTRSNRAGLQFPVGRIHRLLRKGNYAERVGAGAPVYLAAVMEYLAAEVLELAGNAARDNKKTRIIPRHLQLAIRNDEELNKLLSGVTIAQGGVLPNIQAVLLPKKTEKSS

SEQ ID NO: 45947 - DNA, 375 bp, Nasonia vitripennis
  CDS (1)..(375)
atgtctggacgcggcaaaggcggaaaagtcaagggcaagtcaaagacccgctccaccagggctggactccagttcccagtcgggcgtatccatcgtctactcaggaaaggaaactacgccgagcgcgttggcgctggtgccccggtttacctggctgccgtcatggagtatctggctgctgaggtactcgagttggctggcaacgctgctcgcgacaacaaaaagaccaggatcatccctcgtcacctccagctggccattcgcaacgacgaggagttgaacaaattgctgtccggcgtcactattgctcagggcggagtccttcccaacattcaggctgtgcttcttcccaagaagactgagaagagctcttaa

SEQ ID NO: 45948 - protein, 124 aa, Nasonia vitripennis
MSGRGKGGKVKGKSKTRSTRAGLQFPVGRIHRLLRKGNYAERVGAGAPVYLAAVMEYLAAEVLELAGNAARDNKKTRIIPRHLQLAIRNDEELNKLLSGVTIAQGGVLPNIQAVLLPKKTEKSS

SEQ ID NO: 45949 - DNA, 381 bp, Anopheles gambiae str. PEST
  CDS (1)..(381)
atggctggcggtaaagcaggcaaggattcgggcaaagcgaaagccaaagcagtgtcgcgctccgcaagggcgggtttgcagttcccggtcggacgtatccatcgtcatctgaaaaaccgaaccacaagccatggacgcgtcggtgcgaccgccgccgtttactcggcagccatcctggagtacctgacggctgaggtgctggagttggccggcaacgcctcgaaggatctcaaagtgaagcgaatcacgcccaggcatctgcagctggccattcgcggtgacgaggagctggacagcttgatcaaggccaccattgccggcggtggcgtcattccccacatccacaaatcgctcatcggcaagaagggcggccccgagtaa

SEQ ID NO: 45950 - protein, 126 aa, Anopheles gambiae str. PEST
MAGGKAGKDSGKAKAKAVSRSARAGLQFPVGRIHRHLKNRTTSHGRVGATAAVYSAAILEYLTAEVLELAGNASKDLKVKRITPRHLQLAIRGDEELDSLIKATIAGGGVIPHIHKSLIGKKGGPE

SEQ ID NO: 45951 - DNA, 384 bp, Anopheles gambiae str. PEST
  CDS (1)..(384)
atgaagaaaatatcgaaatcgtcccgtgctgggcttacgttcagcgttagccgcgtctcttccacgctgaagaggggcaagtatgcgaaccggatcggcgtcggttcgtccgtgtacatgacggccgtgctcgagtatctggcggcggaggtgctggagctggcgggtaatgccgcgcgggacaatcacaaatctcgcctgacgccgcgccacatccagctggcggtgcggaacgacgaggagctgagcaagctgctgcaggggacgaccatctcgcagggcggcgtcatgccgaacattcattcggtgctgctgccccgcaaaacgggtgctaaagctgccggtaacagctcatcgcaggagaagcaaagccaggagtattga

SEQ ID NO: 45952 - protein, 127 aa, Anopheles gambiae str. PEST
MKKISKSSRAGLTFSVSRVSSTLKRGKYANRIGVGSSVYMTAVLEYLAAEVLELAGNAARDNHKSRLTPRHIQLAVRNDEELSKLLQGTTISQGGVMPNIHSVLLPRKTGAKAAGNSSSQEKQSQEY

SEQ ID NO: 45953 - DNA, 429 bp, Magnaporthe grisea 70-15
  CDS (1)..(429)
atggcaggcggcaagggcaagtcttcgggcggcaagagttctggtgggaagacatcgggcgaggggcccaaaaagcaacaatcgcactctgctcgcgcaggacttcagttcccgtgtggtcgtgtcaagcgttttctcaagcaaaacactcagaacaagatgcgcgttggcgccaaggctgctgtatacgtcaccgctgttctggagtacttgactgcagaggttttggagctcgcgggtaacgccgcaaaggatctcaaggtcaagcgaatcactccccgtcacctacagcttgccattcgtggcgacgaggagctggacacgctcatccgtgccacgattgcgtttggtggtgtactgccacacatcaaccgggcactactgctcaaagtagaacagaagaagaagaacaagcagatcgaggcctaa

SEQ ID NO: 45954 - protein, 142 aa, Magnaporthe grisea 70-15
MAGGKGKSSGGKSSGGKTSGEGPKKQQSHSARAGLQFPCGRVKRFLKQNTQNKMRVGAKAAVYVTAVLEYLTAEVLELAGNAAKDLKVKRITPRHLQLAIRGDEELDTLIRATIAFGGVLPHINRALLLKVEQKKKNKQIEA

SEQ ID NO: 45955 - DNA, 468 bp, Apis mellifera
  CDS (1)..(468)
atggcgggaaaagttgcaagtaaactgctgcactcggcaacgcgcatgtctgcgcagagacctcgtcgatattgcaacccatccgctggcggaaaggcgggcaaggactctggtaaagcgaaggcgaaggcggtctctcgttcggcgagagccggcttgcagtttccggttggtagaattcacaggcatttgaaaaacagaaccacaagtcatggtcgagtcggtgctacagcagcggtatacagtgcagctatcttggaatacctcactgctgaggttcttgaattggcaggaaatgcatcaaaagatttgaaagtcaaacgtatcacaccaagacatcttcagcttgctattcgtggtgatgaagaattagatagtctcattaaagcaactattgcaggaggaggtgttattccacatatccacaaatctttgattggaaagaaaggttcacagaaaccagcataa

SEQ ID NO: 45956 - protein, 155 aa, Apis mellifera
MAGKVASKLLHSATRMSAQRPRRYCNPSAGGKAGKDSGKAKAKAVSRSARAGLQFPVGRIHRHLKNRTTSHGRVGATAAVYSAAILEYLTAEVLELAGNASKDLKVKRITPRHLQLAIRGDEELDSLIKATIAGGGVIPHIHKSLIGKKGSQKPA

SEQ ID NO: 45957 - DNA, 408 bp, Apis mellifera
  CDS (1)..(408)
atgtctggacgcggtaaaggtggaaaggctaagggaaaggcgaagacccgcagtagtagggcagggctgcaattccctgtcggaagaatccatcgtcttttgagaaaaggaaattatgcagaacgagttggagctggagctcctgtgtatttggctgctgtaatggaatatttggcggctgaggtactcgagttagccgggaacgccgcaagagacaacaagaagacgaggataattccacgtcatttgcaattagctattcgcaatgacgaggaattgaataaattactctctggtgtaacgattgctcaaggtggtgtcctgcctaacattcaagcagtacttttgccgaagaaaactggtactggtggatctggaaaaggagacaaagcatcccaggaatattaa

SEQ ID NO: 45958 - protein, 135 aa, Apis mellifera
MSGRGKGGKAKGKAKTRSSRAGLQFPVGRIHRLLRKGNYAERVGAGAPVYLAAVMEYLAAEVLELAGNAARDNKKTRIIPRHLQLAIRNDEELNKLLSGVTIAQGGVLPNIQAVLLPKKTGTGGSGKGDKASQEY

SEQ ID NO: 45959 - DNA, 405 bp, Strongylocentrotus purpuratus
  CDS (1)..(405)
atgagtggacgcgggaaaggagctaaggcgaaatcaaccaagtcagtcacccgcagctccagggctggtctgcagttccccgtcggtagagttcatcggtatctcaaaaaaggccagtatgctacacggatcggtggaggtgcagccgtgtacctcgctgcaatcctggagtatctctcagctgaaatcctggagcttgccgggaatgcagcccgggacaataagaaatcccgaataatcccgagacatcttcagttggccatccgaaatgacgaagaactaaacaaactcctgaataatgtcactatcgcatcgggtggtgtgatgcccaacattcaaacggtcctccttccaaagaagagtggtaaggcagcaaagcagactggacagagtatggagtactag

SEQ ID NO: 45960 - protein, 134 aa, Strongylocentrotus purpuratus
MSGRGKGAKAKSTKSVTRSSRAGLQFPVGRVHRYLKKGQYATRIGGGAAVYLAAILEYLSAEILELAGNAARDNKKSRIIPRHLQLAIRNDEELNKLLNNVTIASGGVMPNIQTVLLPKKSGKAAKQTGQSMEY

SEQ ID NO: 45961 - DNA, 381 bp, Strongylocentrotus purpuratus
  CDS (1)..(381)
atgtctggacgtggaaaaggaggtggaaaggcccgtgccaaggctaagagccgatctgctcgtgcaggtcttcagtttccagttggtcgtgttcaccgattccttcgcaaggggaactacgctgcccgtgttggagctggagccccggtctacctggctgccgtgctcgagtaccttgcagctgagatcctcgagctggctggcaacgccgcccgcgacaacaagaagacgaggatcatcccccgtcacttgcaactggctgtccgcaatgacgaggagttgaacaagcttctcagtggagtcaccatcgcccagggtggcgtcctccccaacatccaggctgtccttctccccaagaagacctcaaaggcctccaagtaa

SEQ ID NO: 45962 - protein, 126 aa, Strongylocentrotus purpuratus
MSGRGKGGGKARAKAKSRSARAGLQFPVGRVHRFLRKGNYAARVGAGAPVYLAAVLEYLAAEILELAGNAARDNKKTRIIPRHLQLAVRNDEELNKLLSGVTIAQGGVLPNIQAVLLPKKTSKASK

SEQ ID NO: 45963 - DNA, 378 bp, Strongylocentrotus purpuratus
  CDS (1)..(378)
atgtctggacgtggtaagggcgctaaggctaagggaaaggcaaagagccgatcatcccgtgcaggacttcagttccccgtcggtcgtgttcaccgattcctccgaaagggaaactacgccaaccgtgttggtgctggagccccagtctacttggctgccgtgctcgagtacttggcagctgagatcctcgagttggctggcaatgccgctcgcgacaacaagaagacgaggatcatcccccgtcacttgcagctggccatcaggaacgacgaggagttgaacaagcttcttggcggagtcaccattgcccagggtggtgtcctccccaacatccaggctgtccttctgcccaagaagacctccaagtcctccaagtaa

SEQ ID NO: 45964 - protein, 125 aa, Strongylocentrotus purpuratus
MSGRGKGAKAKGKAKSRSSRAGLQFPVGRVHRFLRKGNYANRVGAGAPVYLAAVLEYLAAEILELAGNAARDNKKTRIIPRHLQLAIRNDEELNKLLGGVTIAQGGVLPNIQAVLLPKKTSKSSK

SEQ ID NO: 45965 - DNA, 375 bp, Strongylocentrotus purpuratus
  CDS (1)..(375)
atgtctggacgtggtaaaggagcaaaggcaaagagcaaggccaagagccgatcatcccgtgcagggcttcagttccccgttggccgtgtgcaccgtttcctgaagaagggcaactatgccggccgtgtcggtgctggtgccccagtgtacttggctgccgtactcgagtacctgaccgccgagatcctcgagctcgcaggcaacgccgcccgcgacaacaagaaggcaaggatcatcccccgtcacttgcagttggctgtccgcaacgacgaggagctcaacaaacttctcggtggagttaccatcgcccaaggtggtgtcctccccaacatccaggctgtccttctccccaagaagaccagcaagtctgcttaa

SEQ ID NO: 45966 - protein, 124 aa, Strongylocentrotus purpuratus
MSGRGKGAKAKSKAKSRSSRAGLQFPVGRVHRFLKKGNYAGRVGAGAPVYLAAVLEYLTAEILELAGNAARDNKKARIIPRHLQLAVRNDEELNKLLGGVTIAQGGVLPNIQAVLLPKKTSKSA

SEQ ID NO: 45967 - DNA, 378 bp, Strongylocentrotus purpuratus
  CDS (1)..(378)
atgactggacgtggtaaaggaggaaaggcaaagagcaaggccaagagccgctcatcccgtgcagggcttcagttccccgttggccgtgtgcaccgtttcttgaagaagggcaactacgctggccgcgtcggagctggtgcccccgtgtacctctctgctgtgcttgagtacctgaccgctgagatcctcgagctcgctggcaacgccgcccgcgacaacaagaaggccaggatcatcccccgtcaccttcagctcgccgtccgcaacgacgaggagctcaacaagcttcttggaggagttaccatcgcccaaggtggtgtcctccccaacatccaggctgtccttctccccaagaagaccggcaagtcttccgcttaa

SEQ ID NO: 45968 - protein, 125 aa, Strongylocentrotus purpuratus
MTGRGKGGKAKSKAKSRSSRAGLQFPVGRVHRFLKKGNYAGRVGAGAPVYLSAVLEYLTAEILELAGNAARDNKKARIIPRHLQLAVRNDEELNKLLGGVTIAQGGVLPNIQAVLLPKKTGKSSA

SEQ ID NO: 45969 - DNA, 375 bp, Tribolium castaneum
  CDS (1)..(375)
atgtctggacgtggaaaaggaggaaaggtaaaaggaaaagccaagtctcgttcgagcagggccggtcttcagtttcctgttggaagaatacatcgtttacttcgtaaaggtaattacgccgaacgagtcggtgccggtgctccagtttatttggcggctgtgatggaatatcttgccgctgaagttcttgaattggctggaaatgctgctcgtgacaacaaaaaaactcgtattattccacgtcatcttcaattggccatcagaaatgacgaagaattaaacaagctcctttccggtgtgacaatcgctcaaggtggtgttttacccaacatccaggcggtccttttgccgaaaaaaaccgaaaagaaaccataa

SEQ ID NO: 45970 - protein, 124 aa, Tribolium castaneum
MSGRGKGGKVKGKAKSRSSRAGLQFPVGRIHRLLRKGNYAERVGAGAPVYLAAVMEYLAAEVLELAGNAARDNKKTRIIPRHLQLAIRNDEELNKLLSGVTIAQGGVLPNIQAVLLPKKTEKKP

SEQ ID NO: 45971 - DNA, 414 bp, Tribolium castaneum
  CDS (1)..(414)
atgtctggtcgtggcaaaggtggcaaagtcaaggggaaggcgaagtcgcgctcgaaccgcgcggggctccagttcccggtggggcgaatccatcgtctgcttcggaagggcaactacgcggagcgcgtgggggccggagcccccgtgtacctggccgccgttatggagtacctggctgctgaggtgctggagttggccggaaacgctgctagggacaacaagaagacaaggattattcctcgccatctccagctcgcgatccggaacgacgaggagttgaacaagctcctgtcgggggtcaccatcgcccaaggaggcgtgcttccaaacatccaggcggtgctgcttcctaagaagaccgggaacgccccgactgggggcaaagggggcaagtcccagtcccaagactactaa

SEQ ID NO: 45972 - protein, 137 aa, Tribolium castaneum
MSGRGKGGKVKGKAKSRSNRAGLQFPVGRIHRLLRKGNYAERVGAGAPVYLAAVMEYLAAEVLELAGNAARDNKKTRIIPRHLQLAIRNDEELNKLLSGVTIAQGGVLPNIQAVLLPKKTGNAPTGGKGGKSQSQDY

SEQ ID NO: 45973 - DNA, 387 bp, Tribolium castaneum
  CDS (1)..(387)
atggctggtggcaaagcagggaaagattcgggcaaagctaaagccaaggcggtgtcgcgctcggcgcgtgccggactccagttccccgtggggaggatccaccgccacttgaagaaccgcaccacgagccatggacgcgtgggggccaccgcggctgtgtattccgccgcgattttggagtatttgacagctgaggtcctggagttggccgggaacgccagtaaggacttgaaggtgaagaggatcacccccaggcacttgcagctggccatcagaggggacgaggagctggacagcctgatcaaggccactatcgccggcggaggcgtcattccacacatccacaagagtttgatcgggaaaaagggccactcacagcccgtctaa

SEQ ID NO: 45974 - protein, 128 aa, Tribolium castaneum
MAGGKAGKDSGKAKAKAVSRSARAGLQFPVGRIHRHLKNRTTSHGRVGATAAVYSAAILEYLTAEVLELAGNASKDLKVKRITPRHLQLAIRGDEELDSLIKATIAGGGVIPHIHKSLIGKKGHSQPV

SEQ ID NO: 45975 - DNA, 378 bp, Chlamys farreri
  CDS (1)..(378)
atgtctggacgaggaaagggaggaaaagttaagggaaaggcaaagagccgatcatcccgtgccgggcttcagtttccagtcggacgtatccatcgtctgctccgtaagggaaactatgccgagagagttggagccggtgccccagtctacttggctgctgtcctcgagtacttagctgctgaggttttggaattggcaggaaacgccgctagagataacaagaagaccaggatcatcccccgtcatctccagttggctatcaggaacgacgaggagttgaacaaactgctgtccggtgtcaccattgcccagggtggtgttctgccaaacatccaggctgtccttctccccaagaagacccagaaacctgccaagtaa

SEQ ID NO: 45976 - protein, 125 aa, Chlamys farreri
MSGRGKGGKVKGKAKSRSSRAGLQFPVGRIHRLLRKGNYAERVGAGAPVYLAAVLEYLAAEVLELAGNAARDNKKTRIIPRHLQLAIRNDEELNKLLSGVTIAQGGVLPNIQAVLLPKKTQKPAK

SEQ ID NO: 45977 - DNA, 435 bp, Medicago truncatula
  CDS (1)..(435)
atggattccaccaccaccacaacaaccacaaccaccaaaggtgccggtggaagaaaaggcggcgaaaggaagaaagccgtttcaaaatcctccaaagccggtctccaattccccgttggtcgtatcgctaggttcatgaagaaaggtcgctattctcagcgtgttggcaccggtgctccgatctacctcgccgccgttctcgaatatctcgccgccgaggttcttgaattggctgggaatgctgcaagagataacaagaagaacagaattaaccctagacacgtgtgtcttgctgtgaggaacgatgatgaattaggaaaattgcttcaaggtgtgacaattgctagtggtggagttttgccaaatataaaccctgtgttgttgccaaagaaaaccgctgctgctgagaaaactaccaattcccctaagaaatag

SEQ ID NO: 45978 - protein, 144 aa, Medicago truncatula
MDSTTTTTTTTTKGAGGRKGGERKKAVSKSSKAGLQFPVGRIARFMKKGRYSQRVGTGAPIYLAAVLEYLAAEVLELAGNAARDNKKNRINPRHVCLAVRNDDELGKLLQGVTIASGGVLPNINPVLLPKKTAAAEKTTNSPKK

SEQ ID NO: 45979 - DNA, 420 bp, Medicago truncatula
  CDS (1)..(420)
atgagttccacaggcacaactaagggcggaaggggtaagccaaaggctgccaaatcagtttcaagatcttcaaaggcaggtcttcaatttcccgtcggaagaatcgccagattcctcaaggccggtaaatacgccgaacgtgttggtgccggagctcctgtctacctttccgccgtcctcgagtatcttgctgctgaggttttggaattggctgggaacgctgccagagacaacaagaagaaccgtattgtaccaaggcacattcagcttgcagtgaggaacgacgaggaactcagcaagcttttgggaactgtgaccattgctaatggtggtgttttgcccaatattcatcagactttgctccctaagaaggttggaaagggaaaaggagaaattggatctgcgtctcaagaattctag

SEQ ID NO: 45980 - protein, 139 aa, Medicago truncatula
MSSTGTTKGGRGKPKAAKSVSRSSKAGLQFPVGRIARFLKAGKYAERVGAGAPVYLSAVLEYLAAEVLELAGNAARDNKKNRIVPRHIQLAVRNDEELSKLLGTVTIANGGVLPNIHQTLLPKKVGKGKGEIGSASQEF

SEQ ID NO: 45981 - DNA, 465 bp, Medicago truncatula
  CDS (1)..(465)
atgacattgcattcaaaattcagtgctcgtcttctcagttcactctcggataattttcaatttcaaaatttccaatttctccaaatccgatcaacaactaagggtggaagggacaaaccaaatgctaccaaatcagtttcaagatcttcaaaggccggacttcaattccccgttggaagaatcgcaagattcctcaaggccggaaaatacgctgaacgtgttggtgccggtgctccggtatacctctctgcggtccttgagtatctcgctgctgaggttgggaacgctgctagggacaacaagaagattcaacttgctgttaggaacgatgaagaactaagcaagcttttgggagctgtaaccattgctaatggtggtgttttgcctaacattcatcagactttgctgccaaagaagtctgggaagggaaaagccgaaattggatctgcttctcaagaattttag

SEQ ID NO: 45982 - protein, 154 aa, Medicago truncatula
MTLHSKFSARLLSSLSDNFQFQNFQFLQIRSTTKGGRDKPNATKSVSRSSKAGLQFPVGRIARFLKAGKYAERVGAGAPVYLSAVLEYLAAEVGNAARDNKKIQLAVRNDEELSKLLGAVTIANGGVLPNIHQTLLPKKSGKGKAEIGSASQEF

SEQ ID NO: 45983 - DNA, 450 bp, Vitis vinifera
  CDS (1)..(450)
atggagtctaccggaaaagttaagaagggggccggtggaaggaagggtggtggtcccaagaagaagccagtgtctcggtccgttaaggccggtttgcagttcccggtcggaaggattggccgttacctgaagaagggccggtactcccagcgtgtagggactggtgctccagtgtacttggctgccgtgcttgagtacctggctgcagaagtgctagagttggctggaaatgcagctcgggacaataagaagaacaggatcattccaaggcacgttctattggcagtaagaaacgacgaggaactaggaaagctgctctctggagtgaccattgctcatggaggcgttctccccaacatcaacccagtactcttgccaaagaagacagacaaggctaccaaagagcccaagtcaccttccaaggccactaagtctcccaagaaggcttaa

SEQ ID NO: 45984 - protein, 149 aa, Vitis vinifera
MESTGKVKKGAGGRKGGGPKKKPVSRSVKAGLQFPVGRIGRYLKKGRYSQRVGTGAPVYLAAVLEYLAAEVLELAGNAARDNKKNRIIPRHVLLAVRNDEELGKLLSGVTIAHGGVLPNINPVLLPKKTDKATKEPKSPSKATKSPKKA

SEQ ID NO: 45985 - DNA, 411 bp, Vitis vinifera
  CDS (1)..(411)
atgtcaggaaaaggtgcgaagggtttgataatggggaaatcctcaaccctaaatggtaacaaggacaaggacaagaagaaacccatctctcgctcttctcgtgctggtcttcagttcccagttggtcgggtccaccgtctactgaagacaagggtttctgcaaatggaagggttggagcaacagctgctgtttatacagcagccatattggagtacctgacagcagaagtattggaactggctgggaatgctagcaaggatctgaaggtaaaacgtataacacccaggcatttgcagcttgctattcggggagatgaggaacttgataccctcatcaaaggaaccatagctggtggaggagtgatcccacacatccacaagtccctcatcaataaatcctccaaggagtag

SEQ ID NO: 45986 - protein, 136 aa, Vitis vinifera
MSGKGAKGLIMGKSSTLNGNKDKDKKKPISRSSRAGLQFPVGRVHRLLKTRVSANGRVGATAAVYTAAILEYLTAEVLELAGNASKDLKVKRITPRHLQLAIRGDEELDTLIKGTIAGGGVIPHIHKSLINKSSKE

SEQ ID NO: 45987 - DNA, 414 bp, Vitis vinifera
  CDS (1)..(414)
atggagaacaccaagccaacgaagggtgccggaggaaggaagggcggagagaggaagaagtcggtgtcgaaatccgtcaaagcgggcctgcaattccccgttggtcgtatcgcccggttcttgaagaccggccgctacgctcagcggaccggaaccggtgctcctatttatctcgccgctgtgctcgaataccttgccgctgaggtgttggaattggcgggaaatgcagcaagagataacaagaagaacagaatcagccctagacatgtgctattggccgtgagaaacgatgaagaattgggaaagcttctcagaggtgttaccatcgcaaatggtggtgttctgcccaacatcaacccagtgttgttgccgaagaaatccaattcagagcccaagtcccctaagaaagcctaa

SEQ ID NO: 45988 - protein, 137 aa, Vitis vinifera
MENTKPTKGAGGRKGGERKKSVSKSVKAGLQFPVGRIARFLKTGRYAQRTGTGAPIYLAAVLEYLAAEVLELAGNAARDNKKNRISPRHVLLAVRNDEELGKLLRGVTIANGGVLPNINPVLLPKKSNSEPKSPKKA

SEQ ID NO: 45989 - DNA, 420 bp, Vitis vinifera
  CDS (1)..(420)
atgagttccacgggatcaaccaagggaggtagaggcaagccaaaggcctcaaagtcggtatcgcggtctcagaaggctgggcttcaatttccggtggggaggattgcaaggtttctcaaggccggaaagtatgccgagcgtgttggagccggcgcccccgtctacctgtctgctgttcttgagtatctcgcggccgaggttttggagcttgctggaaatgcagcgagggacaacaaaaagaatcgcattgtacctcgccacatacagctagcagtaaggaatgacgaggagctaagcaaactattggggtcagtaaccattgctaatggaggggttttgcccaacatccaccagactctgttgccaaagaagacgggtaaaggcaagggggagattgggtctgcttcccaggaattttag

SEQ ID NO: 45990 - protein, 139 aa, Vitis vinifera
MSSTGSTKGGRGKPKASKSVSRSQKAGLQFPVGRIARFLKAGKYAERVGAGAPVYLSAVLEYLAAEVLELAGNAARDNKKNRIVPRHIQLAVRNDEELSKLLGSVTIANGGVLPNIHQTLLPKKTGKGKGEIGSASQEF

SEQ ID NO: 45991 - DNA, 450 bp, Vitis vinifera
  CDS (1)..(450)
atggaggctgctggaaaggtgaagaagggtgccggaggaaggaagggcggtggtcccaagaagaaacccgtatcccgctccgtcaaagctggtcttcaattcccggtcggtcgtatcggcagatacctcaagaagggccgttattctcagcgcgttggaactggtgccccggtctacctcgctgccgtgctggagtacctagctgctgaggttttggagttggctggaaatgcagcaagggataacaagaagaacaggataatcccgaggcatgttttgttggctgtgagaaatgatgaagaacttgggaagcttctagctggagtcacaattgctcatggtggtgtcctgccgaacatcaaccctgttcttctgccaaagaagtctgacaaggcagcaaaggaacccaagtcgccatccaaggctacaaaatctcccaggaaaacttag

SEQ ID NO: 45992 - protein, 149 aa, Vitis vinifera
MEAAGKVKKGAGGRKGGGPKKKPVSRSVKAGLQFPVGRIGRYLKKGRYSQRVGTGAPVYLAAVLEYLAAEVLELAGNAARDNKKNRIIPRHVLLAVRNDEELGKLLAGVTIAHGGVLPNINPVLLPKKSDKAAKEPKSPSKATKSPRKT

SEQ ID NO: 45993 - DNA, 417 bp, Vitis vinifera
  CDS (1)..(417)
atgagctctgcagcaccggcaaagggcggtcgcggccactccaaggccaaatccgtttcaagatctcaaaaggccggcctccaattccccgtcggtcgaatagctcggttcctcaaaaagggccgatatgcacagcgcgttgggtctggctctccggtctacctctccgccgtcctcgaatacctcgcagccgaggttttggagcttgctggaaatgcggccagggacaacaagaagaatcggattatcccgaggcacatacaacttgcagtgaggaacgatgaggagttggggaaacttctgggaggcgtgactattgcgagcggaggagtcttgccaaacattcatcagaatctgttgccgaagaagaccgggaaagggaagggagagattgggtccgcatctcaagaattctag

SEQ ID NO: 45994 - protein, 138 aa, Vitis vinifera
MSSAAPAKGGRGHSKAKSVSRSQKAGLQFPVGRIARFLKKGRYAQRVGSGSPVYLSAVLEYLAAEVLELAGNAARDNKKNRIIPRHIQLAVRNDEELGKLLGGVTIASGGVLPNIHQNLLPKKTGKGKGEIGSASQEF

SEQ ID NO: 45995 - DNA, 414 bp, Vitis vinifera
  CDS (1)..(414)
atgagttcctcaaacaaagggggcagaggcaagcccaaggccaccaaatcggtttcccgatcggcaaaggctggtcttcagttcccagtcggccgaatcgcccgtttcctcaaagccggaaagtacgccgaacgtgtcggcgctggcgctcccgtttatctctccgccgttctcgagtaccttgcggctgaggttctcgaacttgctggcaatgctgcgagggacaacaagaagagtagaatcgttccccggcacattcagcttgctgtgaggaatgatgaggagttgagcaaactactggggacggttaccattgcaaatggtggtgtattgccgaacattcatcagaaccttttgccaaagaagacgggggcagggaagggagaaattggatctgcttcgcaggagttttag

SEQ ID NO: 45996 - protein, 137 aa, Vitis vinifera
MSSSNKGGRGKPKATKSVSRSAKAGLQFPVGRIARFLKAGKYAERVGAGAPVYLSAVLEYLAAEVLELAGNAARDNKKSRIVPRHIQLAVRNDEELSKLLGTVTIANGGVLPNIHQNLLPKKTGAGKGEIGSASQEF

SEQ ID NO: 45997 - DNA, 378 bp, Chaetopterus variopedatus
  CDS (1)..(378)
atgtctggacgcggaaaaggaggaaaggcaaagggaaagagcaagactcgttcatcccgtgcgggacttcagttccccgtcggacgtattcaccgtcttctccgcaagggcaactacgccgagcgtgctcgtgccggtgcacctgcgtacctggccgctgtcatggaatacttagccgctgaggtgctcgagctcgcaggtaacgctgcccgcgacaacaagaaatcgagaatcatcccgcgtcacttgcagctggccatccgtaatgacgaagaactgaacaagcttctgtctggagtcaccatcgcacaaggcggtgtactccctaacatccaggctgtgcttctcccaaagaagacacagaaaccagccaagtaa

SEQ ID NO: 45998 - protein, 125 aa, Chaetopterus variopedatus
MSGRGKGGKAKGKSKTRSSRAGLQFPVGRIHRLLRKGNYAERARAGAPAYLAAVMEYLAAEVLELAGNAARDNKKSRIIPRHLQLAIRNDEELNKLLSGVTIAQGGVLPNIQAVLLPKKTQKPAK

SEQ ID NO: 45999 - DNA, 420 bp, Pinus taeda
  CDS (1)..(420)
atggcaggacgaggaaaggcggtcggaggagcgggtggttccaagaagtccacctcgcggagcagcaaggccggcctccagttccctgtgggcagaatcgcccggttcctcaaggccggcaagtatgccgaacgggtgggaggaggcgcacctgtttacctcgcggccgttcttgaatacctggcagccgaggtgctggaactggcaggtaacgctgcccgggacaacaagaagacaagaatagttccccgccacatacagttggccgttagaaatgatgaggagctgagcaagctgctcggtgctgttaccatagccaacggtggcgtcatgcccaatatccataacattctgcttccaaaaaagaccgcttcgtctggggctccaaccaaatctggcaaggatgacgaggagaactaa

SEQ ID NO: 46000 - protein, 139 aa, Pinus taeda
MAGRGKAVGGAGGSKKSTSRSSKAGLQFPVGRIARFLKAGKYAERVGGGAPVYLAAVLEYLAAEVLELAGNAARDNKKTRIVPRHIQLAVRNDEELSKLLGAVTIANGGVMPNIHNILLPKKTASSGAPTKSGKDDEEN

SEQ ID NO: 46001 - DNA, 405 bp, Psammechinus miliaris
  CDS (1)..(405)
atgagtggacgcggaaaaggagccaaggcgaaatctggaaagtccgtcacccgaagctccagggctggtctgcagttccctgttggtagaattcaccgttttctcaggaaaggacagtatgcctcacggatcggcggcggtgctgcggtttacctggcggcaatcctggaatatctctccgctgaaatcttggaacttgcgggaaatgcagcgcgggacaataagaagtcccgaataatcccgagacatttacagttggccgttagaaacgatgaggaactcaacaaacttttgaataacgtcacaattgcatcgggtggtgtgatgcccaacatccaaacggtcctcctgccaaagaagagcggaaagtcgtcgaagcagacggggcagagcatggagtactag

SEQ ID NO: 46002 - protein, 134 aa, Psammechinus miliaris
MSGRGKGAKAKSGKSVTRSSRAGLQFPVGRIHRFLRKGQYASRIGGGAAVYLAAILEYLSAEILELAGNAARDNKKSRIIPRHLQLAVRNDEELNKLLNNVTIASGGVMPNIQTVLLPKKSGKSSKQTGQSMEY

SEQ ID NO: 46003 - DNA, 465 bp, Ostreococcus tauri
  CDS (1)..(465)
atgtctggacgaggaaagggtaagaccggcaagaaggccatgagccgatccgccaaggcgggcctccaattcccggttggccgtgtcgcgcgatacttgaagcaaggcaagtacgccacccgcgtcggtgccggcgccccggtgtacctcgccgcggtgctcgagtacctcgccgctgaagttcttgaactcgctggcaacgcgtcccgcgacaacaagaagtcgcgcattgtgccgcgccacatccaattggcgatccgcaacgacgaagagctttccaagctcctcggcacggtcacgatcgcgtccggtggtgttctcccgaacattcactccgtgctcttgccgaagaagattaaaacttcgatcaaaaacacaaaaaaaaatgggagccaagagccccgcaaaccaaaatcatggtgttcatttaacaccaccaccaacaaaagatcgccctttctgtag

SEQ ID NO: 46004 - protein, 154 aa, Ostreococcus tauri
MSGRGKGKTGKKAMSRSAKAGLQFPVGRVARYLKQGKYATRVGAGAPVYLAAVLEYLAAEVLELAGNASRDNKKSRIVPRHIQLAIRNDEELSKLLGTVTIASGGVLPNIHSVLLPKKIKTSIKNTKKNGSQEPRKPKSWCSFNTTTNKRSPFL

SEQ ID NO: 46005 - DNA, 432 bp, Ostreococcus tauri
  CDS (1)..(432)
atgtcaggtaagggagctaaggggctttctggcaaaggcctctccgggaaaggggcgaaaggcacgatgtcctccaagaagggcgacaagagaaagccaacgtctcgttctgtgaaagccggtttgcagttcccggttggtcgtattcacaggttcttgaagaatcgcgcggcttccggtggtcgtgttggtgccaccgctgcagtctactctgccgccatccttgaataccttacagcagaagtattagagcttgcgggcaatgcctcgaaggatttgaaggttaagcgcatcacgcctcgtcatctccaactcgctattcggggtgatgaagaacttgacacactcatcaaggcaactattgccggtggtggcgtcattccgcatatccacaagtccctcatgaacaagtcatcgaagaaaggggaataa

SEQ ID NO: 46006 - protein, 143 aa, Ostreococcus tauri
MSGKGAKGLSGKGLSGKGAKGTMSSKKGDKRKPTSRSVKAGLQFPVGRIHRFLKNRAASGGRVGATAAVYSAAILEYLTAEVLELAGNASKDLKVKRITPRHLQLAIRGDEELDTLIKATIAGGGVIPHIHKSLMNKSSKKGE

SEQ ID NO: 46007 - DNA, 411 bp, Monascus anka
  CDS (1)..(411)
atgcctggcggaaagggaaagtctatcggtggaaagggtgatcccaagggttcggggaaggctcagaaatcccacagcgcgaaggccggcctgcagttcccttgcggtcgtgttaagcgttttctgaagaacaacactcagaacaagatgcgcgttggggccaaagctgccgtctatgttaccgccgtcttagaatatctaactgctgaagttctcgaactcgccggtaacgccgccaaggatctaaaggtcaagcgtatcacccctcgtcacttgcaactcgccatccgtggagacgaagagttagatacccttatccgtgcgaccatcgctttcggaggtgtcttgccgcgaatcaatcgtgcgctattgctcaaggtcgagcagaagaagaagaagacggaagcgtaa

SEQ ID NO: 46008 - protein, 136 aa, Monascus anka
MPGGKGKSIGGKGDPKGSGKAQKSHSAKAGLQFPCGRVKRFLKNNTQNKMRVGAKAAVYVTAVLEYLTAEVLELAGNAAKDLKVKRITPRHLQLAIRGDEELDTLIRATIAFGGVLPRINRALLLKVEQKKKKTEA

SEQ ID NO: 46009 - DNA, 396 bp, Medicago truncatula
  CDS (1)..(396)
atggcaggaaaaggacttgttgcagcgaaaaccatcggggataacaaagacagagacaagaaggaacccatttctcgttcttctcgtgctggaatccagtttcctgtgggtaggatccacagacagctgaagcacagagtccaagctaatggacgtgtgggagcaacagctgcagtgtatctggcatcaattctggagtatctgactacagaagtacttgaactggctggaaatgcaagtagagatttgaatgtgaagaggatcacaccaagacatttgcaactggctattaggggagatgaggaacttgatacccttatcaagggaacgattgctggtggtggtgtcattcctaacattcacaagtccttgatcaataaaactgccaaagaatga

SEQ ID NO: 46010 - protein, 131 aa, Medicago truncatula
MAGKGLVAAKTIGDNKDRDKKEPISRSSRAGIQFPVGRIHRQLKHRVQANGRVGATAAVYLASILEYLTTEVLELAGNASRDLNVKRITPRHLQLAIRGDEELDTLIKGTIAGGGVIPNIHKSLINKTAKE

SEQ ID NO: 46011 - DNA, 417 bp, Aspergillus oryzae
  CDS (1)..(417)
atgcctggtggaaagggaaagtctatcggcggaaaggctggttcaaaggactctgcggggaaggctcagaagtcccacagcgcaaaggccggtctgcagttcccttgcggtcgtgttaagcgtttcttgaagaacaacacgcaaaataagatgcgcgttggtgctaaagctgccgtctatgttaccgccgtgttggagtacttgactgctgaagttctcgagcttgctggaaatgccgccaaggacctcaaggtcaagcgtatcaccccccgtcacttgcagcttgccatccgtggagacgaagagttggacactctcatccgcgccaccatcgctttcggtggtgtcttgccacgcatcaaccgtgcgctgttgctgaaggtggagcagaagaagaaaaacaagactgaggcttaa

SEQ ID NO: 46012 - protein, 138 aa, Aspergillus oryzae
MPGGKGKSIGGKAGSKDSAGKAQKSHSAKAGLQFPCGRVKRFLKNNTQNKMRVGAKAAVYVTAVLEYLTAEVLELAGNAAKDLKVKRITPRHLQLAIRGDEELDTLIRATIAFGGVLPRINRALLLKVEQKKKNKTEA

SEQ ID NO: 46013 - DNA, 393 bp, Chlamydomonas reinhardtii
  CDS (1)..(393)
atggctggtcgcggcaagggcaagacctctggcaagaaggccgtgagccgcagcgccaaggccggcctgcagttccctgtgggccgcattgcgcgctacctgaagaagggcaagtacgccgagcgcatcggtgccggcgcgcccgtgtacctggccgccgtgctggagtacctgaccgctgaggtgctggagctggccggcaacgccgcccgcgacaacaagaagaaccgcattgtgcctcgccacatccagctggccatccgcaacgatgaggagctgggcaagctgctgggcgaggtgaccatcgcctcgggcggtgtgctgcccaacatccacgccgtgctgctgcccaagaagaccaagggcggcaagggcagcgaggaggccgcctaa

SEQ ID NO: 46014 - protein, 130 aa, Chlamydomonas reinhardtii
MAGRGKGKTSGKKAVSRSAKAGLQFPVGRIARYLKKGKYAERIGAGAPVYLAAVLEYLTAEVLELAGNAARDNKKNRIVPRHIQLAIRNDEELGKLLGEVTIASGGVLPNIHAVLLPKKTKGGKGSEEAA

SEQ ID NO: 46015 - DNA, 420 bp, Pinus pinaster
  CDS (1)..(420)
atgtcaggtaaaggtgccaagggccttctaatgggcaagtcctcggcccctgtcaacaataacaacaacaaggacaaggacaagaagaagcctgtttctcgctcatcccgtgcaggtctccagtttccagtaggacgtatccaccgcctgctgaaatctcgtatatctgcgaatggcagagtgggagcaactgctgctgtatattctgcagctattttggagtatttgactgcagaggttttggagttggcaggaaatgcaagcaaagatctgaaggtcaagcgtatcacccctagacatttgcagcttgctattcgaggggatgaagagctcgataccctgatcaaaggtactatagctgtggggggggtggtatttcatattcacaagtcattgatcaataaatcttcaaaagattag

SEQ ID NO: 46016 - protein, 139 aa, Pinus pinaster
MSGKGAKGLLMGKSSAPVNNNNNKDKDKKKPVSRSSRAGLQFPVGRIHRLLKSRISANGRVGATAAVYSAAILEYLTAEVLELAGNASKDLKVKRITPRHLQLAIRGDEELDTLIKGTIAVGGVVFHIHKSLINKSSKD

SEQ ID NO: 46017 - DNA, 426 bp, Arabidopsis thaliana
  CDS (1)..(426)
atgtctggccgtggcaaaggtggaaaagccaagacgaagggaaagagtcgttccagtcgcgctggattgcagtttccagtgggaaggattcatcgtctcctacgtaaaggtaactatgctgagcgcgttggtgctggagctccagtctacctggctgcagttatggaataccttgctgctgaggtactcgagttggctggaaatgctgctcgcgacaacaagaaaactcgtatcattccacgacaccttcagctggccattcgtaatgacgaggaattgaacaagcttctgtccggtgtaactatcgctcagggtggtgttctgccaaacatacaagctgttcttctccccaagaagactagtgcacctgttacatcatccgcaccaaagtctggcaaaaagtccagtcaaagtcaggaatattag

SEQ ID NO: 46018 - protein, 141 aa, Arabidopsis thaliana
MSGRGKGGKAKTKGKSRSSRAGLQFPVGRIHRLLRKGNYAERVGAGAPVYLAAVMEYLAAEVLELAGNAARDNKKTRIIPRHLQLAIRNDEELNKLLSGVTIAQGGVLPNIQAVLLPKKTSAPVTSSAPKSGKKSSQSQEY

SEQ ID NO: 46019 - DNA, 447 bp, Nicotiana tabacum
  CDS (1)..(447)
atggaagcagcaaccaagacaaccaaaggtgccggaggaaggaaaggaggaggcccaagaaagaagtctgtaaccaaatcagtcaaagctggccttcagttcccagttggtcgtattgctcgtttcttgaagaagggtcgttatgctcagcgtgttggaagtggtgctccaatttacctcgctgctgttcttgaataccttgctgctgaggtgttggagttggctggaaatgcagcgagagataacaagaagagtaggattattcccaggcatgtgcttttggcagtgaggaatgatgaagagttggggaaattgcttagtggagttaccatcgcaagcggaggtgttcttcccaacattaacccagtcttgttgccaaagaaatctgctgcagctgaggagaaggcatctacacccaaggccaccaagtcgccaaagaaggcctag

SEQ ID NO: 46020 - protein, 148 aa, Nicotiana tabacum
MEAATKTTKGAGGRKGGGPRKKSVTKSVKAGLQFPVGRIARFLKKGRYAQRVGSGAPIYLAAVLEYLAAEVLELAGNAARDNKKSRIIPRHVLLAVRNDEELGKLLSGVTIASGGVLPNINPVLLPKKSAAAEEKASTPKATKSPKKA

SEQ ID NO: 46021 - DNA, 372 bp, Oikopleura dioica
  CDS (1)..(372)
atgtccggaaaaggaaaaggagcaaaggcgaaggcgaaggcaaagtcccgatccgtgcgagctggactccagttccccgtcggccgagttcatcgaatgcttcgcaagggcaactacgctgagcgagtcggagccggtgcccccgtctacctcgccgccgtactcgaatatctctccgctgaagtccttgaattggctggaaacgccgcccgagacaacaaaaagacccgaatcatcccacgacatctccagctcgccattagaaacgatgaagagttgaacaaactcctcggcggcgtcaccatcgcccagggtggtgttctacccaacatccaagccatccttcttccaaagaagactggagacaagtaa

SEQ ID NO: 46022 - protein, 123 aa, Oikopleura dioica
MSGKGKGAKAKAKAKSRSVRAGLQFPVGRVHRMLRKGNYAERVGAGAPVYLAAVLEYLSAEVLELAGNAARDNKKTRIIPRHLQLAIRNDEELNKLLGGVTIAQGGVLPNIQAILLPKKTGDK

SEQ ID NO: 46023 - DNA, 375 bp, Oikopleura dioica
  CDS (1)..(375)
atgtcaggaaaaggaaagaagaacgctaaagccaccaccaagaagtcccgatcaagccgggccggactccagttccccgttggacgagtccaccgaatgcttcgacgaggcaactgggccgaccgagttggtgctggtgcccccgtttacttggccgctgtccttgagtacctgactgctgaagtcgtcgagctggctggcaacgccgcccgagacaacaaaaagtcgcgaatcaacccacgacatctccagctcgccatccgaaacgatgaagagcttaccaagcttgttggaaaggtcaccatcgcccagggtggcgtcctccccaacatcaaccccgctcttctccccaagaaagccccaaagaaggagtaa

SEQ ID NO: 46024 - protein, 124 aa, Oikopleura dioica
MSGKGKKNAKATTKKSRSSRAGLQFPVGRVHRMLRRGNWADRVGAGAPVYLAAVLEYLTAEVVELAGNAARDNKKSRINPRHLQLAIRNDEELTKLVGKVTIAQGGVLPNINPALLPKKAPKKE

SEQ ID NO: 46025 - DNA, 381 bp, Oikopleura dioica
  CDS (1)..(381)
atgtccggaaaaggaaagaagaagaccgctacgaagacgaagcagactcgatcttcccgagctggtctccagttccccgtcggccgagtccatcgaatgcttcgacgaggcaactgggctgaccgagtcggtgcaggtgctcctgtttacatggccgccgtcctcgagtatttgactgctgaggtcgtcgaactcgctggcaacgccgcccgagacaacaagaagtcgcgaatcattccccgacatcttcagcttcagctagccatccgaaacgatgaagagctcagcaagctcctcggcggcgtcaccattgctcagggtggtgtcctccccaacatccaggctattcttctaccaaagaagaccgccaagaaggagtaa

SEQ ID NO: 46026 - protein, 126 aa, Oikopleura dioica
MSGKGKKKTATKTKQTRSSRAGLQFPVGRVHRMLRRGNWADRVGAGAPVYMAAVLEYLTAEVVELAGNAARDNKKSRIIPRHLQLQLAIRNDEELSKLLGGVTIAQGGVLPNIQAILLPKKTAKKE

SEQ ID NO: 46027 - DNA, 372 bp, Oikopleura dioica
  CDS (1)..(372)
atgtctggacgaaaatcgctgacaaagaaatccaccaaggcaggtaagaaaagccgatcttcgcgagctggactccagttccctgttggtcgagttcatcgcatgctgcgcaacggcaactgggcagaccgagtcggagccggtgctccggtctacctcgccgcagtgcttgagtacctgaccgctgaggtgtgcgagctcgccggaaacgctgcccgcgacaacaagaagacacgtatcacacctcgtcatatccagctcgccattggcaatgacgaggaactgcagaaaatgcttgctggagtcactgtctcccaaggcggcgtcattccttgcatcaacgccgcgctattgccaaacaagaagaactaa

SEQ ID NO: 46028 - protein, 123 aa, Oikopleura dioica
MSGRKSLTKKSTKAGKKSRSSRAGLQFPVGRVHRMLRNGNWADRVGAGAPVYLAAVLEYLTAEVCELAGNAARDNKKTRITPRHIQLAIGNDEELQKMLAGVTVSQGGVIPCINAALLPNKKN

SEQ ID NO: 46029 - DNA, 387 bp, Boltenia villosa
  CDS (1)..(387)
atggctggaggaaaagcaggcaaagactcaggaaaggctaaggccaaagcaatttcacgttcggcaagagctggtttacagttccctgttggacgtatccacaggcatttgaagagtaggtctacctcgcatggacgggttggtgctacagccgctgtgtatagcgctgccatcttggaatacctcactgcagaagtattggagttagctggcaatgctagcaaggatttgaaagtaaagagaatcaccccccggcatttgcaacttgcaatcagaggagatgaggagctggattctctcatcaaggctacaatagctggaggaggtgtcatcccacacatccacaaatctctcatcggaaagaagggccaacaaaaggcgccataa

SEQ ID NO: 46030 - protein, 128 aa, Boltenia villosa
MAGGKAGKDSGKAKAKAISRSARAGLQFPVGRIHRHLKSRSTSHGRVGATAAVYSAAILEYLTAEVLELAGNASKDLKVKRITPRHLQLAIRGDEELDSLIKATIAGGGVIPHIHKSLIGKKGQQKAP

SEQ ID NO: 46031 - DNA, 459 bp, Brassica napus
  CDS (1)..(459)
atggagtcgtcaccagcagcagcagcgaagccggcgagaggcgcaggaggaaggaaaggaggtgatcggaagaagagtgtttccaagtccgtcaaggctggtcttcagtttcccgtcggtcgtatctctcgttacttgaagaaaggtcgttacgcgatcaggtacggcgccggtgctcccgtctacctcgccgccgtcctcgagtacctcgccgccgaggttctggagcttgctgggaacgcagcgagggacaacaagaagaacaggataaacccgaggcatctctgcttggcgataaggaacgatgaagaattggggaagttgctccacggagtcaccatcgcgagcggtggagttcttcctaacatcaacccggttcttcttcccaagagatccgcatctcaaactgagaagcctgagaaagctgctaaagctgccaaatctcccaagaaggcttaa

SEQ ID NO: 46032 - protein, 152 aa, Brassica napus
MESSPAAAAKPARGAGGRKGGDRKKSVSKSVKAGLQFPVGRISRYLKKGRYAIRYGAGAPVYLAAVLEYLAAEVLELAGNAARDNKKNRINPRHLCLAIRNDEELGKLLHGVTIASGGVLPNINPVLLPKRSASQTEKPEKAAKAAKSPKKA

SEQ ID NO: 46033 - DNA, 372 bp, Asellus aquaticus
  CDS (1)..(372)
atgactggtcgcggtaaaggaggcaaagttaagggaaagtcaaagtctcgttcaagcagggcaggactccagttccccgttggcagaattcatcgtctattacgtaaaggcaactatgcagaaagagtcggagccggtgccccagtgtacctcgctgccgtcatggaatacctagctgctgaagttctcgaattagcaggtaatgctgctagagataacaagaaaacacgtatcattcccagacacttgcaactcgccatcaggaacgacgaggagttaaacaaacttctctccggagtaaccatcgctcaaggaggtgtcctgccaaacattcaggcagttctacttcccaagaagaccgagaagaagtaa

SEQ ID NO: 46034 - protein, 123 aa, Asellus aquaticus
MTGRGKGGKVKGKSKSRSSRAGLQFPVGRIHRLLRKGNYAERVGAGAPVYLAAVMEYLAAEVLELAGNAARDNKKTRIIPRHLQLAIRNDEELNKLLSGVTIAQGGVLPNIQAVLLPKKTEKK

SEQ ID NO: 46035 - DNA, 399 bp, Arabidopsis thaliana
  CDS (1)..(399)
atggcgggtcgtggtaaaacactcggatctgggtctgcgaagaaggcaacaacaagaagcagcaaagccggtctccaattccctgtgggtcgtatcgctcgtttcttgaagaaaggcaaatacgccgaacgtgttggtgccggagctccggtttacttagccgccgttctcgaatacctcgccgctgaggtattggaattggctggaaacgcagcgagggataacaagaagacgaggattgttccaaggcatattcaattggcggtgaggaacgatgaagaattgagcaaattgcttggagatgtgactattgctaatggaggtgtgatgcctaacattcacaatcttcttcttcctaagaagaccggtgcttccaagccatctgctgaagacgattga

SEQ ID NO: 46036 - protein, 132 aa, Arabidopsis thaliana
MAGRGKTLGSGSAKKATTRSSKAGLQFPVGRIARFLKKGKYAERVGAGAPVYLAAVLEYLAAEVLELAGNAARDNKKTRIVPRHIQLAVRNDEELSKLLGDVTIANGGVMPNIHNLLLPKKTGASKPSAEDD

SEQ ID NO: 46037 - DNA, 399 bp, Candida albicans
  CDS (1)..(399): transl_table=12
atgtcaggtggtaaaggtaaagcaggaacttccgaaaaagcttcaacttcaagatcagccaaagctggtttgactttcccagtcggtagagtccacagattgttaagaaaaggtaactacgctcagagaatcggttctggtgctccagtgtacttgacttcagtcttggaatatttagctgctgaaattttggaattagctggtaacgctgccagagacaacaagaaatccagaataatcccaagacacttacaattggccatcagaaatgatgaagaattaaacaaattgttgggtgatgtcaccatcgcccaaggtggtgtgttaccaaacatccatcaaaacttgttgccaaagaaatcaggtaaaggtggtgttaaggcttctcaagaattgtag

SEQ ID NO: 46038 - protein, 132 aa, Candida albicans
MSGGKGKAGTSEKASTSRSAKAGLTFPVGRVHRLLRKGNYAQRIGSGAPVYLTSVLEYLAAEILELAGNAARDNKKSRIIPRHLQLAIRNDEELNKLLGDVTIAQGGVLPNIHQNLLPKKSGKGGVKASQEL

SEQ ID NO: 46039 - DNA, 396 bp, Candida glabrata
  CDS (1)..(396)
atgtccggtggtaaaggtggtaaagctggttcagctgctaaggcttctcaaactagatctgctaaggctggtctaacattcccagtcggtagagttcacagacttttgagacgtggtaactacgctcaaagaattggttctggtgctccagtctacttgaccgctgttctagaatatctagctgctgaaatcttggaattggctggtaacgctgccagagacaacaagaagagcagaatcatcccaagacatttgcaattggccatcagaaacgatgacgaattgaacaagttgttgggtaacgtcaccatcgctcaaggtggtgtcttgccaaacattcaccaaaacttgttgccaaagaagtctgccaagccttctgcttctcaagaattataa

SEQ ID NO: 46040 - protein, 131 aa, Candida glabrata
MSGGKGGKAGSAAKASQTRSAKAGLTFPVGRVHRLLRRGNYAQRIGSGAPVYLTAVLEYLAAEILELAGNAARDNKKSRIIPRHLQLAIRNDDELNKLLGNVTIAQGGVLPNIHQNLLPKKSAKPSASQEL

SEQ ID NO: 46041 - DNA, 393 bp, Debaryomyces hansenii
  CDS (1)..(393)
atgtctggtggtaaaggtaaagccggttcttctgaaaaagcttcaacttcaagatccgctaaggctgggttaactttcccagtcggtagagttcatagattattaagaaaaggtaactacgctcaaagagttgggtctggtgctccagtttacttaacttctgttttagaatatttagcagctgaaattttagaattagctggtaacgctgctagagataacaagaaatctagaattatcccaagacatttacaattggctatcagaaatgatgaagaattgaacaagttattaggtcatgttacaattgcacaaggtggtgttttaccaaatattcatcaaaacttattaccaaaaaaatcagccaaaggtaaagcttctcaagaattataa

SEQ ID NO: 46042 - protein, 130 aa, Debaryomyces hansenii
MSGGKGKAGSSEKASTSRSAKAGLTFPVGRVHRLLRKGNYAQRVGSGAPVYLTSVLEYLAAEILELAGNAARDNKKSRIIPRHLQLAIRNDEELNKLLGHVTIAQGGVLPNIHQNLLPKKSAKGKASQEL

SEQ ID NO: 46043 - DNA, 447 bp, Medicago truncatula
  CDS (1)..(447)
atggacgcaagcaccaagacgaagaagggagctggtggaaggaaaggtggtccaaggaagaagtcagtgacaagatccaccagagctggtcttcaatttccagtcggaagaatcggtcgttacttgaagaaaggaagatacgctcagcgtgttggtactggtgctcctgtttacttagctgctgttcttgaatatcttgctgctgaggttcttgagttggctggaaatgcagcacgtgacaacaagaagaacaggatcatccctaggcacgtgttgttggctgtgaggaacgatgaagaacttggaaaattgttagctggtgttacaattgcacatggaggtgttcttccaaacatcaacccaatccttttgcctaagaagaacgagaaggctgcaactactaccaaatctccatccaaggctaccaaatctccaaagaaagcttag

SEQ ID NO: 46044 - protein, 148 aa, Medicago truncatula
MDASTKTKKGAGGRKGGPRKKSVTRSTRAGLQFPVGRIGRYLKKGRYAQRVGTGAPVYLAAVLEYLAAEVLELAGNAARDNKKNRIIPRHVLLAVRNDEELGKLLAGVTIAHGGVLPNINPILLPKKNEKAATTTKSPSKATKSPKKA

SEQ ID NO: 46045 - DNA, 609 bp, Pisum sativum
  CDS (52)..(504)
cttacaacatcagaaaacttttctgctagaatctagtcttcaaatctcgaaatggacgcaagcacaaagacaaagaagggagccggaggaaggaaaggaggaggaccaaggaagaagtccgtcaccagatccgtcagagctggtcttcaatttcccgtaggaagagtcggccgattcttgaagaaaggtagatacgctcagcgtgttggtactggtgctcctgtttacttggctgcagttctcgaatatcttgctgctgaggttcttgagttggctggaaatgcagcacgtgataacaagaagaatagaatcagtccaagacatttgttgttggcagtgaggaatgatgaagagcttggaaaattgcttgctggtgttaccattgcttatggtggtgttcttcccaatatcaacccagtgcttttgcctaagaggaaagaaaacgctgctgccagtactccaaagtctccatctaaggccaagaagtctcccaagaaggcttaaacttggttctaggtttagggaccttttaatatagccgaatgtttaatgctgtagtaattctatttggatcttcacaatgttatgtaagagttccgcacataaatc

SEQ ID NO: 46046 - protein, 150 aa, Pisum sativum
MDASTKTKKGAGGRKGGGPRKKSVTRSVRAGLQFPVGRVGRFLKKGRYAQRVGTGAPVYLAAVLEYLAAEVLELAGNAARDNKKNRISPRHLLLAVRNDEELGKLLAGVTIAYGGVLPNINPVLLPKRKENAAASTPKSPSKAKKSPKKA

SEQ ID NO: 46047 - DNA, 378 bp, Psammechinus miliaris
  CDS (1)..(378)
atgtctggacgtggcaaaggaaaggctaagggcactaagtcaaagacgcgttcatcccgcgcaggacttcagttcccagtcggtcgtgtgcaccgtttcttgaagaagggcaactacggatcccgtgtcggagctggtgccccagtgtacctcgcagccgtactcgagtacctcaccgctgagatcctcgagctcgccggcaacgccgcccgcgacaacaagaagagcaggatcatcccccgtcatcttcagttggctgtccgcaacgacgaggagctcaacaagcttctcggaggagtcaccatcgctcagggtggtgtcctccccaacatccaggctgtcctcctccccaagaagaccgccaaggcctccaaataa

SEQ ID NO: 46048 - protein, 125 aa, Psammechinus miliaris
MSGRGKGKAKGTKSKTRSSRAGLQFPVGRVHRFLKKGNYGSRVGAGAPVYLAAVLEYLTAEILELAGNAARDNKKSRIIPRHLQLAVRNDEELNKLLGGVTIAQGGVLPNIQAVLLPKKTAKASK

SEQ ID NO: 46049 - DNA, 399 bp, Schizosaccharomyces pombe
  CDS (1)..(399)
atgtctggaggtaaatctggtggtaaggctgctgttgccaaatctgctcaatcccgttctgccaaggccggtttggctttccccgttggtcgtgtccatcgtttgttacgtaagggtaactatgctcaacgtgttggtgctggtgctcccgtttacttggccgccgttttggaatatttggctgctgaaattctcgaattggctggaaacgctgctcgtgacaacaagaagactcgtatcattccccgtcatcttcaactcgccatccgtaacgatgaagagttgaacaaacttcttggtcacgttaccattgctcaaggtggtgttgttcccaacatcaacgcccatcttttgcccaaaacttctggtcgcactggaaagcctagtcaggagctgtaa

SEQ ID NO: 46050 - protein, 132 aa, Schizosaccharomyces pombe
MSGGKSGGKAAVAKSAQSRSAKAGLAFPVGRVHRLLRKGNYAQRVGAGAPVYLAAVLEYLAAEILELAGNAARDNKKTRIIPRHLQLAIRNDEELNKLLGHVTIAQGGVVPNINAHLLPKTSGRTGKPSQEL

SEQ ID NO: 46051 - DNA, 441 bp, Triticum aestivum
  CDS (1)..(441)
atggccggaaggaagggcggcgacaggaagaaggcggtgacccgctccgtgaaggccgggctccagttccccgtcggccgcatcgggcgctacctcaagaagggccgctacgcccagcgcgtcggctccggcgcccccgtctacctcgccgccgtcctcgagtacctcgccgccgaggtgctggagcttgccggcaacgcggccaaggacaacaagaagacccgcatcatcccgcgccacctgctgctcgctgtccgcaacgaccaggagctcggcaggctgctcgctggcgtcaccatcgcccacggtggcgtgatccccaacatcaactccgtgctgctccccaagaagtcccccgccgccgccgagaaggaggccaagtcgcccaagaagaagacctccaccaagtcccccaagaagaaggtcgccgccaaggagtag

SEQ ID NO: 46052 - protein, 146 aa, Triticum aestivum
MAGRKGGDRKKAVTRSVKAGLQFPVGRIGRYLKKGRYAQRVGSGAPVYLAAVLEYLAAEVLELAGNAAKDNKKTRIIPRHLLLAVRNDQELGRLLAGVTIAHGGVIPNINSVLLPKKSPAAAEKEAKSPKKKTSTKSPKKKVAAKE

SEQ ID NO: 46053 - DNA, 399 bp, Saccharomyces cerevisiae
  CDS (1)..(399)
atgtccggtggtaaaggtggtaaagctggttcagctgctaaagcttctcaatctagatctgctaaggctggtttgacattcccagtcggtagagtgcacagattgctaagaagaggtaactacgcccaaagaattggttctggtgctccagtctacttgactgctgtcttggaatatttggccgctgaaattttagaattagctggtaatgctgctagggataacaagaagaccagaattattccaagacatttgcaattggctatcagaaatgatgacgaattgaacaagctattgggtaacgttaccattgcccaaggtggtgttttgccaaacatccatcaaaacttgttgccaaagaagtctgccaaggctaccaaggcttctcaagaattataa

SEQ ID NO: 46054 - protein, 132 aa, Saccharomyces cerevisiae
MSGGKGGKAGSAAKASQSRSAKAGLTFPVGRVHRLLRRGNYAQRIGSGAPVYLTAVLEYLAAEILELAGNAARDNKKTRIIPRHLQLAIRNDDELNKLLGNVTIAQGGVLPNIHQNLLPKKSAKATKASQEL

SEQ ID NO: 46055 - DNA, 399 bp, Arabidopsis thaliana
  CDS (1)..(399)
atggcgggtcgcggcaaaactctcggatctggcgttgctaagaaatcaacatcgagaagcagcaaagccggtctccaattccccgttggtcgtatcgctcgttttctaaagaacggcaagtacgcaacacgtgttggtgccggagctccggtttacttagccgccgttctcgaatacctcgccgctgaggtattggaattggctggaaacgcagctagggataacaagaagactaggattgtgccacgtcacattcagctcgcggtgagaaacgatgaggagctgagtaaactgcttggagatgtgacgattgctaatggaggtgtgatgcctaacattcacagtcttcttcttcccaagaaagctggtgcttcaaaaccttccgctgatgaagattag

SEQ ID NO: 46056 - protein, 132 aa, Arabidopsis thaliana
MAGRGKTLGSGVAKKSTSRSSKAGLQFPVGRIARFLKNGKYATRVGAGAPVYLAAVLEYLAAEVLELAGNAARDNKKTRIVPRHIQLAVRNDEELSKLLGDVTIANGGVMPNIHSLLLPKKAGASKPSADED

SEQ ID NO: 46057 - DNA, 396 bp, Ashbya gossypii
  CDS (1)..(396)
atgtctggtaaaggaggtaaagctggttctgccgccaaggcttcgcagtcgagatcggctaaggccggtttgactttccctgtcggtagagtccacagattgctcagaaagggcaactacgcacagagaatcgggtcgggcgcgcctgtgtacctaaccgctgtgctagaatacttggccgccgaaatcctagagttggccggtaacgccgccagagacaacaagaagaccagaatcatcccaagacatctacagctagccatcagaaacgatgacgagctaaacaagctattgggcaatgttacgatcgcccaaggtggtgtgttgccaaacattcatgcaaacttgttgccaaagaagtctgccaaggccaccaaggcttctcaggagttgtga

SEQ ID NO: 46058 - protein, 131 aa, Ashbya gossypii
MSGKGGKAGSAAKASQSRSAKAGLTFPVGRVHRLLRKGNYAQRIGSGAPVYLTAVLEYLAAEILELAGNAARDNKKTRIIPRHLQLAIRNDDELNKLLGNVTIAQGGVLPNIHANLLPKKSAKATKASQEL

SEQ ID NO: 46059 - DNA, 396 bp, Candida albicans
  CDS (1)..(396): transl_table=12
atgtcaggtggtaaaggaaaagccggttcttcagaaaaagcttcaacttctagatcagctaaagctggtttgactttcccagtcggtagagtccatagattattaagaaaaggtaactatgctcaaagaattggttctggtgctccagtgtacttgacttcagttttggaatatttagctgctgaaatcttggaattggccggtaatgctgctagagataacaaaaaatccagaattatcccaagacatttacaattggccattagaaatgatgaagaattgaacaaattattgggtgatgttactattgctcaaggtggtgtcttaccaaacattcatcaatcattattaccagctaagaaagctaaagcaggtgccgcttctcaagaattgtaa

SEQ ID NO: 46060 - protein, 131 aa, Candida albicans
MSGGKGKAGSSEKASTSRSAKAGLTFPVGRVHRLLRKGNYAQRIGSGAPVYLTSVLEYLAAEILELAGNAARDNKKSRIIPRHLQLAIRNDEELNKLLGDVTIAQGGVLPNIHQSLLPAKKAKAGAASQEL

SEQ ID NO: 46061 - DNA, 396 bp, Debaryomyces hansenii
  CDS (1)..(396)
atgtcaggtggtaaaggtaaagccggttcttcggaaaaagcatcaacttctagatcagctaaggctggtttgactttcccagtcggtagagtccatagattattaagaaagggtaactacgcacaaagagttggttctggtgctccagtttacttgacctcagttttggaatatttagctgccgaaatcttggaattggccggtaacgctgctagagataacaagaagtcgagaattatcccaagacacttgcaattagccatcagaaatgatgaagaattgaacaagttattaggacacgttaccattgcccaaggtggtgtcttgccaaacattcaccaatccttgttgccagctaagaaggccaaggcaggtaatgcttctcaagaattataa

SEQ ID NO: 46062 - protein, 131 aa, Debaryomyces hansenii
MSGGKGKAGSSEKASTSRSAKAGLTFPVGRVHRLLRKGNYAQRVGSGAPVYLTSVLEYLAAEILELAGNAARDNKKSRIIPRHLQLAIRNDEELNKLLGHVTIAQGGVLPNIHQSLLPAKKAKAGNASQEL

SEQ ID NO: 46063 - DNA, 387 bp, Lilium longiflorum
  CDS (1)..(387)
atgatttcatcggcaaataacaaaggcgccggcacaagccgccgcaagctccgttctgagaaggctgcactccagttctccgtcagtcgcgtcgaatactccctcaagaaggggcgctattgcaggcgcttaggcgctacggcccccgtctacctagccgccgtccttgaaaacctcgtggccgaagtgttggagatggcggcgaacgtgacagagaaacataagaggattgttatcaaaccgaggcatattatgcttgccgtgaggaatgatgtagaagtgaacaagctgtttcacggtgtcaccatctcggcatcaggtgtcgtccctaaaacacgcaaagagctggaccgtcgcaaacgccgttccacctctcaggcggattag

SEQ ID NO: 46064 - protein, 128 aa, Lilium longiflorum
MISSANNKGAGTSRRKLRSEKAALQFSVSRVEYSLKKGRYCRRLGATAPVYLAAVLENLVAEVLEMAANVTEKHKRIVIKPRHIMLAVRNDVEVNKLFHGVTISASGVVPKTRKELDRRKRRSTSQAD

SEQ ID NO: 46065 - DNA, 462 bp, Medicago truncatula
  CDS (1)..(462)
atggacgcaagcaccaagacgaagaaaggagctggtggaaggaaaggtggaggaccaaggaagaagtctgtgaccagatccatcagagctggtcttcaatttccagttggaagaatcggtcggtacttgaagaaaggaagatacgctcagcgtgttggtactggtgctcctgtttacctcgccgctgttcttgaatatcttgctgctgaggttcttgaattggctggaaatgcggcacgtgataacaagaagaataggataattccaaggcacgtgttgttggcagtgaggaatgatgaagagctaggaaaattattagctggagttacaattgcacatggtggtgttcttccaaacatcaaccctgtgcttttgcctaagaagactgaaaggtctaacactgttagcaaggaaccgaagtctcccaagcctaaggctggaaaatctccaaagaaggcttag

SEQ ID NO: 46066 - protein, 153 aa, Medicago truncatula
MDASTKTKKGAGGRKGGGPRKKSVTRSIRAGLQFPVGRIGRYLKKGRYAQRVGTGAPVYLAAVLEYLAAEVLELAGNAARDNKKNRIIPRHVLLAVRNDEELGKLLAGVTIAHGGVLPNINPVLLPKKTERSNTVSKEPKSPKPKAGKSPKKA

SEQ ID NO: 46067 - DNA, 450 bp, Pisum sativum
  CDS (1)..(450)
atggacgcaagcacaaaggtgaagaagggagcaggaggaagaaaaggaggaggaccaaggaagaaggcggtgacaagatccgtcagagctggtcttcagtttcccgtcggaagaatcggccgtttcttgaagaaaggtagatatgcacaacgtgttggtactggtgctccagtttacctggctgctgttctagagtatcttgctgctgaggttcttgagttggctggaaatgctgcacgtgataacaagaagaataggattagtccaagacatttgttgttggctgtgaggaacgatgtagagcttggaaagttgcttgctggtgttactattgcttatggtggcgttcttcctaatatcaaccctgttcttttgcctaagaggactgaaagtgccgcgagtgctcccaagtccccttccaaggccaagaaaacacccaagaaagcttag

SEQ ID NO: 46068 - protein, 149 aa, Pisum sativum
MDASTKVKKGAGGRKGGGPRKKAVTRSVRAGLQFPVGRIGRFLKKGRYAQRVGTGAPVYLAAVLEYLAAEVLELAGNAARDNKKNRISPRHLLLAVRNDVELGKLLAGVTIAYGGVLPNINPVLLPKRTESAASAPKSPSKAKKTPKKA

SEQ ID NO: 46069 - DNA, 396 bp, Schizosaccharomyces pombe
  CDS (1)..(396)
atgtctggaggtaaatctggaggtaaggccgcagtcgccaagtctgctcaatctcgttccgctaaggctggtttggccttccctgtcggtcgtgttcatcgtttgttgcgtaagggtaattatgctcaacgtgttggtgctggtgctcccgtttacttggctgccgtcttggagtatttagctgccgaaatcctcgaattggccggtaatgctgctcgtgataacaagaagactcgtatcattccccgtcatcttcaattggctattcgcaatgacgaagaattgaacaaactacttggtcatgttactattgcccaaggtggtgttgtacctaatatcaacgctcatctcttgcccaaacaatctggtaagggcaagcctagccaagagctttaa

SEQ ID NO: 46070 - protein, 131 aa, Schizosaccharomyces pombe
MSGGKSGGKAAVAKSAQSRSAKAGLAFPVGRVHRLLRKGNYAQRVGAGAPVYLAAVLEYLAAEILELAGNAARDNKKTRIIPRHLQLAIRNDEELNKLLGHVTIAQGGVVPNINAHLLPKQSGKGKPSQEL

SEQ ID NO: 46071 - DNA, 399 bp, Saccharomyces cerevisiae
  CDS (1)..(399)
atgtccggtggtaaaggtggtaaagctggttcagctgctaaagcttctcaatctagatctgctaaagctggtttaacattcccagttggtagagtgcacagattgctaagaagaggtaactacgcccagagaattggttctggtgctccagtctatctgactgctgtcttagaatatttggctgctgaaattttagaattggctggtaatgctgctagagataacaaaaaaaccagaattattccaagacatttacaattggccatcagaaatgatgatgaattgaacaagctattgggtaatgttaccatcgcccaaggtggtgttttgccaaacattcaccaaaacttgttgccaaagaagtctgccaagactgccaaagcttctcaagaactgtaa

SEQ ID NO: 46072 - protein, 132 aa, Saccharomyces cerevisiae
MSGGKGGKAGSAAKASQSRSAKAGLTFPVGRVHRLLRRGNYAQRIGSGAPVYLTAVLEYLAAEILELAGNAARDNKKTRIIPRHLQLAIRNDDELNKLLGNVTIAQGGVLPNIHQNLLPKKSAKTAKASQEL

SEQ ID NO: 46073 - DNA, 396 bp, Arabidopsis thaliana
  CDS (1)..(396)
atggcgggtcggggaaaacaacttggatctggtgcagcgaagaagtctacttctcgtagtagcaaggctgggcttcaattccctgttggtcgtatcgctcgatttttgaaagccggtaagtacgccgagcgtgttggtgccggagctccggtctatctcgccgccgttcttgaatacctcgccgctgaggtacttgagcttgctgggaacgcagcgagagacaacaagaagacccgtatagttccacgacacattcagcttgctgtgaggaatgatgaggagctaagcaagttgcttggagatgtgacaattgctaatggaggagtgatgcctaacatccacaatctccttctccccaagaaggctggttcatctaagcctactgaagaagattag

SEQ ID NO: 46074 - protein, 131 aa, Arabidopsis thaliana
MAGRGKQLGSGAAKKSTSRSSKAGLQFPVGRIARFLKAGKYAERVGAGAPVYLAAVLEYLAAEVLELAGNAARDNKKTRIVPRHIQLAVRNDEELSKLLGDVTIANGGVMPNIHNLLLPKKAGSSKPTEED

SEQ ID NO: 46075 - DNA, 459 bp, Medicago truncatula
  CDS (1)..(459)
atggacgcaagcaccaagacaacaaagaaaggagccggtggaaggaagggaggaggtccaaggaagaagtcggtgacaagatccatcagagccggactccaattcccagtcggaagaatcggccgttacctgaagaaaggtcgatatgctcagcgtgtcggcaccggtgctccggtttacctagctgcagttcttgaatacctcgctgctgaggttcttgaattggcaggaaacgctgctcgtgataacaagaagaatagaatcattccaaggcatttgttgttggctgttaggaatgatgaagagcttggaaaactgcttgctggtgttacaattgctcatggtggtgttcttccgaacattaacccaattctgttgcctaagaagactgaaagggctaatactggtggcaaggagccaaagactactaaggctggaaagtctcctaagaaagcttag

SEQ ID NO: 46076 - protein, 152 aa, Medicago truncatula
MDASTKTTKKGAGGRKGGGPRKKSVTRSIRAGLQFPVGRIGRYLKKGRYAQRVGTGAPVYLAAVLEYLAAEVLELAGNAARDNKKNRIIPRHLLLAVRNDEELGKLLAGVTIAHGGVLPNINPILLPKKTERANTGGKEPKTTKAGKSPKKA

SEQ ID NO: 46077 - DNA, 381 bp, Psammechinus miliaris
  CDS (1)..(381)
atgtctggacgtggtaaaggcgctaaggctaagggaaaggcaaagagccgttcatcccgtgcaggacttcagttccccgtcggtcgtgtccaccgcttcctccgcaagggcaactatgccaaccgtgttggtgctggagccccagtctacttggctgccgttctcgaatacttggcagctgagatcctcgagttggcaggcaacgccgctcgcgacaacaagaagacccgtatcatcccccgtcacttgcagctcgccatcaggaacgacgaggagttgaacaagcttcttggaggagttaccatcgcccagggtggtgtcctcccaaacatccaggccgtccttctccccaagaagactggctcaaagtcctccaagtaa

SEQ ID NO: 46078 - protein, 126 aa, Psammechinus miliaris
MSGRGKGAKAKGKAKSRSSRAGLQFPVGRVHRFLRKGNYANRVGAGAPVYLAAVLEYLAAEILELAGNAARDNKKTRIIPRHLQLAIRNDEELNKLLGGVTIAQGGVLPNIQAVLLPKKTGSKSSK

SEQ ID NO: 46079 - DNA, 390 bp, Volvox carteri
  CDS (1)..(390)
atggctggccgtggcaagggtaagaccgctggcaagaaggccgtcagccgtagcgctaaggctggcctgcagttcccagtgggccgtattgcgcgctacctcaagaagggcaagtatgctgagcgtatcggtgctggtgctcccgtgtacctggctgctgtcctggagtacctcaccgctgaggttctggagctggccggaaacgctgctcgcgacaacaagaagaaccgcatcgtcccacgccatatccagttggccatccgcaatgacgaggagctgggcaagctgcttggcgatgtgaccatcgcgtccggcggtgtgttgccaaacatccatgccgtgttgctgcccaagaagtccaagggtggcaagggcgaggaggctgcctaa

SEQ ID NO: 46080 - protein, 129 aa, Volvox carteri
MAGRGKGKTAGKKAVSRSAKAGLQFPVGRIARYLKKGKYAERIGAGAPVYLAAVLEYLTAEVLELAGNAARDNKKNRIVPRHIQLAIRNDEELGKLLGDVTIASGGVLPNIHAVLLPKKSKGGKGEEAA

SEQ ID NO: 46081 - DNA, 462 bp, Arabidopsis thaliana
  CDS (1)..(462)
atggattccggaaccaaagtgaagaaaggagccgctggaagaagaagtggtggaggtcctaagaagaaaccggtttcccgttcggttaaatccggtctacagtttcctgtcggtaggatcggtcggtatcttaagaaaggtcgttattcgaagcgtgtcggaaccggagctccggtctatctcgccgccgtcctcgagtatcttgctgctgaggttctcgagcttgctggtaacgctgcaagagataacaaaaagaaccgtattataccacgccatgttctattagcggtgaggaacgacgaggagctagggacactactcaaaggcgtaaccattgcacacggcggtgttttaccaaacataaacccaatactcctcccaaagaagtctgagaaagcagcttcaactacaaaaacacccaaatcaccatcaaaggcaaccaaatcccctaagaaatcttag

SEQ ID NO: 46082 - protein, 153 aa, Arabidopsis thaliana
MDSGTKVKKGAAGRRSGGGPKKKPVSRSVKSGLQFPVGRIGRYLKKGRYSKRVGTGAPVYLAAVLEYLAAEVLELAGNAARDNKKNRIIPRHVLLAVRNDEELGTLLKGVTIAHGGVLPNINPILLPKKSEKAASTTKTPKSPSKATKSPKKS

SEQ ID NO: 46083 - DNA, 363 bp, Psammechinus miliaris
  CDS (1)..(363)
atgtctggacgtggtaagggcgctaaatccaagagcaaggccaagagccgctcatcccgtgcagggcttcagttccccgtcggccgtgtgcaccgtttcttgaggaagggcaactacgccaaccgtgtcggagctggtgccccagtgtacctcgcagccgtcctcgagtacctcaccgctgagatcctcgagctcgccggcaacgccgcccgcgacaacaagaagagcaggatcatcccccgccatcttcagctggctgtccgcaacgacgaggagctcaacaagcttctaggaggagtcaccatcgctcagggtggtgtcctccccaacatccaggctgtcctcctccccaagaagaagtaa

SEQ ID NO: 46084 - protein, 120 aa, Psammechinus miliaris
MSGRGKGAKSKSKAKSRSSRAGLQFPVGRVHRFLRKGNYANRVGAGAPVYLAAVLEYLTAEILELAGNAARDNKKSRIIPRHLQLAVRNDEELNKLLGGVTIAQGGVLPNIQAVLLPKKK

SEQ ID NO: 46085 - DNA, 390 bp, Volvox carteri
  CDS (1)..(390)
atggctggtcgtggcaagggcaagaccgctggcaagaaggccgtcagccgcagctccaaggctggtctgcagttccctgtgggccgcattgctcgttacttgaagaagggcaagtatgccgagcgcatcggtgctggcgcccccgtctacctggccgctgtgctggagtacctgactgctgaggttctggagctggctggcaacgcggcccgcgacaacaagaagaaccgcatcgtcccgcgccacatccagctcgccatccgcaacgacgaggagctgggcaagctgctgggcgacgtgaccattgcgtccggcggtgtgctgcccaacattcacgccgttctgctgcccaagaagtccaagggcggcaagggcgaggaggctgcctaa

SEQ ID NO: 46086 - protein, 129 aa, Volvox carteri
MAGRGKGKTAGKKAVSRSSKAGLQFPVGRIARYLKKGKYAERIGAGAPVYLAAVLEYLTAEVLELAGNAARDNKKNRIVPRHIQLAIRNDEELGKLLGDVTIASGGVLPNIHAVLLPKKSKGGKGEEAA

SEQ ID NO: 46087 - DNA, 408 bp, Triticum aestivum
  CDS (1)..(408)
atggccggtcgtgggaaggcaatcggcgccggcgcggccaagaaggcgacgtcccggagctccaaggctgggctgcagttccccgtgggaaggatcgccaggttcctcaaggccggcaagtacgccgagcgcgtcggagccggcgcccccgtctacctcgccgccgtccttgagtacctcgccgctgaggtcctggagctggccggaaacgccgccagggacaacaagaagacccgtatcgtgccgcgccacatccagctcgccgtgcgcaatgacgaggagctgaccaagttgctcggcggcgccaccatcgccagcggcggtgtgatgcccaacatccaccagcacctcctccccaagaaggcctcttcctccaaggtgtccaccgtcgatgacgacgacaactga

SEQ ID NO: 46088 - protein, 135 aa, Triticum aestivum
MAGRGKAIGAGAAKKATSRSSKAGLQFPVGRIARFLKAGKYAERVGAGAPVYLAAVLEYLAAEVLELAGNAARDNKKTRIVPRHIQLAVRNDEELTKLLGGATIASGGVMPNIHQHLLPKKASSSKVSTVDDDDN

SEQ ID NO: 46089 - DNA, 453 bp, Arabidopsis thaliana
  CDS (1)..(453)
atggagtcatcacaagcaacgacgaagccaacgagaggagcaggaggaaggaaaggtggagataggaagaagagtgttagtaaatctgttaaagctggtcttcaatttcccgttggtcgtatcgctcgttacttgaagaaaggtcggtacgctctccgatacggttccggtgctccggtttacctcgccgccgttctcgaatacctagccgccgaggtacttgagctagctgggaacgcagcgagagataataagaagaacaggataaaccctaggcatctatgtttagcgataaggaacgatgaggaattggggagattgcttcatggagttactattgctagtggtggtgttcttccaaacattaatccagttcttcttcctaagaaatcaacagcttcttcttctcaagcggagaaagcttctgctaccaaatctcctaagaaggcttga

SEQ ID NO: 46090 - protein, 150 aa, Arabidopsis thaliana
MESSQATTKPTRGAGGRKGGDRKKSVSKSVKAGLQFPVGRIARYLKKGRYALRYGSGAPVYLAAVLEYLAAEVLELAGNAARDNKKNRINPRHLCLAIRNDEELGRLLHGVTIASGGVLPNINPVLLPKKSTASSSQAEKASATKSPKKA

SEQ ID NO: 46091 - DNA, 438 bp, Triticum aestivum
  CDS (1)..(438)
atggccggaaggaagggcggcgacaggaagaaggcggtgacccgctccgtcaaggccgggctgcagttccccgtcggccgcatcgggcgctacctcaagaagggccgctacgcccagcgcgtcggctccggcgcccccgtctacctcgccgccgtcctcgagtacctcgccgccgaggtcctggagcttgccggcaacgcggccaaggacaacaagaagacgcgcatcatcccgcgccacctgctgctggccgtccgcaacgaccaggagctcggcaggctgctcgccggcgtcaccatcgcccacggcggcgtcatccccaacatcaactccgtgctgctccccaagaagtcccccgcagccgccgagaaggaggccaagtcgcagaaggccgccgccaagtcccccaagaagaagaccgcagccaccaaggagtag

SEQ ID NO: 46092 - protein, 145 aa, Triticum aestivum
MAGRKGGDRKKAVTRSVKAGLQFPVGRIGRYLKKGRYAQRVGSGAPVYLAAVLEYLAAEVLELAGNAAKDNKKTRIIPRHLLLAVRNDQELGRLLAGVTIAHGGVIPNINSVLLPKKSPAAAEKEAKSQKAAAKSPKKKTAATKE

SEQ ID NO: 46093 - DNA, 393 bp, Arabidopsis thaliana
  CDS (1)..(393)
atggctggtcgtggaaaaactcttggatccggtggggcgaagaaagctacatctcggagtagcaaagccggtcttcaattcccggtgggtcgtatcgctcgtttcttaaaagccggtaaatacgccgaacgtgttggtgccggtgctccggtttatctcgccgccgttctcgaatatttggccgccgaggttcttgaattagctggaaacgcagcaagagacaacaagaagacacgtattgttcctcgtcacattcagcttgcggtcagaaacgatgaggagctaagcaagcttcttggagatgtgacgattgctaatggaggagtgatgcctaacatccacaatctccttctccctaagaaggctggtgcttcaaagcctcaggaagattag

SEQ ID NO: 46094 - protein, 130 aa, Arabidopsis thaliana
MAGRGKTLGSGGAKKATSRSSKAGLQFPVGRIARFLKAGKYAERVGAGAPVYLAAVLEYLAAEVLELAGNAARDNKKTRIVPRHIQLAVRNDEELSKLLGDVTIANGGVMPNIHNLLLPKKAGASKPQED

SEQ ID NO: 46095 - DNA, 447 bp, Triticum aestivum
  CDS (1)..(447)
atggccggaaggaagggcggcgagaggaagaaggcggtgacccgctccgtgaaggccgggctccagttccccgtcggccgcatcgggcgctacctcaagaagggccgctacgcgcaggccgtcggctccggcgcccccgtctacctcgccgccgtcctcgagtacctcgccgccgaggtcctggagctcgccggcaacgcggccaaggacaacaagaagacgcgcatcatcccgcgccacctgctgctggccgtccgcaacgaccaggagctgggcaggctgctcgccggcgtcaccatcgcccacggcggcgtcatccccaacatcaactccgtgctgctccccaagaaggccgccggcgccgccgagaaggagtccaccaagtcgcccaagaagaaggccgccaccaagtcccccaagaagaagaccgcagccaccaaggagtag

SEQ ID NO: 46096 - protein, 148 aa, Triticum aestivum
MAGRKGGERKKAVTRSVKAGLQFPVGRIGRYLKKGRYAQAVGSGAPVYLAAVLEYLAAEVLELAGNAAKDNKKTRIIPRHLLLAVRNDQELGRLLAGVTIAHGGVIPNINSVLLPKKAAGAAEKESTKSPKKKAATKSPKKKTAATKE

SEQ ID NO: 46097 - DNA, 453 bp, Arabidopsis thaliana
  CDS (1)..(453)
atggaatccaccggaaaagtgaagaaagctttcggaggaagaaaaccacctggtgccccaaaaaccaaatcggtttcgaaatcgatgaaagccggtcttcaattcccagtgggaagaatcactcgtttcctgaagaaaggacgatacgctcagagacttggtggtggtgctccggtttacatggccgccgttcttgaatacctcgccgcagaagttctggagcttgctggtaacgctgcgagagataacaagaaatcaaggataattccgaggcatcttcttctcgcgataaggaacgatgaagaattggggaaacttctgagtggtgtcacaatcgctcacggtggtgttttgcctaacatcaactctgttctattgcctaagaagtctgccactaaaccagctgaagaaaaggctaccaaatcaccagtcaagtctccaaagaaagcttaa

SEQ ID NO: 46098 - protein, 150 aa, Arabidopsis thaliana
MESTGKVKKAFGGRKPPGAPKTKSVSKSMKAGLQFPVGRITRFLKKGRYAQRLGGGAPVYMAAVLEYLAAEVLELAGNAARDNKKSRIIPRHLLLAIRNDEELGKLLSGVTIAHGGVLPNINSVLLPKKSATKPAEEKATKSPVKSPKKA

SEQ ID NO: 46099 - DNA, 405 bp, Triticum aestivum
  CDS (1)..(405)
atggccggaaggggcaaggcgatcggctcgggcgccgccaagaaggccatctccaggagctccaaggccgggctccagttccccgtcggcaggatcgcgcggttcctcaaggccggcaagtacgccgagagggtcggcgccggcgcccccgtctacctcgccgccgtgctggagtatctcgccgctgaggttctggagttggccgggaacgcggcgagggacaacaagaagacccgcatcgtgccgcgccacatccagctcgccgtccgcaacgacgaggagctctcccgcctgctcggcatggtcacaatcgccagcggtggtgtcatgcccaacatccacaacctcctgctccccaagaaggccggtggcagcaaggccgtggctgccgacgacgatagctag

SEQ ID NO: 46100 - protein, 134 aa, Triticum aestivum
MAGRGKAIGSGAAKKAISRSSKAGLQFPVGRIARFLKAGKYAERVGAGAPVYLAAVLEYLAAEVLELAGNAARDNKKTRIVPRHIQLAVRNDEELSRLLGMVTIASGGVMPNIHNLLLPKKAGGSKAVAADDDS

SEQ ID NO: 46101 - DNA, 357 bp, Arabidopsis thaliana
  CDS (1)..(357)
atggtgtgcaacacgaatatactaaaagatgtgtcgacgaagataagtgcttttgaaaatgttcggatgattatggtggagggagagatgtttcaagtggctcgtattcacaagcaacttaagaacagagtttctgcacatagtagtgttggtgcgactgatgttgtctacatgacttcaatccttgaatacctaactacagaggttcttcagttggccgaaaacactagcaaagatttaaaagtgaagaggataactccaaggcatttgcagttggcgatcagaggagatgaagagcttgacacactcatcaaaggaacaattattggaggaagtgtgatccctcacatccactag

SEQ ID NO: 46102 - protein, 118 aa, Arabidopsis thaliana
MVCNTNILKDVSTKISAFENVRMIMVEGEMFQVARIHKQLKNRVSAHSSVGATDVVYMTSILEYLTTEVLQLAENTSKDLKVKRITPRHLQLAIRGDEELDTLIKGTIIGGSVIPHIH

SEQ ID NO: 46103 - DNA, 375 bp, Psammechinus miliaris
  CDS (1)..(375)
atgtctggcagaggaaagagtggaaaggcccgcaccaaggcaaagacgcgctcatcccgtgcagggctccagtttccagtgggacgtgttcatcggtttctccgaaagggcaactatgcaaagagggtcggcggtggagctcctgtctacatggctgccgtcctagagtacctcactgccgaaatcttggaactcgcaggcaacgctgcccgcgacaacaagaaatctaggatcatcccacgccaccttcaactcgctgtgcgtaatgatgaagaactcaacaagcttttgggtggggtgacgatcgctcaaggtggtgttctgcccaacatccaagccgtgctgcttcccaagaaaactgctaaatcaagctag

SEQ ID NO: 46104 - protein, 124 aa, Psammechinus miliaris
MSGRGKSGKARTKAKTRSSRAGLQFPVGRVHRFLRKGNYAKRVGGGAPVYMAAVLEYLTAEILELAGNAARDNKKSRIIPRHLQLAVRNDEELNKLLGGVTIAQGGVLPNIQAVLLPKKTAKSS

SEQ ID NO: 46105 - DNA, 381 bp, Strongylocentrotus purpuratus
  CDS (1)..(381)
atgtctggacgtggtaaaggagcaggaaaggcccgtgctaaggccaagagccgatctgcccgtgcaggacttcagttcccagtcggtcgtgtccatcgattccttcgcaaggggaactatgcccagcgtgtcggtgctggtgccccagtctacctagctgccgtgctcgagtacctagcagctgagatcctcgagctggctggcaacgccgcccgcgacaacaagaagacccgtatcatcccccgtcacttgcagctggctgtccgtaacgacgaggagttgaacaagctgctcagtggagtcaccatcgcccaaggtggtgtcctccccaacatccaggccgtacttctgcccaagaagacctccaaggcctccaagtaa

SEQ ID NO: 46106 - protein, 126 aa, Strongylocentrotus purpuratus
MSGRGKGAGKARAKAKSRSARAGLQFPVGRVHRFLRKGNYAQRVGAGAPVYLAAVLEYLAAEILELAGNAARDNKKTRIIPRHLQLAVRNDEELNKLLSGVTIAQGGVLPNIQAVLLPKKTSKASK

SEQ ID NO: 46107 - DNA, 378 bp, Chironomus thummi thummi
  CDS (1)..(378)
atgtcaggacgaggaaaaggcggtaaagttaaggcaaaggcaaagtcacgttcaagtcgtgctggtctacaattcccagttggacgtattcatcgtctcctccgtaaaggacattatgcagaacgtatcggtgctggagctccagtttatcttgctgctgttatggaatatttgggcgctgaaattctcgaattggctggtaatgctgcacgtgacaacaaaaagacaagaatcattccaagacatttacaattggcaatcagaaatgacgaggaactgaacaaattattgtcgggtgtgacaatcgctcaaggtggtgtcttgccaaacattcaagctgtattgctgccaaagaagactgaatcgaagaaagcttaa

SEQ ID NO: 46108 - protein, 125 aa, Chironomus thummi thummi
MSGRGKGGKVKAKAKSRSSRAGLQFPVGRIHRLLRKGHYAERIGAGAPVYLAAVMEYLGAEILELAGNAARDNKKTRIIPRHLQLAIRNDEELNKLLSGVTIAQGGVLPNIQAVLLPKKTESKKA

SEQ ID NO: 46109 - DNA, 411 bp, Arabidopsis thaliana
  CDS (1)..(411)
atggcaggcaaaggtggaaaaggactcgtagctgcgaagacgatggctgctaacaaggacaaagacaaggacaagaagaaacccatctctcgctctgctcgtgctggtattcagtttccagttggacgaattcacaggcaactgaagacccgagtctcggcacatggcagagttggtgccactgcagccgtctacacagcttcaatcctggagtatctgacagcagaggttcttgagttggctgggaatgcgagcaaggatctcaaagtgaagaggataacgccaaggcatctgcagttggcgattagaggagatgaggagctggacacactcatcaagggaacgattgctggaggtggtgtgatccctcacatccacaagtctctcatcaacaaaaccaccaaggagtga

SEQ ID NO: 46110 - protein, 136 aa, Arabidopsis thaliana
MAGKGGKGLVAAKTMAANKDKDKDKKKPISRSARAGIQFPVGRIHRQLKTRVSAHGRVGATAAVYTASILEYLTAEVLELAGNASKDLKVKRITPRHLQLAIRGDEELDTLIKGTIAGGGVIPHIHKSLINKTTKE

SEQ ID NO: 46111 - DNA, 411 bp, Arabidopsis thaliana
  CDS (1)..(411)
atggctggtaaaggtgggaaagggcttctagctgcgaagacgacggcagcagctgcaaacaaagacagtgttaagaagaaatccatctctcgctcttctcgtgctggtattcagtttccagtgggtcgtattcatcgtcaactcaagcaaagagtttcagcacatggaagagttggtgccactgctgctgtttacactgcatcaattctagaatacttgactgctgaagtactcgagttagctggaaatgcgagcaaggatctcaaagtgaagagaattacaccaagacatttgcagcttgcaatcagaggagatgaggaacttgacactctcatcaaaggaaccattgcaggaggaggtgtgatccctcacatccacaagtcccttgtcaacaaagtcaccaaggattga

SEQ ID NO: 46112 - protein, 136 aa, Arabidopsis thaliana
MAGKGGKGLLAAKTTAAAANKDSVKKKSISRSSRAGIQFPVGRIHRQLKQRVSAHGRVGATAAVYTASILEYLTAEVLELAGNASKDLKVKRITPRHLQLAIRGDEELDTLIKGTIAGGGVIPHIHKSLVNKVTKD

SEQ ID NO: 46113 - DNA, 405 bp, Arabidopsis thaliana
  CDS (1)..(405)
atgtcggggaaaggtgctaaaggtttgattatggggaaacccagcggtagcgacaaggataaggacaagaagaagcctatcactcgttcttctcgagctggtctccagttcccagttggtagggtgcatcgtctgttaaagacaaggtccactgctcatggaagggttggagcaactgcagctgtttacacagcagcaatattggagtatctgactgcagaagttttggagttggctggtaacgccagcaaggacttgaaggtgaaacgtatctcgccgaggcatttgcagcttgcgattcgtggagatgaggagctcgatactctcatcaaaggaactatagctggtggtggagtcatccctcatatccacaagagtctcatcaacaaatccgccaaggaatag

SEQ ID NO: 46114 - protein, 134 aa, Arabidopsis thaliana
MSGKGAKGLIMGKPSGSDKDKDKKKPITRSSRAGLQFPVGRVHRLLKTRSTAHGRVGATAAVYTAAILEYLTAEVLELAGNASKDLKVKRISPRHLQLAIRGDEELDTLIKGTIAGGGVIPHIHKSLINKSAKE

SEQ ID NO: 46115 - DNA, 426 bp, Drosophila melanogaster
  CDS (1)..(426)
atggctggcggtaaagcaggcaaggattcgggcaaggccaaggcgaaggcggtatcgcgttccgcgcgcgcgggtcttcagttccccgtgggtcgcatccatcgtcatctcaagagccgcactacgtcacatggacgcgtcggagccactgcagccgtgtactccgctgccatattggaatacctgaccgccgaggtcctggagttggcaggcaacgcatcgaaggacttgaaagtgaaacgtatcactcctcgccacttacagctcgccattcgcggagacgaggagctggacagcctgatcaaggcaaccatcgctggtggcggtgtcattccgcacatacacaagtcgctgatcggcaagaaggaggaaacggtgcaggatccgcagcggaagggcaacgtcattctgtcgcaggcctactaa

SEQ ID NO: 46116 - protein, 141 aa, Drosophila melanogaster
MAGGKAGKDSGKAKAKAVSRSARAGLQFPVGRIHRHLKSRTTSHGRVGATAAVYSAAILEYLTAEVLELAGNASKDLKVKRITPRHLQLAIRGDEELDSLIKATIAGGGVIPHIHKSLIGKKEETVQDPQRKGNVILSQAY

SEQ ID NO: 46117 - DNA, 429 bp, Arabidopsis thaliana
  CDS (1)..(429)
atgagtacaggcgcaggaagcggaacaaccaaaggtggcagaggaaagccaaaggccaccaaatccgtctctcgatcatctaaagccggtcttcaattccccgtcggaagaatcgctagattcctcaaatccggtaaatacgccgagcgtgtcggtgccggagctccggtctatctctccgctgttctcgagtacctcgccgccgaggtgttggagctggcgggaaacgcagcaagggataacaagaagacacgtatagtaccaagacacattcagcttgcagtgaggaacgatgaagagttaagcaaacttctgggaagtgtgacgattgcgaatggaggagttttgccaaatattcatcagactcttttgccatccaaggttggcaagaacaaaggagatattggatctgcttctcaggagttctga

SEQ ID NO: 46118 - protein, 142 aa, Arabidopsis thaliana
MSTGAGSGTTKGGRGKPKATKSVSRSSKAGLQFPVGRIARFLKSGKYAERVGAGAPVYLSAVLEYLAAEVLELAGNAARDNKKTRIVPRHIQLAVRNDEELSKLLGSVTIANGGVLPNIHQTLLPSKVGKNKGDIGSASQEF

SEQ ID NO: 46119 - DNA, 420 bp, Cicer arietinum
  CDS (1)..(420)
atgagttccactgctacaaccaagggaggaagaggcaagccaaaggcctccaaatctgtttcaagatcttcaaaggccggtcttcaatttcccgttggaagaatcgctagattcctaaaggccggaaaatacgccgaacgtgtcggtgccggtgctcctgtttacctctccgccgttctcgagtatctcgctgctgaggttttggaattggctggaaacgctgccagagacaacaagaacaaccgtattgttccaaggcacattcaactcgctgtgaggaatgatgaggaactcagcaagcttttgggatctgtaaccattgctaatggaggtgttttgcctaatattcatcagactttgcttcccaagaaggttggaaagggaaagggtgaaattggatctgcttctcaagaattttag

SEQ ID NO: 46120 - protein, 139 aa, Cicer arietinum
MSSTATTKGGRGKPKASKSVSRSSKAGLQFPVGRIARFLKAGKYAERVGAGAPVYLSAVLEYLAAEVLELAGNAARDNKNNRIVPRHIQLAVRNDEELSKLLGSVTIANGGVLPNIHQTLLPKKVGKGKGEIGSASQEF

SEQ ID NO: 46121 - DNA, 417 bp, Picea abies
  CDS (1)..(417)
atgagttcttctggtgcaaagggcggtcgtgggaaggccaagtctacaaagtccgtgtccaggtcgcagaaggccggcttgcagtttccggtggggaggattgctaggtttcttaaggccggaaagtatgcagagcgtgtcggtgctggtgctccggtgtacctagctgctgttcttgaatatcttgctgccgaggttttggaactcgctggtaatgctgctcgggacaacaagaagaatcgtatagtccctaggcatattcagcttgctgttcggaatgacgaggaactgagcaagttgcttggtgctgtgactattgctaatggaggagttctccctaacattcaccaggttcttttgcccaagaaatctggaaaagataagggagagattggatctgcttctcaagagttctga

SEQ ID NO: 46122 - protein, 138 aa, Picea abies
MSSSGAKGGRGKAKSTKSVSRSQKAGLQFPVGRIARFLKAGKYAERVGAGAPVYLAAVLEYLAAEVLELAGNAARDNKKNRIVPRHIQLAVRNDEELSKLLGAVTIANGGVLPNIHQVLLPKKSGKDKGEIGSASQEF

SEQ ID NO: 46123 - DNA, 402 bp, Ashbya gossypii
  CDS (1)..(402)
atgtcagggaaggttcacggtggcaagggtaagtccggcgcgaaagacggaggcccccttgggtcgcaatcgcattctgcgcgcgcaggtctgcagtttcccgttggtagaattaagcggtacttgaagaaaaacgccgcaggtaagacgcgggtcgggtccaaggccgctatatatctcacagccgtgttggagtatctgacagccgaggtgctggagctggcgggaaacgccgcaaaggatctgaaggtcaaacgtatcacgccgcgccatctgcagctggccatccgcggcgatgacgaactggactcgctgatcagggcgacaattgcgtccggcggtgtgcttccgcacataaacaaggcattgttgttgaaagtggagaagaagacccacaaatga

SEQ ID NO: 46124 - protein, 133 aa, Ashbya gossypii
MSGKVHGGKGKSGAKDGGPLGSQSHSARAGLQFPVGRIKRYLKKNAAGKTRVGSKAAIYLTAVLEYLTAEVLELAGNAAKDLKVKRITPRHLQLAIRGDDELDSLIRATIASGGVLPHINKALLLKVEKKTHK

SEQ ID NO: 46125 - DNA, 417 bp, Aspergillus fumigatus
  CDS (1)..(417)
atgcccggcggaaagggaaagtctgttggcggaaaggctggtgcgaaggatgctgcggggaaaacccagaagtctcacagcgcaaaggcgggtttgcagtttccctgtggtcgtgtcaagcgtttcttgaagaacaacactcaaaataagatgcgagttggcgctaaagctgcggtctatgtcacggctgttctggaatatctaactgcggaagtcctcgaacttgccggtaacgccgccaaggatctgaaagtcaagcgtatcacgccccgccacctgcagctcgccattcgtggtgacgaggagctggatactttgatccgcgccaccattgctttcggtggtgtcttgccacgtatcaaccgtgcgctgctgctcaaggtcgagcagaagaaaaagaacaagtccgatgcttaa

SEQ ID NO: 46126 - protein, 138 aa, Aspergillus fumigatus
MPGGKGKSVGGKAGAKDAAGKTQKSHSAKAGLQFPCGRVKRFLKNNTQNKMRVGAKAAVYVTAVLEYLTAEVLELAGNAAKDLKVKRITPRHLQLAIRGDEELDTLIRATIAFGGVLPRINRALLLKVEQKKKNKSDA

SEQ ID NO: 46127 - DNA, 402 bp, Candida albicans
  CDS (1)..(402): transl_table=12
atgtctgggaagggaaaagtgcatggaggaaaaggaaaatcctcggaaattgccaaatcgtctacatcacattcagctagagcaggattacaattcccggtaggaagagttaagagatatttgaaaagaaatgctcaaaacaaaattcgtgttggatccaaggctgccatttatttaactgctgttttggaatatttgacagcagaagtattggaattggctggtaatgcagctaaggacttgaaagtcaaaagaatcacaccaagacatttgcaattggcaatcagaggagatgaagaattggacaatttgattaaagctaccattgcttatggtggggtgttgcctcatattaataaagccttattattaaaagttgaaaagaagaagggtcaaaaataa

SEQ ID NO: 46128 - protein, 133 aa, Candida albicans
MSGKGKVHGGKGKSSEIAKSSTSHSARAGLQFPVGRVKRYLKRNAQNKIRVGSKAAIYLTAVLEYLTAEVLELAGNAAKDLKVKRITPRHLQLAIRGDEELDNLIKATIAYGGVLPHINKALLLKVEKKKGQK

SEQ ID NO: 46129 - DNA, 417 bp, Cryptococcus neoformans
  CDS (1)..(417)
atgtcttctaaagttggtggcggtaaaggtggaaagtccaagacttcctcagaagccaaggttttgaccaccaggtcatccaaagctgggctacagtttcctgtgggccgtatccaccgattcttgagaaacaagaacgccaataacgttcgtattggcgctaaggcagctgtttatgtggcatccatcatggaatacctgactgccgaggttcttgagctcgccggtaacgctgccaaagacctccgcgtgaaacgtattactcctcgacacctgcaacttgccatccgtggagacgaagagcttgatctacttattcgagctaccattgcaggtggtggtgttttgccgcatatccataagtctcttgtcgcgaagaacgcccccctcaagaagccgaaggctctcgatgcttag

SEQ ID NO: 46130 - protein, 138 aa, Cryptococcus neoformans
MSSKVGGGKGGKSKTSSEAKVLTTRSSKAGLQFPVGRIHRFLRNKNANNVRIGAKAAVYVASIMEYLTAEVLELAGNAAKDLRVKRITPRHLQLAIRGDEELDLLIRATIAGGGVLPHIHKSLVAKNAPLKKPKALDA

SEQ ID NO: 46131 - DNA, 399 bp, Debaryomyces hansenii
  CDS (1)..(399)
atgtcaggtaaagggaaagtacacggcggtaaaggtaaatcgtccgaaacagccaagtcaaccacgtcgcattctgctagagcaggattgcaattcccagtgggtagaattaagagatacttgaagagaactgcgcaaaacaaaatcagagttggatctaagtccgccatctacttaacggccgtgttggaatatttgaccgctgaagtgttggaattggctggtaacgcggccaaggacttgaaggtaaagagaatcaccccaagacacttgcaattggccatcagaggagatgaagaattggataacttgatcaaggccaccattgcgttcgggggtgtattgccacatatcaacaaagccttgttattgaaggttgaaaagaagaagcaaaaataa

SEQ ID NO: 46132 - protein, 132 aa, Debaryomyces hansenii
MSGKGKVHGGKGKSSETAKSTTSHSARAGLQFPVGRIKRYLKRTAQNKIRVGSKSAIYLTAVLEYLTAEVLELAGNAAKDLKVKRITPRHLQLAIRGDEELDNLIKATIAFGGVLPHINKALLLKVEKKKQK

SEQ ID NO: 46133 - DNA, 411 bp, Emericella nidulans
  CDS (1)..(411)
atgcctggcggaaagggaaagtctatcggtggaaaggcaggctccaaggactctgcggggaaggctcaaaagtcccacagcgcgaaagccggtttgcagttcccatgcggtcgtgttaagcgtttcctcaagaacaatacgcaaaacaaaatgcgtgttggcgcgaaagccgctgtctacgtcactgcagtccttgaatacttaaccgctgaagtgctggaacttgccggaaatgctgccaaggacctcaaagtcaagcgtatcacgccgcgtcacctacagcttgccatccgtggagacgaagagctcgacacgcttattcgtgcaaccattgcttttggtggtgttctgccacgcatcaaccgcgccctgctgcttaaggtggaacagaagaagaagaaggacgcataa

SEQ ID NO: 46134 - protein, 136 aa, Emericella nidulans
MPGGKGKSIGGKAGSKDSAGKAQKSHSAKAGLQFPCGRVKRFLKNNTQNKMRVGAKAAVYVTAVLEYLTAEVLELAGNAAKDLKVKRITPRHLQLAIRGDEELDTLIRATIAFGGVLPRINRALLLKVEQKKKKDA

SEQ ID NO: 46135 - DNA, 435 bp, Gibberella zeae
  CDS (1)..(435)
atgcctggtggaaagggaaaatcttctggcggaaagagctccggcggcaagacgagcggtactgagggcgccaacaagaagcagcagagtcactctgctcgtgctggtcttcagttcccttgcggtcgtgtcaaacgtttcctcaagcagaacacccagcaaaagatgcgtgtaggagccaaggctgctgtctacgtcactgccgtactcgagtacctgactgctgaagttctggagttggcaggcaacgctgccaaggacctcaaggtcaagcgtatcacaccccgccaccttcagcttgccattcgtggtgatgaggagctcgacactctgattcgtgcgacaatcgcctacggtggtgtgttgccacacatcaaccgcgctctactgctcaaggttgagcagaagaagaaggccaaggcgctcgagggttaa

SEQ ID NO: 46136 - protein, 144 aa, Gibberella zeae
MPGGKGKSSGGKSSGGKTSGTEGANKKQQSHSARAGLQFPCGRVKRFLKQNTQQKMRVGAKAAVYVTAVLEYLTAEVLELAGNAAKDLKVKRITPRHLQLAIRGDEELDTLIRATIAYGGVLPHINRALLLKVEQKKKAKALEG

SEQ ID NO: 46137 - DNA, 399 bp, Kluyveromyces lactis
  CDS (1)..(399)
atgtcaggaaaagtacacggtggaaagggtaagtcgggagccaaagacagtggttcattgaaatcacaatcacattctgctagagctggtcttcagtttccggttgggagagtgaagcgttatttgaagagaaatgctgctggaagaacccgtgttgggtccaaggctgctatttacttgactgctgttcttgagtatttgactgctgaagttttggaattggctggtaacgctgctaaagatttgaaggtgaagagaattaccccaagacatttacaacttgctatcagaggtgatgatgaattagactccttgatcagagccactatcgcttctggtggtgttctacctcatatcaacaaggctttgttgttgaaagtggaaaagaagcataaatga

SEQ ID NO: 46138 - protein, 132 aa, Kluyveromyces lactis
MSGKVHGGKGKSGAKDSGSLKSQSHSARAGLQFPVGRVKRYLKRNAAGRTRVGSKAAIYLTAVLEYLTAEVLELAGNAAKDLKVKRITPRHLQLAIRGDDELDSLIRATIASGGVLPHINKALLLKVEKKHK

SEQ ID NO: 46139 - DNA, 432 bp, Neurospora crassa
  CDS (1)..(432)
atggctggcggaaagggcaagtcgtctggcggcaagagctcgggtggaaagacctcgggcgtcgaaggtcccaagaagcagcagagccattctgctcgcgctggtcttcagttcccttgcggtcgtgtcaagcgtttcctgaagcagaacacccaaaacaagatgcgcgttggcgccaaggctgccgtctatgttactgccgtgctggaatatttgactgctgaagtcctcgaacttgcgggtaacgctgccaaggacctgaaggtcaagcgtattactccccgccatcttcagcttgccatccgtggagatgaggagcttgataccctcatccgcgccactatcgccttcggtggtgtcctcccccacattaaccgcgcccttctgctcaaggtagagcagaagaagaaggccaaggctcaggaggcttaa

SEQ ID NO: 46140 - protein, 143 aa, Neurospora crassa
MAGGKGKSSGGKSSGGKTSGVEGPKKQQSHSARAGLQFPCGRVKRFLKQNTQNKMRVGAKAAVYVTAVLEYLTAEVLELAGNAAKDLKVKRITPRHLQLAIRGDEELDTLIRATIAFGGVLPHINRALLLKVEQKKKAKAQEA

SEQ ID NO: 46141 - DNA, 516 bp, Schizosaccharomyces pombe
  CDS (1)..(516)
atgatattaagacacgcacctcgcgttcacgaatctgccttctccctaacacacaaaacattcgctttttgcaattgcaataatcgattcaaaatgatgtctggaggcggtaaaggtaaacatgttggaggtaagggaggttctaaaatcggcgaacgcggtcaaatgtcgcattcagctcgcgctggtttacaatttcctgttggacgtgttcgacgctttttaaaggcaaaaactcaaaataatatgcgcgtcggtgcaaaaagtgctgtatatagtgctgcagtccttgaatatttgaccgctgaagtcttggaacttgcgggaaacgcggcaaaagatttgaaggtcaaacgtatcacacctagacatcttcaacttgctattcgaggtgatgaggagttggacactttaattcgtgctacaattgcgggcggtggtgtattgcctcatatcaataaacagctcttgattcgtacaaaggaaaaatatcccgaggaggaagaaattatttaa

SEQ ID NO: 46142 - protein, 171 aa, Schizosaccharomyces pombe
MILRHAPRVHESAFSLTHKTFAFCNCNNRFKMMSGGGKGKHVGGKGGSKIGERGQMSHSARAGLQFPVGRVRRFLKAKTQNNMRVGAKSAVYSAAVLEYLTAEVLELAGNAAKDLKVKRITPRHLQLAIRGDEELDTLIRATIAGGGVLPHINKQLLIRTKEKYPEEEEII

SEQ ID NO: 46143 - DNA, 408 bp, Ustilago maydis
  CDS (1)..(408)
atgtccgacccgcgagctaagggaggcaaaggcggcgctgccaacgccaagaacgagcccaagaagcagaccacccagtctgctcgtgcaggtcttcagttccctgtcggacgtatccaccgtcacttgaagagccgcactcagaaccatgtccgcatcggtgccaaggccgccgtctacacatcggccatcttggagtacctcaccgccgaggtgcttgagttggcgggcaatgcctccaaggatatgcgtttgaagcgcatcacaccacgacacttgcagcttgcgattcgaggcgacgaagagctcgacagcatggttcgcgccaccatcgccggaggtggtgtgcttccacacatccacaagacgctcatcaaggcgccaagcaagaagaaggccttggaataa

SEQ ID NO: 46144 - protein, 135 aa, Ustilago maydis
MSDPRAKGGKGGAANAKNEPKKQTTQSARAGLQFPVGRIHRHLKSRTQNHVRIGAKAAVYTSAILEYLTAEVLELAGNASKDMRLKRITPRHLQLAIRGDEELDSMVRATIAGGGVLPHIHKTLIKAPSKKKALE

SEQ ID NO: 46145 - DNA, 423 bp, Yarrowia lipolytica
  CDS (1)..(423)
atgtctggcggaaaaggaaaaggcggcaagggcaagggcggcaagggaaagggcggaaaggcatcagccgctgtcgagggcgcccagcagtcacattcgagccgagcaggcctgcaattccccgtgggccgtatcaagcgatacatgaagaagagcgtacagaacaaggtgcgtgtgggagccaaggcggccatctacattgcggcggtgctggagtatctgactgctgaggttctggagttggcgggtaacgctgcacgtgatctcaaggtcaagcgaatcactcctcgacacttgcagcttgccattcgaggagacgaggagctggacaccctcatccaggccaccattgcctatggaggagtcatgccccacattaacaaggctctgctgctcaaggtggagcagcacaagaagaagtaa

SEQ ID NO: 46146 - protein, 140 aa, Yarrowia lipolytica
MSGGKGKGGKGKGGKGKGGKASAAVEGAQQSHSSRAGLQFPVGRIKRYMKKSVQNKVRVGAKAAIYIAAVLEYLTAEVLELAGNAARDLKVKRITPRHLQLAIRGDEELDTLIQATIAYGGVMPHINKALLLKVEQHKKK

SEQ ID NO: 46147 - DNA, 405 bp, Saccharomyces cerevisiae
  CDS (1)..(405)
atgtcaggaaaagctcatggaggtaaaggtaaatccggcgctaaagacagtggttcattgagatctcaatcttcttcagcaagggctggcttgcagtttcctgtcggtaggattaagcgttacctgaaaaggcacgctaccggccgaacaagagtaggatccaaagctgccatttatttgactgctgtgttggaatatttgactgctgaagtgctggagttggctggtaatgcagccaaggatcttaaagtcaagaggattaccccaagacatctgcaattggccattagaggtgacgatgagttagattctttgatcagggctacaattgcttcaggtggtgttttgcctcatataaataaagcattattattgaaagtggaaaaaaagggaagtaagaaataa

SEQ ID NO: 46148 - protein, 134 aa, Saccharomyces cerevisiae
MSGKAHGGKGKSGAKDSGSLRSQSSSARAGLQFPVGRIKRYLKRHATGRTRVGSKAAIYLTAVLEYLTAEVLELAGNAAKDLKVKRITPRHLQLAIRGDDELDSLIRATIASGGVLPHINKALLLKVEKKGSKK

SEQ ID NO: 46149 - DNA, 420 bp, Agaricus bisporus
  CDS (1)..(420)
atgtctggcaaagggaaagcaggaaaatccggaggcaaggctggctccgagaccaagtcgatgtcgagatcgtccaaggcgggtctgcaattccccgtcggccgtgtccaccgtctcttgaagaagggaaactacgcacaacgtgttggtgctggtgcacctgtttatatggctgcagtccttgaatatcttgctgcagaaattctagaacttgccggtaatgcggctcgtgacaacaaaaagcagcgtatcgtgccgcgacacttgcagctcgccatcaggaacgacgaagaactccacaaactgctagggaatgttgtgatctcacaaggaggtgtcgttcctcacattgcccctgaactgttgccttccaagtcgtcaaaaggcaagaaggacgagggtgtcagccaggagctttag

SEQ ID NO: 46150 - protein, 139 aa, Agaricus bisporus
MSGKGKAGKSGGKAGSETKSMSRSSKAGLQFPVGRVHRLLKKGNYAQRVGAGAPVYMAAVLEYLAAEILELAGNAARDNKKQRIVPRHLQLAIRNDEELHKLLGNVVISQGGVVPHIAPELLPSKSSKGKKDEGVSQEL

SEQ ID NO: 46151 - DNA, 405 bp, Aspergillus niger
  CDS (1)..(405)
atgactggaggcaaatctggaggcaaggccagcggcagcaagaacgcccaatcccgttcgtccaaggccggtctcgcctttcccgttggacgtgttcatcgtctcctccgcaagggcaactacgctcagcgtgttggtgccggtgctcccgtttacctcgctgccgttcttgagtatctcgccgccgaaattcttgaattggctggcaacgctgctcgcgataacaagaagacccgtatcattccccgtcaccttcagctcgccatccgcaacgatgaggaactgaacaagctcctgggtcatgtcaccattgcccagggtggtgtcctccccaacatccaccagaaccttctgcccaagaagacccccaagagtgggaaagggccgggaagccaggagctgtaa

SEQ ID NO: 46152 - protein, 134 aa, Aspergillus niger
MTGGKSGGKASGSKNAQSRSSKAGLAFPVGRVHRLLRKGNYAQRVGAGAPVYLAAVLEYLAAEILELAGNAARDNKKTRIIPRHLQLAIRNDEELNKLLGHVTIAQGGVLPNIHQNLLPKKTPKSGKGPGSQEL

SEQ ID NO: 46153 - DNA, 414 bp, Botrytis cinerea
  CDS (1)..(414)
atgactggaggaaaatctgctggaggaaaggcgggaaccaccaagaacgcgcaatcccggtttcatcccaaggctggtctcgcattcccagttggtcgtgttcaccgtctcctcagaaagggtaactacgctcaacgtgttggtgccggtgcccctgtctacctcgctgctgttctcgagtacctcgcggctgaaattcttgagttggccggtaacgctgctcgtgacaacaagaagacccgtatcattccacgtcatctccaactcgccatcagaaacgatgaggaattgaacaagcttttgggacatgttacaatcgcacaaggtggtgtcttgccaaacattcatcaaagccttcttccaaagaagactgccaagactgctggtggaaagcctgccagtcaagagctatag

SEQ ID NO: 46154 - protein, 137 aa, Botrytis cinerea
MTGGKSAGGKAGTTKNAQSRFHPKAGLAFPVGRVHRLLRKGNYAQRVGAGAPVYLAAVLEYLAAEILELAGNAARDNKKTRIIPRHLQLAIRNDEELNKLLGHVTIAQGGVLPNIHQSLLPKKTAKTAGGKPASQEL

SEQ ID NO: 46155 - DNA, 378 bp, Chironomus thummi thummi
  CDS (1)..(378)
atgtcaggccgtggtaaaggaggcaaagttaaggcaaaggcaaagtcacgttcaagccgtgctggattacaattcccagtaggtcgtattcatcgtcttctccgtaaaggaaactatggtgaacgtgttggtgctggagctccagtatatttagctgctgttatggaatacttagctgctgaagttcttgaattagcaggtaatgctgctcgtgacaacaagaaaacaagaattatcccacgtcacttgcaattggcaatccgtaatgacgaagaattgaacaaacttttgtctggagtcacaatcgcacaaggtggtgttttaccaaacatccaagctgtcttgttgccaaagaagactgaatcaaagaaagcttaa

SEQ ID NO: 46156 - protein, 125 aa, Chironomus thummi thummi
MSGRGKGGKVKAKAKSRSSRAGLQFPVGRIHRLLRKGNYGERVGAGAPVYLAAVMEYLAAEVLELAGNAARDNKKTRIIPRHLQLAIRNDEELNKLLSGVTIAQGGVLPNIQAVLLPKKTESKKA

SEQ ID NO: 46157 - DNA, 390 bp, Chlamydomonas reinhardtii
  CDS (1)..(390)
atggctggtcgcggcaagggcaagacctctggcaagaaggctgtgagccgcagcgccaaggccggcctgcagttccccgttggccgcattgcgcgctacctgaagaagggcaagtacgccgagcgcatcggtgccggcgcgcccgtgtacctggccgctgtgctggagtacctgaccgctgaggtgctggagctggccggcaacgccgcccgcgacaacaagaagaaccgcatcgtgccccgccacatccagctggccatccgcaacgacgaggagctgggcaagctgctgggcgaggtgaccattgcttcgggcggtgtgctgcccaacatccacgcggtgctgctgcccaagaagaccaagggcggcaagggcgaggagaccgcctaa

SEQ ID NO: 46158 - protein, 129 aa, Chlamydomonas reinhardtii
MAGRGKGKTSGKKAVSRSAKAGLQFPVGRIARYLKKGKYAERIGAGAPVYLAAVLEYLTAEVLELAGNAARDNKKNRIVPRHIQLAIRNDEELGKLLGEVTIASGGVLPNIHAVLLPKKTKGGKGEETA

SEQ ID NO: 46159 - DNA, 396 bp, Cryptococcus neoformans
  CDS (1)..(396)
atgtcttctggtggcaaaggcaaggcttcttccgagaccaagtcctcttcccgatcttccaaggccggtcttcagttccccgtcggtcgtatccaccgtcttttgaagaagggtaactacgcccagcgaatcggttccggtgctcccgtctacctcgctgccgtccttgagtaccttgccgctgaaatcctcgagttggccggtaacgctgcccgagacaacaagaagtcccgtatcgtcccccgacaccttcagcttgccgtccgaaacgacgaagagctcaacaagctcctcggatctgttgtcatctctcagggtggtgtccttccccacattatggccgagctccttcccgtcaagaccaagggcaaggccaaggcttctcaggaggtgtaa

SEQ ID NO: 46160 - protein, 131 aa, Cryptococcus neoformans
MSSGGKGKASSETKSSSRSSKAGLQFPVGRIHRLLKKGNYAQRIGSGAPVYLAAVLEYLAAEILELAGNAARDNKKSRIVPRHLQLAVRNDEELNKLLGSVVISQGGVLPHIMAELLPVKTKGKAKASQEV

SEQ ID NO: 46161 - DNA, 375 bp, Drosophila erecta
  CDS (1)..(375)
atgtctggacgtggaaaaggtggcaaagtgaagggaaaggcaaagtcccgctccaaccgtgccggtcttcaattccctgtgggccgtattcaccgcctgctcaggaagggtaactacgccgagcgtgttggtgcaggcgctccagtttacctagcagccgtaatggaatatctggctgctgaggttctcgagttggcaggcaatgctgctcgtgacaacaagaagactagaattattccgcgtcatctgcagttggccatccgtaacgacgaggagttaaacaagctgctctccggcgtcactattgcccaaggtggagtgttgcctaacatacaggctgttctgttgcccaagaagaccgagaagaaggcttaa

SEQ ID NO: 46162 - protein, 124 aa, Drosophila erecta
MSGRGKGGKVKGKAKSRSNRAGLQFPVGRIHRLLRKGNYAERVGAGAPVYLAAVMEYLAAEVLELAGNAARDNKKTRIIPRHLQLAIRNDEELNKLLSGVTIAQGGVLPNIQAVLLPKKTEKKA

SEQ ID NO: 46163 - DNA, 399 bp, Emericella nidulans
  CDS (1)..(399)
atgactggcggcaaatctggtggcaaggctagcggcagcaagaacgctcagtctcgttcttcgaaggccggcttggctttcccggtcggtcgtgttcaccgtcttcttcgcaagggaaactacgcccagcgtgttggtgccggtgcgcctgtctacctggctgccgtcttggagtatcttgctgctgaaattctcgagcttgctggaaacgccgctcgtgacaacaagaaaacccgtatcatcccccgccaccttcagctcgccatccgaaacgatgaggaactgaacaagctcctgggccacgtcactattgcccagggtggtgtcctccccaacattcatcagaacctcctccccaagaagacccccaaggccggaaagggcagccaggagctgtaa

SEQ ID NO: 46164 - protein, 132 aa, Emericella nidulans
MTGGKSGGKASGSKNAQSRSSKAGLAFPVGRVHRLLRKGNYAQRVGAGAPVYLAAVLEYLAAEILELAGNAARDNKKTRIIPRHLQLAIRNDEELNKLLGHVTIAQGGVLPNIHQNLLPKKTPKAGKGSQEL

SEQ ID NO: 46165 - DNA, 462 bp, Euphorbia esula
  CDS (1)..(462)
atggataccggagctaagttgaagaaaggagccggagaaagaaagggaggcggtcctaagaagaagccagtctcaaggtccgtcaaagccggtcttcagtttccggtaggtcggatcggtcgattcctgaagaaaggccggtatgctcagcgtgttggaagcggagctccggtgtacttggccgccgtgctcgagtatcttgccgctgaggtattggagctagctggaaatgcagcaagagataacaagaagaacagaatcataccaaggcatgtgctattggctgtaaggaacgatgaagaactaggaaagctattagctggagtgaccatagctcatggtggagttttaccaaacataaacccagttcttttgcctaagaaagctgaaaaggcagcagcagcagcaaccaaggagcccaaatcaccagccaaggctactaaatcacctaagaaggcttag

SEQ ID NO: 46166 - protein, 153 aa, Euphorbia esula
MDTGAKLKKGAGERKGGGPKKKPVSRSVKAGLQFPVGRIGRFLKKGRYAQRVGSGAPVYLAAVLEYLAAEVLELAGNAARDNKKNRIIPRHVLLAVRNDEELGKLLAGVTIAHGGVLPNINPVLLPKKAEKAAAAATKEPKSPAKATKSPKKA

SEQ ID NO: 46167 - DNA, 405 bp, Gibberella zeae
  CDS (1)..(405)
atgactggcggcggcaagtctggcggcaaggcctctggttccaagaacgcgcaatcgcgttcctccaaggctggtctcgctttccctgtcggtcgtgtccaccgtctcctccgaaagggcaactacgctcagcgtgtcggtgccggtgctcccgtctacctcgctgccgtcctcgagtacctcgctgctgaaatcctcgagttggctggtaacgctgctcgcgacaacaagaagacccgtatcatcccccgtcatcttcagcttgccatccgaaacgatgaggagctgaacaagcttttgggtcacgtcaccatcgctcagggtggtgttctccccaacatccaccaaaaccttctgcctaagaagacaggcaagactggcaagacctcaagcatggagctgtaa

SEQ ID NO: 46168 - protein, 134 aa, Gibberella zeae
MTGGGKSGGKASGSKNAQSRSSKAGLAFPVGRVHRLLRKGNYAQRVGAGAPVYLAAVLEYLAAEILELAGNAARDNKKTRIIPRHLQLAIRNDEELNKLLGHVTIAQGGVLPNIHQNLLPKKTGKTGKTSSMEL

SEQ ID NO: 46169 - DNA, 393 bp, Kluyveromyces lactis
  CDS (1)..(393)
atgtcaggtaaaggtggtaaagctggttctgctgctaaggcttctcaatctagatctgcaaaggcaggtttgactttcccagtcggtagagttcacagattgttgagaaagggtaactacgctcaaagaatcggttctggtgctccagtctatttgactgccgttttggaatatttggctgctgaaatcttggaattggccggtaacgctgctagagacaacaagaagaccagaatcatcccaagacatttgcaattggctatcagaaacgatgacgaattgaacaaattgttgggtaacgtgaccatcgctcaaggtggtgtcttgccaaacattcaccaaaacttgttgccaaagaaatcttccaaggctaaggcttctcaagaattataa

SEQ ID NO: 46170 - protein, 130 aa, Kluyveromyces lactis
MSGKGGKAGSAAKASQSRSAKAGLTFPVGRVHRLLRKGNYAQRIGSGAPVYLTAVLEYLAAEILELAGNAARDNKKTRIIPRHLQLAIRNDDELNKLLGNVTIAQGGVLPNIHQNLLPKKSSKAKASQEL

SEQ ID NO: 46171 - DNA, 411 bp, Magnaporthe grisea
  CDS (1)..(411)
atgactggaggcggcaagtccggcggcaaggccagcggttccaagaacgcgcaatcccgttcgtccaaggctggtctcgctttccccgtcggtcgtgtccaccgtctgctccgcaagggtaactacgcccagcgtgtcggtgccggtgctcccgtctatctggctgccgtcctcgagtacctcgctgctgagattctcgagttggctggcaacgccgcccgcgacaataagaagacccgtatcatcccccgtcatctgcaacttgccatcaggaacgatgaggagttgaacaagcttttgggtcatgttaccatcgcccaaggtggtgtcctgcccaacattcaccagaacctgctgcccaagaagaccggaaagactgctggtggcaagaacgccagccaagagatgtaa

SEQ ID NO: 46172 - protein, 136 aa, Magnaporthe grisea
MTGGGKSGGKASGSKNAQSRSSKAGLAFPVGRVHRLLRKGNYAQRVGAGAPVYLAAVLEYLAAEILELAGNAARDNKKTRIIPRHLQLAIRNDEELNKLLGHVTIAQGGVLPNIHQNLLPKKTGKTAGGKNASQEM

SEQ ID NO: 46173 - DNA, 480 bp, Zea mays
  CDS (1)..(480)
  misc_feature (166)..(166): n is a, g, c or t
  misc_feature (167)..(167): y is t or c
  misc_feature (168)..(168): y is t or c
atggactccaccggcaccggagcagggggtaaggggaagaagggagcggccgggcgcaaggtcggcgggccaaggaagaagtcggtgtcgaggtccgtgaaggccggtctccagttccccgtcggccgcatcgggcgctacttgaagaagggccgctacgcgcagnyygtcggcaccggcgcccccgtctacctcgccgctgtcctcgaatacctcgccgctgaggttctggagctcgccggtaatgctgccagggacaacaagaagactcgcattattccgcgccacgtgcttctggcgatccggaacgacgaggagcttgggaagctgttgggcggcgtgaccatcgctcacggcggtgtgctccccaatatcaaccctgttctgctgcccaagaagacggcggagaaggcgtccagtggcgggagcaaggaggcaaagtcgcccaagaaggccgccaagtcccctaagaaggcatag

SEQ ID NO: 46174 - protein, 159 aa, Zea mays
  misc_feature (56)..(56): The Xaa at location 56 stands for Ala, Ile, Leu, Phe, Pro, Ser, Thr, or Val.
MDSTGTGAGGKGKKGAAGRKVGGPRKKSVSRSVKAGLQFPVGRIGRYLKKGRYAQXVGTGAPVYLAAVLEYLAAEVLELAGNAARDNKKTRIIPRHVLLAIRNDEELGKLLGGVTIAHGGVLPNINPVLLPKKTAEKASSGGSKEAKSPKKAAKSPKKA

SEQ ID NO: 46175 - DNA, 378 bp, Mytilus californianus
  CDS (1)..(378)
atgtcaggacgaggaaaaggaggtaaagcaaaggcaaaggcaaagtctaggtcatcccgtgccggacttcagttcccagtaggtcgtatccacagacttttgaggaaaggaaactacgccgagagagttggtgccggagctccagtctaccttgccgctgtcttggaatacttggcagctgaggttttggagttggcaggaaatgctgcccgtgacaacaagaagagcagaatcatcccccgtcatcttcagttggccatcagaaacgacgaagaattgaacaaacttctctctggtgtaaccattgcccaaggtggtgttttgccaaacatccaggctgtacttctgccaaagaagacacagaaagctgccaagtaa

SEQ ID NO: 46176 - protein, 125 aa, Mytilus californianus
MSGRGKGGKAKAKAKSRSSRAGLQFPVGRIHRLLRKGNYAERVGAGAPVYLAAVLEYLAAEVLELAGNAARDNKKSRIIPRHLQLAIRNDEELNKLLSGVTIAQGGVLPNIQAVLLPKKTQKAAK

SEQ ID NO: 46177 - DNA, 378 bp, Mytilus trossulus
  CDS (1)..(378)
atgtcaggacgaggaaaaggaggaaaagcaaaagcaaaggcaaagtctaggtcatcccgtgccggacttcagttcccagtaggtcgtatccacagacttttgaggaaaggaaactacgccgggagagttggtgccggagcaccagtctaccttgccgctgtcttggaatacttagcagctgaggttttggagttggcaggaaatgctgcccgtgacaacaagaagagcagaatcatcccccgtcatctccagttggccatcagaaacgacgaagaattgaacaaacttctctctggtgtaaccattgcacaaggtggtgttttaccaaacatccaggctgtacttctgccaaagaagacacagaaagctgccaagtaa

SEQ ID NO: 46178 - protein, 125 aa, Mytilus trossulus
MSGRGKGGKAKAKAKSRSSRAGLQFPVGRIHRLLRKGNYAGRVGAGAPVYLAAVLEYLAAEVLELAGNAARDNKKSRIIPRHLQLAIRNDEELNKLLSGVTIAQGGVLPNIQAVLLPKKTQKAAK

SEQ ID NO: 46179 - DNA, 405 bp, Neurospora crassa
  CDS (1)..(405)
atgactggaggcggcaagtccggcggcaaggccagcggttccaagaacgcgcaatcccgttcttccaaggctggtctcgctttccccgtcggtcgtgtccatcgtctcctccgcaagggcaactacgcccagcgtgttggtgccggcgctcccgtctacctcgccgctgttctcgagtacctcgctgccgaaattcttgagcttgctggcaacgctgctcgcgacaacaagaagactcgtatcattccccgtcaccttcagctcgccatccgcaacgatgaggagttgaacaagcttcttggccacgtcaccattgcccagggtggtgttctccccaacattcaccaaaatctccttcctaagaagaccggcaagactggcaagaacgcgagtcaagaactttaa

SEQ ID NO: 46180 - protein, 134 aa, Neurospora crassa
MTGGGKSGGKASGSKNAQSRSSKAGLAFPVGRVHRLLRKGNYAQRVGAGAPVYLAAVLEYLAAEILELAGNAARDNKKTRIIPRHLQLAIRNDEELNKLLGHVTIAQGGVLPNIHQNLLPKKTGKTGKNASQEL

SEQ ID NO: 46181 - DNA, 375 bp, Paracentrotus lividus
  CDS (1)..(375)
atgtctggaagaggtaaaagtggaaaggctcgtaccaaggcaaagtctcgttcatcccgtgctggtcttcagtttccagtgggacgtgttcaccgattcctacgcaaaggcaactatgcaaagagggtcggcggcggtgcaccggtgtacatggctgctgtcctggagtacttgactgctgaaatcctcgagctcgctggcaacgctgcccgagacaacaagaaatcgaggatcattccccgtcaccttcaacttgcagtacgtaacgacgaagaactcaacaagcttcttggaggtgtgaccatcgctcaaggtggtgtactgcccaacatccaggctgtgctgcttcccaagaagaccggcaaatcaagctaa

SEQ ID NO: 46182 - protein, 124 aa, Paracentrotus lividus
MSGRGKSGKARTKAKSRSSRAGLQFPVGRVHRFLRKGNYAKRVGGGAPVYMAAVLEYLTAEILELAGNAARDNKKSRIIPRHLQLAVRNDEELNKLLGGVTIAQGGVLPNIQAVLLPKKTGKSS

SEQ ID NO: 46183 - DNA, 450 bp, Petroselinum crispum
  CDS (1)..(450)
atggagaccgccggaaaagcaaagaagggatttggtggaaggaaaggcggtccaaggaagaagtccgtgactcggtcggtgaaagccggtttgcagtttccggtcggtagaattggccggtatcttaagaaaggccgctatgctcagcgtgttggtaccggtgctccggtttatttggctgccgttctcgaataccttgccgctgaagttttggagttggctggaaacgcagcaagggacaacaagaagacgagaatcattcctcgacatttgctgttggcagtgaggaacgatgaggagctgggaaaactgttggctggagttacatttgctcatggtggtgttttgccaaacatcaacccagtgttgttgccaaagaagactgctgagaaagctgctaaagagccaaagtctccatctaaggccggaaagtcaccaaagaaggcttaa

SEQ ID NO: 46184 - protein, 149 aa, Petroselinum crispum
METAGKAKKGFGGRKGGPRKKSVTRSVKAGLQFPVGRIGRYLKKGRYAQRVGTGAPVYLAAVLEYLAAEVLELAGNAARDNKKTRIIPRHLLLAVRNDEELGKLLAGVTFAHGGVLPNINPVLLPKKTAEKAAKEPKSPSKAGKSPKKA

SEQ ID NO: 46185 - DNA, 375 bp, Platynereis dumerilii
  CDS (1)..(375)
atgtcaggccgtggaaagggaggaaaagcaaagggaaagagcaagaccaggtccagccgggccggtctccagttcccggtgggaaggatccatcgtcttctccgcaagggcaactatgctgagagagttggagctggtgccccagtctacttggctgccgtcatggagtacttggctgctgaggtcctcgagttggcaggaaacgccgcccgtgacaacaagaagaccaggatcatccccagacatttgcagttggccatccgtaatgacgaggaattgaacaagctgctctccggtgtcaccatcgcccagggaggagttctgcccaacatccaggctgtgcttctgcccaagaagaccaccaaggcgaaataa

SEQ ID NO: 46186 - protein, 124 aa, Platynereis dumerilii
MSGRGKGGKAKGKSKTRSSRAGLQFPVGRIHRLLRKGNYAERVGAGAPVYLAAVMEYLAAEVLELAGNAARDNKKTRIIPRHLQLAIRNDEELNKLLSGVTIAQGGVLPNIQAVLLPKKTTKAK

SEQ ID NO: 46187 - DNA, 408 bp, Podospora anserina
  CDS (1)..(408)
atgactggcggcggcaagtccggcggcaaggcgagcagcggcaagaacgcgcaatctcgttcttccaaggctggtttggctttccccgtcggccgtgttcaccgtcttctccgcaagggcaactacgctcagcgtgtcggtgccggtgctcccgtctacctcgccgctgttcttgagtacctcgctgccgaaatcctcgagttggctggcaacgccgctcgtgacaacaagaagacccgtatcatcccccgtcatctccagctcgccatccgcaacgatgaggagttgaacaagctccttgggcacgtcaccattgcccagggtggtgtccttcccaacattcaccagaaccttcttcccaagaagactggcaccaagcccggcaagaacgcctcgcaagagttgtaa

SEQ ID NO: 46188 - protein, 135 aa, Podospora anserina
MTGGGKSGGKASSGKNAQSRSSKAGLAFPVGRVHRLLRKGNYAQRVGAGAPVYLAAVLEYLAAEILELAGNAARDNKKTRIIPRHLQLAIRNDEELNKLLGHVTIAQGGVLPNIHQNLLPKKTGTKPGKNASQEL

SEQ ID NO: 46189 - DNA, 378 bp, Urechis caupo
  CDS (1)..(378)
atgtctggacgtggtaaaggaggtaaggcgaagggaaagagcaagagccgttcatcccgtgctggtctgcagttccccgtgggcagaatccaccgtctcctgcgcaaaggcaactatgccgagcgtattggtgctggtgccccagtctacctggctgcagtgatggagtatttggcagctgaggtgctcgagttggcaggtaacgctgcccgtgacaacaagaagacgaggatcatcccccgtcacttgcaattggccatccgtaacgacgaggagttgaacaagcttctgtccggtgtcaccatcgcccagggtggtgtactgcccaacatccaggctgttttgctgcccaagaagtcttcccagaagaccaagtaa

SEQ ID NO: 46190 - protein, 125 aa, Urechis caupo
MSGRGKGGKAKGKSKSRSSRAGLQFPVGRIHRLLRKGNYAERIGAGAPVYLAAVMEYLAAEVLELAGNAARDNKKTRIIPRHLQLAIRNDEELNKLLSGVTIAQGGVLPNIQAVLLPKKSSQKTK

SEQ ID NO: 46191 - DNA, 411 bp, Ustilago maydis
  CDS (1)..(411)
atgtcttccggtggcaagtctggtggcaaggctggtgacgcctcttccaaggcccagtcccgatcggccaaggctggtctccagttccccgtcggtcgtatccaccgtctcttgcgaaagggcaactacgctcagcgtgtcggtgctggtgctcctgtctacctcgccgccgttctcgagtacctggctgccgagattcttgaacttgccggtaacgctgcccgtgacaacaagaagtcgcgtatcattccccgtcatcttcagctcgccatccgcaacgacgaggagctcaacaagctcctcggcggtgtcactatctcgcaaggtggtgtccttcccttcatccagtccgagctcctccccgccaagtccggcaagcctaagaaggccggtggttcgcaggacatctaa

SEQ ID NO: 46192 - protein, 136 aa, Ustilago maydis
MSSGGKSGGKAGDASSKAQSRSAKAGLQFPVGRIHRLLRKGNYAQRVGAGAPVYLAAVLEYLAAEILELAGNAARDNKKSRIIPRHLQLAIRNDEELNKLLGGVTISQGGVLPFIQSELLPAKSGKPKKAGGSQDI

SEQ ID NO: 46193 - DNA, 408 bp, Yarrowia lipolytica
  CDS (1)..(408)
atgtcttccggtggaaagtccggtggcaaggccgcctcctcttctaagacctccaagtctcgatccgctaaggccgatcttaccttccccgttggtcgagtccaccgactcctgcgaaagggaaactacgcccagcgaattggtgctggtgcccccatctacctcgctgccgtccttgagtacctcgccgtcgagattctcgagctgtccggtaacgctgcccgagacaacaagaagagtcgtatcgttccccgacatctgcagctcgccatccgaaacgatgaggagctgaacaagctgcttggccacgtcaccattgctcagggtggtgttctccccaacatccaccagaaccttctgccccgaaagtccgccaagggcgccaagggtgcttctcaggagctctaa

SEQ ID NO: 46194 - protein, 135 aa, Yarrowia lipolytica
MSSGGKSGGKAASSSKTSKSRSAKADLTFPVGRVHRLLRKGNYAQRIGAGAPIYLAAVLEYLAVEILELSGNAARDNKKSRIVPRHLQLAIRNDEELNKLLGHVTIAQGGVLPNIHQNLLPRKSAKGAKGASQEL

SEQ ID NO: 46195 - DNA, 417 bp, Oryza sativa
  CDS (1)..(417)
atggcgggcaagggaggcaaggggctcctcgcggccaagaccacggcggcaaagagcgccgacaaggacaaggacaagaagaaggcccccgtctcccgctcctcccgcgccggcctccagttcccggtggggcgtatccacaggcagctcaagtcgagggcgtcggctcatggccgcgtcggcgccaccgccgccgtgtactccgcggcgattctcgagtacctaaccgccgaggtcctggagctggccggcaacgcgagcaaggatctcaaggtgaagcgtatcaccccgcgccatctccagctagccatccgcggggatgaggagctcgacacgctcatcaagggcaccatcgccggcggtggcgtcatcccccatatccacaagtcgctcatcaacaagacctccaaagagtga

SEQ ID NO: 46196 - protein, 138 aa, Oryza sativa
MAGKGGKGLLAAKTTAAKSADKDKDKKKAPVSRSSRAGLQFPVGRIHRQLKSRASAHGRVGATAAVYSAAILEYLTAEVLELAGNASKDLKVKRITPRHLQLAIRGDEELDTLIKGTIAGGGVIPHIHKSLINKTSKE

SEQ ID NO: 46197 - DNA, 480 bp, Oryza sativa
  CDS (1)..(480)
atggacgccgccggagccggagcgggtgggaagttgaagaagggagccgccgggaggaaggccggcgggccgaggaagaaggcggtgtcgcgctccgtcaaggccgggctccagttccccgtcggccgtatcggccgctacctcaagaagggccgctacgcccagcgcatcggcaccggcgcccccgtctacctcgccgccgtcctcgagtacctcgctgccgaggtgctggagctcgccgggaacgcggccagggacaacaagaagaacaggatcatcccgcgccacgtgctgctggcgatcaggaacgacgaggagctcggcaagctgctggccggcgtgaccatcgcgcacggaggcgtgctgcccaacatcaacccggtgctgctgcccaagaagacggcggagaaggccgccgccgccggcaaggaggccaagtcgcccaagaaggccgccgggaagtcccccaagaaggcctag

SEQ ID NO: 46198 - protein, 159 aa, Oryza sativa
MDAAGAGAGGKLKKGAAGRKAGGPRKKAVSRSVKAGLQFPVGRIGRYLKKGRYAQRIGTGAPVYLAAVLEYLAAEVLELAGNAARDNKKNRIIPRHVLLAIRNDEELGKLLAGVTIAHGGVLPNINPVLLPKKTAEKAAAAGKEAKSPKKAAGKSPKKA

SEQ ID NO: 46199 - DNA, 414 bp, Oryza sativa
  CDS (1)..(414)
atgagttcctctcagggaggcggcggccgcggcaaggcgaagacgacgaaggcggtgtcgcggtcgtccaaggccgggctccagttccccgtcggccgcatcgcccgctacctcaaggccggcaagtacgcggagcgcgtcggcgccggcgcccccgtctacctctccgccgtcctcgagtacctcgccgccgaggtgctggagctggccgggaacgcggcgagggacaacaagaagaacaggatcgtgccgcggcacatccagctggcggtgcgcaacgacgaggagctgagcaggctgctgggcaccgtcacgatcgccgccggcggcgtgctgcccaacatccagcaggtcctgcttcccaagaagggcggcggcaagggcgacatcggctccgcctcccaggagttttga

SEQ ID NO: 46200 - protein, 137 aa, Oryza sativa
MSSSQGGGGRGKAKTTKAVSRSSKAGLQFPVGRIARYLKAGKYAERVGAGAPVYLSAVLEYLAAEVLELAGNAARDNKKNRIVPRHIQLAVRNDEELSRLLGTVTIAAGGVLPNIQQVLLPKKGGGKGDIGSASQEF

SEQ ID NO: 46201 - DNA, 414 bp, Oryza sativa
  CDS (1)..(414)
atggcgggaaaaggaggtaagggcttgctcgccgcgaagacgacggccgccaagtcggcggagaaggacaaggggaagaaggcccccgtctcccgctcgtcccgcgctggtctccagttccctgttggccgtatccatcgccagttgaagcaaaggactcaggcaaatggacgtgttggtgctactgccgcagtttactctgctgctattctggagtacttaacagctgaggttctggaactggctgggaacgctagcaaggatctgaaggtcaagcgtatcacccctcgccatctgcagcttgccatccgtggagatgaggagctcgacactctcatcaagggtaccatcgctggtggaggtgtcattcctcacatccacaagtccctgatcaacaagtcctccaaagagtga

SEQ ID NO: 46202 - protein, 137 aa, Oryza sativa
MAGKGGKGLLAAKTTAAKSAEKDKGKKAPVSRSSRAGLQFPVGRIHRQLKQRTQANGRVGATAAVYSAAILEYLTAEVLELAGNASKDLKVKRITPRHLQLAIRGDEELDTLIKGTIAGGGVIPHIHKSLINKSSKE

SEQ ID NO: 46203 - DNA, 471 bp, Oryza sativa
  CDS (1)..(471)
atggacgtcggcgtcggcggcaaggcggcgaagaaggcggtggggcggaagctgggcgggccgaagaagaagccggtgtcgcgctccgtcaaggccgggctccagttccccgtcggccgcatcggccgctacctcaagaagggccgctacgcccagcgcgtcggcaccggcgcccccgtctacctcgccgccgtcctcgagtacctcgccgcagaggtgctggagctcgccgggaacgcggcgcgggacaacaagaagaaccggatcatcccgaggcacgtgctgctggcgatccgcaacgacgaggagctcgggaagctgctcgccggggtcaccatcgcgcacggcggcgtgctgccgaacatcaacccggtgctgctcccgaagaagaccgcggagaaggccgacaagccggccaaggcgtccaaggacaaagccgccaagtcccccaagaagcaggcgcgctcctag

SEQ ID NO: 46204 - protein, 156 aa, Oryza sativa
MDVGVGGKAAKKAVGRKLGGPKKKPVSRSVKAGLQFPVGRIGRYLKKGRYAQRVGTGAPVYLAAVLEYLAAEVLELAGNAARDNKKNRIIPRHVLLAIRNDEELGKLLAGVTIAHGGVLPNINPVLLPKKTAEKADKPAKASKDKAAKSPKKQARS

SEQ ID NO: 46205 - DNA, 492 bp, Oryza sativa
  CDS (1)..(492)
atggaggtgggagcgaaggtgcccaagaaggccggcgccggcggccgccgcggcggcggcgggccgaagaagaagccggtgtcccgctccgtcaaggccgggctccagttccccgtcggccgtatcggccgctacctcaagcaaggccgctactcccagcgcatcggcaccggcgcccccgtctacctcgccgccgtcctcgagtacctcgccgccgaggtgctcgagcttgcggggaacgcggcgcgggacaacaagaagaaccggatcatcccgcggcacgtgctgctggcgatccgcaacgacgaggagctcgggaagctgctggccggcgtcaccatcgcgcacggcggggtgctgcccaacatcaacccggtgctgctccccaagaagaccggctccgccgcggccaaggaggccaaggagggtaagacccccaagtcgcccaagaaggccaccaccaagtcgccaaagaaggcggcggccgcttag

SEQ ID NO: 46206 - protein, 163 aa, Oryza sativa
MEVGAKVPKKAGAGGRRGGGGPKKKPVSRSVKAGLQFPVGRIGRYLKQGRYSQRIGTGAPVYLAAVLEYLAAEVLELAGNAARDNKKNRIIPRHVLLAIRNDEELGKLLAGVTIAHGGVLPNINPVLLPKKTGSAAAKEAKEGKTPKSPKKATTKSPKKAAAA

SEQ ID NO: 46207 - DNA, 408 bp, Oryza sativa
  CDS (1)..(408)
atggcgggacgtgggaaggcgatcggcgcgggggccgcgaagaaggcgacgtcgaggagctccaaggccgggctgcagttccccgttggcaggatcgcgaggttcctcaaggccgggaagtacgccgagcgcgtcggcgccggggcccccgtctacctcgccgccgtcctcgagtacctcgccgctgaggtgctcgagctcgccgggaacgcggcgagggacaacaagaagacccgcatcgtgccgcgccacatccagctcgcggtgcgcaacgacgaggagttgaccaagctgctcggcggcgccaccatcgccagcggcggcgtgatgcccaacatccaccagcacctcctccccaagaaggccgggtcatccaaggcatccaccgtcgacgacgacgacaactag

SEQ ID NO: 46208 - protein, 135 aa, Oryza sativa
MAGRGKAIGAGAAKKATSRSSKAGLQFPVGRIARFLKAGKYAERVGAGAPVYLAAVLEYLAAEVLELAGNAARDNKKTRIVPRHIQLAVRNDEELTKLLGGATIASGGVMPNIHQHLLPKKAGSSKASTVDDDDN

SEQ ID NO: 46209 - DNA, 408 bp, Oryza sativa
  CDS (1)..(408)
atggccgggagagggaaggcgatcggctcgggcgccgccaagaaggccatgtcgcggagctccaaggccgggctccagttccccgtgggcaggatcgcccggttcttgaaggccggcaagtacgccgagagggtcggcgccggcgccccggtctacctcgccgccgtcctcgagtacctcgccgctgaggttcttgagctcgccgggaacgcggcgagggacaacaagaagacccgcatagtgccccgccacatccagctcgccgtccgcaacgacgaggagctatcccgcctgctcggcacggtcacaatcgccagcggaggcgtcatgcccaacatccacaacctgctcctccccaagaaggccggcggcagcgccaaggcggcggccggcgacgatgacaactag

SEQ ID NO: 46210 - protein, 135 aa, Oryza sativa
MAGRGKAIGSGAAKKAMSRSSKAGLQFPVGRIARFLKAGKYAERVGAGAPVYLAAVLEYLAAEVLELAGNAARDNKKTRIVPRHIQLAVRNDEELSRLLGTVTIASGGVMPNIHNLLLPKKAGGSAKAAAGDDDN

SEQ ID NO: 46211 - DNA, 405 bp, Oryza sativa
  CDS (1)..(405)
atggctggtaggggcaaggcgatcggctcgagcgccgccaagaaggccacgtcgcggagctccaaggccgggctccagttccccgtcggcaggatcgcccgcttcctcaaggccggcaagtacgccgagcgcgtcggcgccggcgcccccgtctacctcgccgccgtcctcgagtacctcgccgccgaggttcttgagctcgccgggaacgcggcgcgggacaacaagaagacgcggatcgtgccgaggcacatccagctcgccgtgcgcaacgacgaggagctgtcgcgcctgctcggcgccgtcaccatcgccaacggcggcgtcatgcccaacatccacaacctgctcctccccaagaaggccggctccagcgccaaggccgccgccgccgacgacgagtag

SEQ ID NO: 46212 - protein, 134 aa, Oryza sativa
MAGRGKAIGSSAAKKATSRSSKAGLQFPVGRIARFLKAGKYAERVGAGAPVYLAAVLEYLAAEVLELAGNAARDNKKTRIVPRHIQLAVRNDEELSRLLGAVTIANGGVMPNIHNLLLPKKAGSSAKAAAADDE

SEQ ID NO: 46213 - DNA, 420 bp, Oryza sativa
  CDS (1)..(420)
atggcggggaagggagggaaggggctgctcgcggcgaagacgacggcggcgaaggccgccgccgacaaggacaaggaccgcaagaaggcgcccgtctcccgctcctcccgcgccgggatccagttcccggtggggcgtatccacaggcagctgaaggggagggtgtcggcgaacggccgcgtgggggcgacggcggcggtgtacacggcggcgatcctcgagtacctgacggcggaggtcctggagctcgccggcaacgccagcaaggacctcaaggtgaagcgcatcaccccgcgccacctgcagctcgccatccgcggggacgaggagctcgacaccctcatcaagggcaccatagccggcggcggcgtcatcccgcacatccacaagtccctcatcaacaagaccgccaaggagtag

SEQ ID NO: 46214 - protein, 139 aa, Oryza sativa
MAGKGGKGLLAAKTTAAKAAADKDKDRKKAPVSRSSRAGIQFPVGRIHRQLKGRVSANGRVGATAAVYTAAILEYLTAEVLELAGNASKDLKVKRITPRHLQLAIRGDEELDTLIKGTIAGGGVIPHIHKSLINKTAKE

SEQ ID NO: 46215 - DNA, 408 bp, Oryza sativa
  CDS (1)..(408)
atggcgggacgcgggaaggcgatcggcgccggggccgcgaagaaggcgacgtcgaggagctccaaggccgggctgcagttccccgtcgggaggatcgccaggttcctcaaggccggcaagtacgccgagcgcgtcggcgccggcgctcccgtctacctcgccgccgtcctcgagtacctcgccgccgaggtgctggagctcgccgggaacgcggcgagggacaacaagaagacccgcattgtgccgcgccacatccagctcgcggtgcgcaacgacgaggagctcaccaagctgctcggcggcgccaccatcgccagcggcggcgtcatgcccaacatccaccagcacctcctccccaagaaggccgggtcatccaaggcgtcccacgccgacgacgacgacaactga

SEQ ID NO: 46216 - protein, 135 aa, Oryza sativa
MAGRGKAIGAGAAKKATSRSSKAGLQFPVGRIARFLKAGKYAERVGAGAPVYLAAVLEYLAAEVLELAGNAARDNKKTRIVPRHIQLAVRNDEELTKLLGGATIASGGVMPNIHQHLLPKKAGSSKASHADDDDN

SEQ ID NO: 46217 - DNA, 417 bp, Oryza sativa
  CDS (1)..(417)
atgagttccgcgggcggcggcggcgggagggggaagtcgaagggctccaagtcggtgtcgcggtcgtccaaggccggcctccagttccccgtcggccgcatcgccaggtacctcaaggccggcaagtacgccgagcgcgtcggcgccggcgcccccgtctacctctccgccgtcctcgagtacctcgccgccgaggtgctggagctggcggggaacgcggcgagggacaacaagaagaaccggatcgtgccgaggcacatccagctggcggtgcgcaacgacgaggagctgagcaggctgctcggcgccgtcaccatcgccgccggcggcgtgctgcccaacatccaccagacgctgctccccaagaagggcggcaaggacaaggccgacatcggatccgcctcccaggagttctag

SEQ ID NO: 46218 - protein, 138 aa, Oryza sativa
MSSAGGGGGRGKSKGSKSVSRSSKAGLQFPVGRIARYLKAGKYAERVGAGAPVYLSAVLEYLAAEVLELAGNAARDNKKNRIVPRHIQLAVRNDEELSRLLGAVTIAAGGVLPNIHQTLLPKKGGKDKADIGSASQEF

SEQ ID NO: 46219 - DNA, 411 bp, Oryza sativa
  CDS (1)..(411)
atggcgggaaaaggaggtaagggcttgctcgccgcgaagacgacggccgcctcggcggagaaggacaaggggaagaaggcccccgtctcccgctcgtcccgcgctggtctccagttccctgttggccgtatccatcgccagttgaagcaaaggactcaggcaaatggacgtgttggtgctactgccgcagtttactctgctgctattctggagtacttaacagctgaggttctggaactggctgggaacgctagcaaggatctgaaggtcaagcgtatcacccctcgccatctgcagcttgccatccgtggagatgaggagctcgacactctcatcaagggtaccatcgctggtggaggtgtcattcctcacatccacaagtccctgatcaacaagtcctccaaagagtga

SEQ ID NO: 46220 - protein, 136 aa, Oryza sativa
MAGKGGKGLLAAKTTAASAEKDKGKKAPVSRSSRAGLQFPVGRIHRQLKQRTQANGRVGATAAVYSAAILEYLTAEVLELAGNASKDLKVKRITPRHLQLAIRGDEELDTLIKGTIAGGGVIPHIHKSLINKSSKE

SEQ ID NO: 46221 - DNA, 408 bp, Oryza sativa
  CDS (1)..(408)
atgtcagggaaaggggcgaaggggttgatcacaggcaaaacctccgccgccaacaacaaagacaaggacaagaagaaacccatctcgcgttcttcacgtgccggccttcagttcccagttggccgtatccaccggcttttgaagtcaaggacaaccgccaacggtagagttggggccacagctgctgtctactctgctgctatcttggagtatctcactgctgaagtattggagctggcggggaatgctagcaaggatctcaaggtcaagcgtattactccccggcatctacagctagcaatccgtggggacgaagagctggataccctgataaaaggaacaattgctggaggaggagtgattcctcacatccacaagtctcttatcaacaagtcttccaaggagtag

SEQ ID NO: 46222 - protein, 135 aa, Oryza sativa
MSGKGAKGLITGKTSAANNKDKDKKKPISRSSRAGLQFPVGRIHRLLKSRTTANGRVGATAAVYSAAILEYLTAEVLELAGNASKDLKVKRITPRHLQLAIRGDEELDTLIKGTIAGGGVIPHIHKSLINKSSKE

SEQ ID NO: 46223 - DNA, 408 bp, Brassica napus
  CDS (1)..(408)
atgtcggggaaaggagcgaaaggattgataatggggaaacctagcggtagcgagaaggacaaggacaagaagaaacaacccatcacccgttctgctcgagctggtcttcagttccctgtaggaagggtgcatcgactgttgaagactaggtccactgctcacggaagggttggagcaactgcagctgtttacactgcagcgatattggagtatctgaccgcagaagttttggagctggctggtaacgcgagcaaggacctcaaggtgaaacgtatctcccccaggcacttgcagcttgcgattcgcggagatgaagagctagatactctcatcaaaggaactatagctggtggtggtgtcatccctcacatccacaagtctctcatcaacaaatccgccaaggaatag

SEQ ID NO: 46224 - protein, 135 aa, Brassica napus
MSGKGAKGLIMGKPSGSEKDKDKKKQPITRSARAGLQFPVGRVHRLLKTRSTAHGRVGATAAVYTAAILEYLTAEVLELAGNASKDLKVKRISPRHLQLAIRGDEELDTLIKGTIAGGGVIPHIHKSLINKSAKE

SEQ ID NO: 46225 - DNA, 408 bp, Brassica napus
  CDS (1)..(408)
atgtcggggaaaggagcgaagggtttgataatggggaaacccagtggtaacgagaaggataaggacaagaagaaacaacccatcacccgttctgctcgagctggtcttcagttcccagtaggaagggtgcataggctgttgaagacaaggtccactgctcacggaagagttggagcaactgctgctgtctacacagcagcaatattggagtatctgaccgcagaagttttggagttggctggtaacgcgagcaaggacctcaaggtgaaacgtatctccccaaggcacttgcagcttgcgattcgtggagatgaagagctggatactctcatcaaaggaactatagctggtggtggtgtcatccctcacatccacaagtctctcatcaacaaatccgccaaggaatag

SEQ ID NO: 46226 - protein, 135 aa, Brassica napus
MSGKGAKGLIMGKPSGNEKDKDKKKQPITRSARAGLQFPVGRVHRLLKTRSTAHGRVGATAAVYTAAILEYLTAEVLELAGNASKDLKVKRISPRHLQLAIRGDEELDTLIKGTIAGGGVIPHIHKSLINKSAKE

SEQ ID NO: 46227 - DNA, 474 bp, Brassica napus
  CDS (1)..(474)
atggagtcatcagcagcagcaaccaagccagcgagaggtggaagaaggggaggagaccgcaagaagagcgtctccaagtccgtcaaagccggtctccagttccccgtcggtcgtatcgctcgttaccttaagaaaggccgttacgcggtcaggtacggctccggcgctccggtctacctcgccgctgttctcgagtacctcgccgccgaggttcttgagctagctggaaacgcggcgagggataacaagaagaacaggataaacccgaggcatctttgtttggcgataaggaacgatgaggagctggggaagctgttgcacggtgtgacgatagcgagtggcggtgtgcttccgaatatcaacccggttctgcttcctaagaggactgctggttcgtctcaaggtgagaaagtgaaagcagagaaagtgaaagcttcttcgccggctaagaagctttctcccaagaagggttga

SEQ ID NO: 46228 - protein, 157 aa, Brassica napus
MESSAAATKPARGGRRGGDRKKSVSKSVKAGLQFPVGRIARYLKKGRYAVRYGSGAPVYLAAVLEYLAAEVLELAGNAARDNKKNRINPRHLCLAIRNDEELGKLLHGVTIASGGVLPNINPVLLPKRTAGSSQGEKVKAEKVKASSPAKKLSPKKG

SEQ ID NO: 46229 - DNA, 402 bp, Brassica napus
  CDS (1)..(402)
atggcgggtcgtggaaaaactctcggatctggggttgctaagaaggcgacgtctcggagcagtaaggccggtctccagttccccgtcggtcgtatcgcccggttcttgaagaacggcaagtacgccgaacgtgtcggcgccggtgctccggtctacttggccgccgtactcgaatacctcgccgcggaggttttagaattggctgggaacgcggcgagggacaacaagaagacaagaatcgtgccgcgtcacattcaattggcggtgaggaacgacgaggagctgagcaagttgcttggagacgtgacgattgctaatggaggtgtgatgcccaacattcacaatcttcttcttcccaagaaggctggtggtgcttccaaaccttccggtgacgacgaatag

SEQ ID NO: 46230 - protein, 133 aa, Brassica napus
MAGRGKTLGSGVAKKATSRSSKAGLQFPVGRIARFLKNGKYAERVGAGAPVYLAAVLEYLAAEVLELAGNAARDNKKTRIVPRHIQLAVRNDEELSKLLGDVTIANGGVMPNIHNLLLPKKAGGASKPSGDDE

SEQ ID NO: 46231 - DNA, 447 bp, Brassica napus
  CDS (1)..(447)
atggagtcaccagcagcagcagcagcagcgaagccggcgagaggaggagcaggaggaagaaaaggaggagatcgcaagaagagcgtcaccaaatccgtcaaggctggtctccagtttcccgtcggccgcatctctcgctacctgaagaaaggccgttacgccgttaggtacggcgccggcgctcccgtttacctcgccgccgttctcgagtacctcgccgcggaggttttggagctggcggggaacgcagcgagggataataagaagaacaggataaaccctaggcatctttgcttggcgataaggaacgatgaggagctggggaagcttcttcatggagtcaccatctcaagcggaggagttcttcctaacattaacccggttcttctccccaagagagctgctggttctgagaaagcagctgcgaaatctcccaagaaggcttag

SEQ ID NO: 46232 - protein, 148 aa, Brassica napus
MESPAAAAAAKPARGGAGGRKGGDRKKSVTKSVKAGLQFPVGRISRYLKKGRYAVRYGAGAPVYLAAVLEYLAAEVLELAGNAARDNKKNRINPRHLCLAIRNDEELGKLLHGVTISSGGVLPNINPVLLPKRAAGSEKAAAKSPKKA

SEQ ID NO: 46233 - DNA, 447 bp, Brassica napus
  CDS (1)..(447)
atggaaaccaccggaaaagtgaagaaggcttttggaggaagaaaagccggtggcccaaaaaccaaatcggtttcgaaatcgatcaaagccggtctccagttccccgtcggaagaatcacacgtttcctgaagaagggacggtacgctcagagactcggtggtggagctccggtctacatggccgccgttcttgagtacctcgcagccgaagttcttgagcttgctggtaacgcagcgagagacaacaagaagtcgaggatcattccgaggcatcttcttttggcgattaggaacgatgaagagttggggaagcttctgagtggagttacgatcgctcacggtggtgtgttgccgaacattaactctgttctattgcctaagaagtctgctaaatcgactgaggaagttgcgtccaagtcgccagctaaatctccgaagaaagcttaa

SEQ ID NO: 46234 - protein, 148 aa, Brassica napus
METTGKVKKAFGGRKAGGPKTKSVSKSIKAGLQFPVGRITRFLKKGRYAQRLGGGAPVYMAAVLEYLAAEVLELAGNAARDNKKSRIIPRHLLLAIRNDEELGKLLSGVTIAHGGVLPNINSVLLPKKSAKSTEEVASKSPAKSPKKA

SEQ ID NO: 46235 - DNA, 429 bp, Brassica napus
  CDS (1)..(429)
atgagcaccggcgcagcaagcggcacgacgaaaggagggagaggaaagccaaaggccaccaagtccgtctctcgttcctccaaggccggtctccagttccccgtcgggagaatcgcgagattcctcaaggccggtaaatacgcagagcgtgtcggtgccggagctccggtttacctctccgccgttctagagtacctcgccgctgaggtgttggagctcgctggaaacgcggcgagggataacaagaagacgcgtattgtcccgaggcatattcagcttgcggtgaggaacgatgaggagctgagtaagcttctgggagctgtgacgattgctaacggaggagtgttgccgaatattcattcgaatcttttgccttccaaggttgggaagaacaaaggagatattggatctgcttctcaagagttttga

SEQ ID NO: 46236 - protein, 142 aa, Brassica napus
MSTGAASGTTKGGRGKPKATKSVSRSSKAGLQFPVGRIARFLKAGKYAERVGAGAPVYLSAVLEYLAAEVLELAGNAARDNKKTRIVPRHIQLAVRNDEELSKLLGAVTIANGGVLPNIHSNLLPSKVGKNKGDIGSASQEF

SEQ ID NO: 46237 - DNA, 429 bp, Brassica napus
  CDS (1)..(429)
atgagcaccggcgcaggaagcggcacgaccaaaggcggtagaggaaagccaaaggccaccaagtccgtctctcgatcctcgaaggccggtcttcagttccccgtcgggagaatcgccagattcctcaaggcagggaaatacgccgagcgtgtcggcgccggagctccggtctatctctccgccgttctcgagtacctcgccgctgaggtgttggagcttgctggaaacgcggcgagggataacaagaagacgcgtatcgtgccgaggcacattcagctcgcggtgaggaacgataaggagctgagtaagcttctgggagctgtgacgattgcgaacggtggcgttttgcccaacattcattcgaaccttttgccttccaaggttgggaagaacaagggagacattggatctgcttctcaagagttctga

SEQ ID NO: 46238 - protein, 142 aa, Brassica napus
MSTGAGSGTTKGGRGKPKATKSVSRSSKAGLQFPVGRIARFLKAGKYAERVGAGAPVYLSAVLEYLAAEVLELAGNAARDNKKTRIVPRHIQLAVRNDKELSKLLGAVTIANGGVLPNIHSNLLPSKVGKNKGDIGSASQEF

SEQ ID NO: 46239 - DNA, 393 bp, Brassica napus
  CDS (1)..(393)
atggcaggtcgcggaaaaactctcggatccggtgcggcgaagaaagccacgtctcgtagcagcaaggcggggctccaattcccggtgggtcgtatcgctcgattcctcaaagccggtaaatacgccgaacgtgtcggagctggtgctccggtttatctcgccgccgtcctcgagtatctagccgccgaggtacttgaacttgctggaaacgcagcaagagacaacaagaagacacgtatcgtccctcgtcacatccagctcgccgtgagaaacgatgaggagctaagcaagcttcttggagatgtgactattgctaatggaggagtgatgcccaatatccacaatctcctcctccccaagaagtctggtccttcaaaacctcaggaagattag

SEQ ID NO: 46240 - protein, 130 aa, Brassica napus
MAGRGKTLGSGAAKKATSRSSKAGLQFPVGRIARFLKAGKYAERVGAGAPVYLAAVLEYLAAEVLELAGNAARDNKKTRIVPRHIQLAVRNDEELSKLLGDVTIANGGVMPNIHNLLLPKKSGPSKPQED

SEQ ID NO: 46241 - DNA, 405 bp, Brassica napus
  CDS (1)..(405)
atggcaggtaaaggcggaaaggggcttatcgccacaaagactacgacgacggctgctaacaaggacaagaagaaatccatctctcgctcttctcgtgccggtattcagtttccagtgggtcgtatccatcgtcaactcaagacacgtgtttcagcacatgggagagttggtgccaccgctgcagtctacacagcatcgattcttgagtacttgactgcagaagttctcgagttagctggaaacgccagcaaagatctgaaagtgaagaggatcactccgaggcatttgcagcttgcgatcagaggagatgaggagcttgacactctcatcaaaggaacaatcgctggaggtggtgtcatcccccacatccacaagtccctcgtcaacaagatcgccaatgagtga

SEQ ID NO: 46242 - protein, 134 aa, Brassica napus
MAGKGGKGLIATKTTTTAANKDKKKSISRSSRAGIQFPVGRIHRQLKTRVSAHGRVGATAAVYTASILEYLTAEVLELAGNASKDLKVKRITPRHLQLAIRGDEELDTLIKGTIAGGGVIPHIHKSLVNKIANE

SEQ ID NO: 46243 - DNA, 387 bp, Glycine max
  CDS (1)..(387)
atgtcagggaaaggcgcaaagggtttgataactgctaaggacaaagataagaaaaaaccaatttctcgctcctcaagagccggtcttcagtttcctgttggacgcattcatcgtcttctgaagtcaagggtgacagcacatggaagagttggggcaacagctgcagtttattctgctgccatcctggagtatttaactgcagaggtgttggagttggctggcaatgcgagcaaggatctgaaggtgaagcgtattaccccaagacatctacagcttgccatccgtggagatgaagaacttgataccctcatcaaaggaacaatagctggtggaggtgttattcctcatatccacaagtcccttatcaacaaatcttcgaaggaatga

SEQ ID NO: 46244 - protein, 128 aa, Glycine max
MSGKGAKGLITAKDKDKKKPISRSSRAGLQFPVGRIHRLLKSRVTAHGRVGATAAVYSAAILEYLTAEVLELAGNASKDLKVKRITPRHLQLAIRGDEELDTLIKGTIAGGGVIPHIHKSLINKSSKE

SEQ ID NO: 46245 - DNA, 420 bp, Triticum aestivum
  CDS (1)..(420)
atggctattgccggcagtgggaggggcaaggcgaagcccgccgccagcgccaagtccgtgtcacggtcgtccaaggccggcctgcagttccccgtcggccgcgtcgcccggtacctcaaggtcggcaagtacgcgcagcgcgtcggcgccggcgcccccgtctacctcgccgccgtcctcgagtacctcgctgccgagaccctggagctcgccgggaacgcggcgcgcgacaataagaagaaccggatcgtgccgcgccacatccagctggcggtgcgcaacgacgaggagctgagccgtctgctgggctcggtcaccatcgccgccggcggggttctgcccagcatccacaccacgctgctccccaagaaggccggcaagggcaagggcgacatcggctccgcttcccaggagttctag

SEQ ID NO: 46246 - protein, 139 aa, Triticum aestivum
MAIAGSGRGKAKPAASAKSVSRSSKAGLQFPVGRVARYLKVGKYAQRVGAGAPVYLAAVLEYLAAETLELAGNAARDNKKNRIVPRHIQLAVRNDEELSRLLGSVTIAAGGVLPSIHTTLLPKKAGKGKGDIGSASQEF

SEQ ID NO: 46247 - DNA, 414 bp, Triticum aestivum
  CDS (1)..(414)
atggccgggaagggaggcaagggcctgctcgcggccaagacgacggccgccaagaccgccgagaaggacaaggggaagaaggcccccatctcccgctcgtcccgcgcggggctccagttccctgtgggccgtatccatcgtcagctgaagcaaaggactcaggccaatggccgtgttggtgctactgcggcggtctactctgctgctatcctggagtacctgacagctgaggtcctggagctggctggcaacgccagcaaggatctcaaggtgaagcgtatcacccctcgtcacctccagctggccatccgtggagacgaggagcttgacaccctcatcaagggcaccattgctggtggaggtgtgatcccgcacatccacaagtccctgatcaacaagtcctccaaagagtga

SEQ ID NO: 46248 - protein, 137 aa, Triticum aestivum
MAGKGGKGLLAAKTTAAKTAEKDKGKKAPISRSSRAGLQFPVGRIHRQLKQRTQANGRVGATAAVYSAAILEYLTAEVLELAGNASKDLKVKRITPRHLQLAIRGDEELDTLIKGTIAGGGVIPHIHKSLINKSSKE

SEQ ID NO: 46249 - DNA, 468 bp, Triticum aestivum
  CDS (1)..(468)
atggacgtctcagccaccggagcaggcgcgaaggccaagaagggcgccgcagggcgcaaggccggcggcccaaggaagaagtccgtgtcgaggtccgtcaaggccgggctccagttcccggtcggccgcatcgggcggtacctcaagaagggccggtacgcgcagcgcgtcggtaccggagctcccgtctacctctcggccgtcctcgagtacctcgccgccgaggtgctggagctcgccggcaacgccgccaaggacaacaagaagagccgcatcatcccgaggcacctgctgctcgccgtgaggaacgacgaggagctcgggaagctgctggccggcgtcaccatcgcgcacggcggcgtggtgcccaagatcaacccggtgctgctccccaagcggacggcggagaaggcgcccaaggagggcaagtcgcccaagaaggccgccaagtcccccaagaaggcttag

SEQ ID NO: 46250 - protein, 155 aa, Triticum aestivum
MDVSATGAGAKAKKGAAGRKAGGPRKKSVSRSVKAGLQFPVGRIGRYLKKGRYAQRVGTGAPVYLSAVLEYLAAEVLELAGNAAKDNKKSRIIPRHLLLAVRNDEELGKLLAGVTIAHGGVVPKINPVLLPKRTAEKAPKEGKSPKKAAKSPKKA

SEQ ID NO: 46251 - DNA, 465 bp, Triticum aestivum
  CDS (1)..(465)
atggacggcagcaaggcgaagaaggtggcggcgaagaagttcggcgggccgaggaagaagtcggtgaccaagtccatcaaggccgggctccagttccccgtcggccgcatcgggcgctacctcaagaagggccgctacgcccagcgcgtcggctccggcgcccccgtctacctcgccgccgtcctcgagtacctcgcagcagaggtgctggagctggccgggaacgccgccaaggacaacaagaagacccggatcgtgcccaggcacctgctgctggccatccgcaacgaccaggagctcgggaggctgctgagcggcgtcaccatcgcccacggcggcgtgatccccaacatcaacccggtgctgctccccaagaaggccgctgagaaggctgagaaggccggcgccgcccccaagtcgcccaagaagaccaccaagtcccccaagaaggccaccaaggcctag

SEQ ID NO: 46252 - protein, 154 aa, Triticum aestivum
MDGSKAKKVAAKKFGGPRKKSVTKSIKAGLQFPVGRIGRYLKKGRYAQRVGSGAPVYLAAVLEYLAAEVLELAGNAAKDNKKTRIVPRHLLLAIRNDQELGRLLSGVTIAHGGVIPNINPVLLPKKAAEKAEKAGAAPKSPKKTTKSPKKATKA

SEQ ID NO: 46253 - DNA, 420 bp, Triticum aestivum
  CDS (1)..(420)
atggccgggaaaggaggcaaggggctgcttgcggcgaagacgacggcggccaagggcgccgccgacaaggacaaggacaagaagaaggcgcccgtgtcccgctcctcccgcgccgggattcagttcccggtgggacgtatacacaggcagctcaagcagagggtctcggctaatggccgtgtgggtgccactgctgctgtgtactctgcagcaatccttgagtaccttactgccgaggtccttgagctggccggcaacgctagcaaggatctcaaggtgaagcgtatcacccctcgccacctgcagcttgcgatccgtggagatgaggagctggacaccctcatcaagggcaccatcgctggtggtggtgtcatccctcacatccacaagtcactcatcaacaagacctccaaggagtga

SEQ ID NO: 46254 - protein, 139 aa, Triticum aestivum
MAGKGGKGLLAAKTTAAKGAADKDKDKKKAPVSRSSRAGIQFPVGRIHRQLKQRVSANGRVGATAAVYSAAILEYLTAEVLELAGNASKDLKVKRITPRHLQLAIRGDEELDTLIKGTIAGGGVIPHIHKSLINKTSKE

SEQ ID NO: 46255 - DNA, 480 bp, Triticum aestivum
  CDS (1)..(480)
atggacgcctcagccaccggagccggagcgaaggcgaagaagggcgcggccgggcgcaaggccggcggccccaggaagaagtcggtgacgaggtccgtcaaggccgggctccagttccctgtcggccgcatcgggcgctacctcaagaagggccggtacgccaagcgcgtcggcacgggcgcccccgtctacctcgccgccgtcctcgagtacctcgccgcggagctgctggagctcgccgggaacgccgccaaggacaacaagaagtcccgcatcgtgcccaggcacctgctgctcgccgtgaggaatgaccaggagctcgggaggctgctggccggcgtgaccatcgcgcacggcggcgtgctgcccaacatcaacccggtgctgctgcccaagaggacggcggagaaggagcccaaggagggcaagtcgcccaagaagaccgccaagtcccccaagaaggccgacaagaaggcttag

SEQ ID NO: 46256 - protein, 159 aa, Triticum aestivum
MDASATGAGAKAKKGAAGRKAGGPRKKSVTRSVKAGLQFPVGRIGRYLKKGRYAKRVGTGAPVYLAAVLEYLAAELLELAGNAAKDNKKSRIVPRHLLLAVRNDQELGRLLAGVTIAHGGVLPNINPVLLPKRTAEKEPKEGKSPKKTAKSPKKADKKA

SEQ ID NO: 46257 - DNA, 423 bp, Triticum aestivum
  CDS (1)..(423)
atggcgacaacggcagccggcggcgggaggggcaagccgaagggcagcaagtcggtgtcgcggtcggtgaaggcgggcctgcagttccccgtcggccgcgtcgcccggcacctcaaggtcggccgctacgcgaagcgcgtgggcgcgggcgcccccgtctacctctgcgccgtcctcgagtacctcgccgccgaggccctggagctggccggcaacgcggcgcgcgacaacaagaagacccggatctcgccgcgccacatccagctcgccgtccgcaacgacgaggagctcagccggctgctcggcggcgtcaccatcgccgccggcggcgtcctgcccaacatccactcggtgctcctccccaagaaggtcggcaagggcgccggcaccggcgggtccgcatcccagtcccaggagttttag

SEQ ID NO: 46258 - protein, 140 aa, Triticum aestivum
MATTAAGGGRGKPKGSKSVSRSVKAGLQFPVGRVARHLKVGRYAKRVGAGAPVYLCAVLEYLAAEALELAGNAARDNKKTRISPRHIQLAVRNDEELSRLLGGVTIAAGGVLPNIHSVLLPKKVGKGAGTGGSASQSQEF

SEQ ID NO: 46259 - DNA, 474 bp, Zea mays
  CDS (1)..(474)
atggacgccagcggagccggtagcaaggggaagaagggggcggccgggcgcaaggcaggcggccccaggaagaagtcggtgacgcggtccgtcaaggccgggctgcagttccccgtcggccggatcgggcgctacctcaagaagggccggtacgcgcagcgcgtgggcactggcgcccccgtctacctcgccgccgttctggagtacctcgccgccgaggttctggagttggcagggaacgcggcgaaagacaacaagaagacgcgcatcatcccgcgccacgtgctcctggcgatccgcaacgacgaggagctcgggaagctgctggccggcgtcaccatcgcgcacggtggcgtcctccccaacatccactccgtgctcctgcccaagaaggcggcggagaaggcggccagcggcggcagcaaggagcccaagtcccccaagaagggcgccaagtcccccaagaaggcttag

SEQ ID NO: 46260 - protein, 157 aa, Zea mays
MDASGAGSKGKKGAAGRKAGGPRKKSVTRSVKAGLQFPVGRIGRYLKKGRYAQRVGTGAPVYLAAVLEYLAAEVLELAGNAAKDNKKTRIIPRHVLLAIRNDEELGKLLAGVTIAHGGVLPNIHSVLLPKKAAEKAASGGSKEPKSPKKGAKSPKKA

SEQ ID NO: 46261 - DNA, 480 bp, Zea mays
  CDS (1)..(480)
atggactccaccggcaccggagcagggggtaaggggaagaagggagcggccgggcgcaaggtcggcgggccaaggaagaagtcggtgtcgaggtccgtgaaggccgggctccagttccccgtcggccgcatcgggcgctacttgaagaagggccgctacgcgcagcgtgtcggcaccggcgcccccgtctacctcgccgctgtcctcgaatacctcgccgctgaggttctggagctcgctggtaatgctgccagggacaacaagaagactcgcattattccgcgccacgtgcttctggcgatccggaacgacgaggagcttgggaagctgctgggcggcgtgaccatcgctcacggcggtgtgctccccaatatcaaccctgttctgctgcccaagaagacggcggagaaggcgtccagtgtggggagcaaggaggcaaagtcgcccaagaaggccgccaagtcccccaagaaggcatag

SEQ ID NO: 46262 - protein, 159 aa, Zea mays
MDSTGTGAGGKGKKGAAGRKVGGPRKKSVSRSVKAGLQFPVGRIGRYLKKGRYAQRVGTGAPVYLAAVLEYLAAEVLELAGNAARDNKKTRIIPRHVLLAIRNDEELGKLLGGVTIAHGGVLPNINPVLLPKKTAEKASSVGSKEAKSPKKAAKSPKKA

SEQ ID NO: 46263 - DNA, 453 bp, Triticum aestivum
  CDS (1)..(453)
atggccgggaggaagggcggcgagaggaagaaggcggtgacccggtccgtgaaggccgggctccagttccccgtcggccgcatcgggcgcttcctcaagaagggccgctacgcgcagcgcgtcggctccggcgcccccgtctacctcgccgccgtcctcgagtacctcgccgccgaggtcctggagctggccggcaacgcggccaaggacaacaagaagacgcgcatcgtgccgcggcacctgctgctggccgtccgcaacgaccaggagctcggcaggctgctggccggcgtcaccatcgcccacggcggcgtgatccccaacatcaaccccgtgctgctgcccaagaagtccgccgccgccgccgccgagaaggaggccaccgccaagtcgcccaagaagaaggccgccgccaagtcccccaagaagaaggccgccgccaccaaggagtag

SEQ ID NO: 46264 - protein, 150 aa, Triticum aestivum
MAGRKGGERKKAVTRSVKAGLQFPVGRIGRFLKKGRYAQRVGSGAPVYLAAVLEYLAAEVLELAGNAAKDNKKTRIVPRHLLLAVRNDQELGRLLAGVTIAHGGVIPNINPVLLPKKSAAAAAEKEATAKSPKKKAAAKSPKKKAAATKE

SEQ ID NO: 46265 - DNA, 474 bp, Triticum aestivum
  CDS (1)..(474)
atggagaccggagcgaaggcgccgaagaaggccgggcgccgggccggcggcggcggccccaagaagaagtccgtctcgcgctccgtcaaggccggcctccagttccccgtgggccgcatcgggcgctacctcaagcacgggcgctacgccaagcgcgtcggctccggcgcccccgtctacctcgccgccgtcctcgagtacctcgccgccgagctcctcgagctggcggggaacgcggcgcgggacaacaagaagaaccggatcatcccgcggcacgtgctgctcgcgatccgcaacgacgaggagctcgggaagctgctggccggggtcaccatcgcctacggaggcgtcctgcccaacatcaaccctgtgctgctgcccaagaaggccgctgcggcggctaccaaggagcccaaggcgggcacgaccaagtctcccaggaagtcccccgccaagaaggcggccgacgcttag

SEQ ID NO: 46266 - protein, 157 aa, Triticum aestivum
METGAKAPKKAGRRAGGGGPKKKSVSRSVKAGLQFPVGRIGRYLKHGRYAKRVGSGAPVYLAAVLEYLAAELLELAGNAARDNKKNRIIPRHVLLAIRNDEELGKLLAGVTIAYGGVLPNINPVLLPKKAAAAATKEPKAGTTKSPRKSPAKKAADA

SEQ ID NO: 46267 - DNA, 462 bp, Triticum aestivum
  CDS (1)..(462)
atggaagcctcagccgccggcgccgtcgcgaaggcgaagaagtacgtggtggggcgcaagctcggcggcgggcccaggaagcaggcggtggcgcggtccgtcaaggccgggctgcagttccccgtcggccgcatcgggcggttcctcaagaagggccgctacgcgcagcgcgtcggcatgggcgcccccgtctacctcgcctccgtcctcgagtacctcgccgccgagctgctggagctcgccgggaacgccgccaaggacaacaagaagtcccgcatcatcccgcgccacctgctgctcgccatccggaacgaccaggagctcggcaggctgctcgccggcgtcaccatcgcccacggcggcgtgctgcccaacatcaaccccgtgctgctccccaagaaggcggccgacaaggagcccaagtcgcccaagaaggccgccaagtcccccaagaaggcctag

SEQ ID NO: 46268 - protein, 153 aa, Triticum aestivum
MEASAAGAVAKAKKYVVGRKLGGGPRKQAVARSVKAGLQFPVGRIGRFLKKGRYAQRVGMGAPVYLASVLEYLAAELLELAGNAAKDNKKSRIIPRHLLLAIRNDQELGRLLAGVTIAHGGVLPNINPVLLPKKAADKEPKSPKKAAKSPKKA

SEQ ID NO: 46269 - DNA, 471 bp, Zea mays
  CDS (1)..(471)
atggacgcgagcgcagccggagccggcgggaaggcgaagaagggcgcggccgggcgcaaggccggcgggccgaggaagaagtcggtgacgaggtccgtcaaggccgggctgcagtttcccgtcggccgcatcgggcggtacctgaagaagggccggtacgcgcagcgcgtcggcacgggcgcccccgtctacctggccgccgtcctcgagtacctggccgccgaggtgctggagctggccggcaacgctgccaaggacaacaagaagacccgcatcatcccgcgccacgtgctccttgccatccgcaacgacgaggagctcggcaagctgctgtccggcgtcaccatcgcccacggcggcgtcctccccaacatcaacccggtgctcctgcccaagaagaccgctgagaaggcggcggccaaggaggccaagtcgcccaagaaggccgccaagtcccccaagaaggcatag

SEQ ID NO: 46270 - protein, 156 aa, Zea mays
MDASAAGAGGKAKKGAAGRKAGGPRKKSVTRSVKAGLQFPVGRIGRYLKKGRYAQRVGTGAPVYLAAVLEYLAAEVLELAGNAAKDNKKTRIIPRHVLLAIRNDEELGKLLSGVTIAHGGVLPNINPVLLPKKTAEKAAAKEAKSPKKAAKSPKKA

SEQ ID NO: 46271 - DNA, 399 bp, Zea mays
  CDS (1)..(399)
atggccgggaagggaggagggaagtcgctggtcgccgcgaagatagcggctggcatggacaaggacaagaagtcgccggtcaaccgctccgcgcgcgccggcctccatttccctgtgggacgcatccaccgccacctgaaggatagcgcacaggccggcgagcgggtgggggcgacggcggccgtgtacgcggcggccgtcctggagtacctgacggcggagatcatggagctggccgggaacgcgtgcagggacctcaaggtgaagcgcatcaccccgcggcacctccagctggcggtacgcggggacgaggagctggacaccctgatcaaggccaccatcgccggcggcggcgtcatcccccacatccacagggagctcatcgacaaggctgcctag

SEQ ID NO: 46272 - protein, 132 aa, Zea mays
MAGKGGGKSLVAAKIAAGMDKDKKSPVNRSARAGLHFPVGRIHRHLKDSAQAGERVGATAAVYAAAVLEYLTAEIMELAGNACRDLKVKRITPRHLQLAVRGDEELDTLIKATIAGGGVIPHIHRELIDKAA

SEQ ID NO: 46273 - DNA, 414 bp, Zea mays
  CDS (1)..(414)
atggactccaccggcaccggagcagggggtaaggggaagaagggagcggccgggcgcaaggtcggcgggccaaggaagaagtcggtgtcgaggtccgtgaaggccgggctccagttccccgtctacctcgccgctgtcctcgaatacctcgccgctgaggttctggagctcgctggtaatgctgccagggacaacaagaagactcgcattattccgcgccacgtgcttctggcgatccggaacgacgaggagcttgggaagctgctgggcggcgtgaccatcgctcacggcggtgtgctccccaatatcaaccctgttctgctgcccaagaagacggcggagaaggcgtccagtgtggggagcaaggaggcaaagtcgcccaagaaggccgccaagtcccccaagaaggcatag

SEQ ID NO: 46274 - protein, 137 aa, Zea mays
MDSTGTGAGGKGKKGAAGRKVGGPRKKSVSRSVKAGLQFPVYLAAVLEYLAAEVLELAGNAARDNKKTRIIPRHVLLAIRNDEELGKLLGGVTIAHGGVLPNINPVLLPKKTAEKASSVGSKEAKSPKKAAKSPKKA

SEQ ID NO: 46275 - DNA, 495 bp, Zea mays
  CDS (1)..(495)
atggacgccagcggagccggtagcaaggcgaagaagggggcggctgggcgcaaggctggcggccccaggaagaagtcggtgtcgcggtccgtcaaggccgggctgcagttccccgtcggccggatcgggcgctacctcaagaagggccggtacgcgcagcgcgtgggcaccggcgcccccgtctatctcgccgccgtgcttgagtacctcgccgccgaggtgctggagctggccggcaacgcggcgaaggacaacaagaagacgcgcatcgtcccgcgccacgtgctcctggcgatccgcaacgacgttgagctcggcaagctgctggctggcgtcaccatcgcgcacggcggtgtcctccccaacatcaacccggttctcctgcccaagaaggtggcggagaaggcgtctagcggcggcagcaaggagagcaagtcccctaagaaggccgccaagtccccaaagaaggcagccaagtccccgaagaaggcttag

SEQ ID NO: 46276 - protein, 164 aa, Zea mays
MDASGAGSKAKKGAAGRKAGGPRKKSVSRSVKAGLQFPVGRIGRYLKKGRYAQRVGTGAPVYLAAVLEYLAAEVLELAGNAAKDNKKTRIVPRHVLLAIRNDVELGKLLAGVTIAHGGVLPNINPVLLPKKVAEKASSGGSKESKSPKKAAKSPKKAAKSPKKA

SEQ ID NO: 46277 - DNA, 411 bp, Linum usitatissimum
  CDS (1)..(411)
atggcagggaaaggagggaaagggcttgtggctgccaagactactgcagctaacaaggataaggataaggacaagaagagacctacctccagatcttcccgtgctggcatccagtttccagtgggtaggattcatcgtcatctaaagcaaaggattgcagcccacggccgagtcggggccactgctgcggtatacttggcttcaattctggagtacttgactgctgaggtgctcgagcttgctgggaatgcaagtaaggatttgaaagtgaagagaatcacaccaaggcatctgcagctggccattagaggagatgaggaactcgatactctgatcaagggcaccattgccggtggaggtgtcatccctcacatccacaagtctctcatcaacaagaccaccaaggactga

SEQ ID NO: 46278 - protein, 136 aa, Linum usitatissimum
MAGKGGKGLVAAKTTAANKDKDKDKKRPTSRSSRAGIQFPVGRIHRHLKQRIAAHGRVGATAAVYLASILEYLTAEVLELAGNASKDLKVKRITPRHLQLAIRGDEELDTLIKGTIAGGGVIPHIHKSLINKTTKD

SEQ ID NO: 46279 - DNA, 414 bp, Zea mays
  CDS (1)..(414)
atgagttccaccggaggcagcggccgtgggaaggcgaagccagcgaccaagtctgtgtcgcggtcttccaaggctgggctccagttccccgtcggccgcatcgcgcggtacctcaaggccggcaagtacgcggagcgcgtaggcgccggggctcccgtgtacctctccgccgtcctcgagtacctcgccgccgaggtgctggagctggccgggaacgctgctcgggacaacaagaagaaccggatcgtgccgcgccacattcagctggcggtgcggaacgacgaggagctgagcaagcttctgggcactgtgacgatcgcggccggcggcgtgatgcctaacatccaccaaaatttgctgcctaagaaggctggtaacaagggggacatcggctccgcctcccaggagttctga

SEQ ID NO: 46280 - protein, 137 aa, Zea mays
MSSTGGSGRGKAKPATKSVSRSSKAGLQFPVGRIARYLKAGKYAERVGAGAPVYLSAVLEYLAAEVLELAGNAARDNKKNRIVPRHIQLAVRNDEELSKLLGTVTIAAGGVMPNIHQNLLPKKAGNKGDIGSASQEF

SEQ ID NO: 46281 - DNA, 414 bp, Zea mays
  CDS (1)..(414)
atggctgggaagggaggaaaaggattgctcgccgcgaagacgacggcggccaagtcggcggagaaggacaaggggaagaaggcccccatctcacggtcctcccgcgcgggcctccagtttcctgttggacgaatccaccgtcagctgaagcaaaggactcaggcaaatggccgcgttggtgccactgcagccgtctactccgccgccatcctggagtacttaactgccgaggttctggagctggctgggaacgctagcaaggatctgaaggtgaagcgtaccacccctcgccacctacagttggccattcgcggagacgaggagctggataccctcatcaagggcaccatcgcaggtggaggcgtcatcccgcacatccacaagtccctgatcaacaagtcctccaaggagtga

SEQ ID NO: 46282 - protein, 137 aa, Zea mays
MAGKGGKGLLAAKTTAAKSAEKDKGKKAPISRSSRAGLQFPVGRIHRQLKQRTQANGRVGATAAVYSAAILEYLTAEVLELAGNASKDLKVKRTTPRHLQLAIRGDEELDTLIKGTIAGGGVIPHIHKSLINKSSKE

SEQ ID NO: 46283 - DNA, 408 bp, Zea mays
  CDS (1)..(408)
atggcggggagaggtaaggcgatcggctcaggcgccgccaagaaggccacgtccaggagctccaaggctggcctccagttccccgtgggaaggatcgccaggttcctcaaggccggcaagtatgccgagagagtcggcgccggcgcccctgtctacctcgctgccgtgctcgagtatcttgctgctgaggttcttgagctggccggcaatgcggcacgtgacaacaagaagacccgcatcgtaccgcgccacatccagctcgccgtccgcaacgacgaagagctctcccgcttgctgggcacggtgaccatcgctagcggtggtgtcatgcccaacatccataacctgcttctcccgaagaaggccggcggcggcagcgccaaggctgcggctggtgacgaggactaa

SEQ ID NO: 46284 - protein, 135 aa, Zea mays
MAGRGKAIGSGAAKKATSRSSKAGLQFPVGRIARFLKAGKYAERVGAGAPVYLAAVLEYLAAEVLELAGNAARDNKKTRIVPRHIQLAVRNDEELSRLLGTVTIASGGVMPNIHNLLLPKKAGGGSAKAAAGDED

SEQ ID NO: 46285 - DNA, 405 bp, Zea mays
  CDS (1)..(405)
atggcgggccgtggcaaggctatcggcgctggcgccgcgaagaaggcaacgtcgaggagctccaaggccggactccagttccccgtcggcaggattgccaggttcctcaaggcgggcaagtacgcggagcgcgtcggcgccggcgcccccgtgtacctcgccgccgtcctcgagtacctcgcggctgaggttctcgaacttgccgggaacgccgcgagggacaacaagaagacccgcattgtgccgcgccacatccagcttgctgtgcgcaacgacgaggagctgaccaaactgttgggtggtgccaccatcgcgagcggaggtgttatgcctaacatccatcagcatctgctccccaagaaggctgcctcctccaaggccagtgtcgacgacgacgacaactga

SEQ ID NO: 46286 - protein, 134 aa, Zea mays
MAGRGKAIGAGAAKKATSRSSKAGLQFPVGRIARFLKAGKYAERVGAGAPVYLAAVLEYLAAEVLELAGNAARDNKKTRIVPRHIQLAVRNDEELTKLLGGATIASGGVMPNIHQHLLPKKAASSKASVDDDDN

SEQ ID NO: 46287 - DNA, 426 bp, Linum usitatissimum
  CDS (1)..(426)
atgagttcagtcgccgccgctggttcagccaagtccggcagaggcaagccgaaatccaaggccgtctctaggtctcagaaagccggtctccagttccccgtcggccgtatagctcgtttcctcaagaaaggtagatacgctgagcgcgtcggatctggttcgcctgtctacctttgtgctgtcatggagtatctcgccgctgaggttttggagctggctggaaacgctgcgagggataacaagaagacaaggatcgttccgaggcacattcagctggctgtgaggaacgatgaggagttgagcaagcttctcggaggtgtcaccattgctaacggaggcgtgttgcccaagattcaccagagtctgctgctgaagaaagctgggaaagataagggagatatcggctctgcttctcaagagttttga

SEQ ID NO: 46288 - protein, 141 aa, Linum usitatissimum
MSSVAAAGSAKSGRGKPKSKAVSRSQKAGLQFPVGRIARFLKKGRYAERVGSGSPVYLCAVMEYLAAEVLELAGNAARDNKKTRIVPRHIQLAVRNDEELSKLLGGVTIANGGVLPKIHQSLLLKKAGKDKGDIGSASQEF

SEQ ID NO: 46289 - DNA, 456 bp, Linum usitatissimum
  CDS (1)..(456)
atggacgccggatcaaccaaagttaagaagggagccgccggcaggaaaatcggtggcccgaagaagaagccagtctccaggtccgtcaaagccggacttcaattccccgtcggaagaatcggacggtacctgaagaaaggaaggtacgctaagcgagttggcaccggagctcctgtctacttggctgccgtcctcgaatatctcgccgctgaagttcttgagctggcgggaaacgcagctcgtgataacaagaagaacaggatcatcccgcgccatgttcttcttgcgatcaggaacgacgaggagctaggaaagctgctggccggagtgacgattgcgcacggcggtgttcttcctaacatcaacccggtgctgttgccgaagaagtctgccgccaaggagcccgcggagaagaaatctcccgccaaggctaccaagtcccccaagaaagcttga

SEQ ID NO: 46290 - protein, 151 aa, Linum usitatissimum
MDAGSTKVKKGAAGRKIGGPKKKPVSRSVKAGLQFPVGRIGRYLKKGRYAKRVGTGAPVYLAAVLEYLAAEVLELAGNAARDNKKNRIIPRHVLLAIRNDEELGKLLAGVTIAHGGVLPNINPVLLPKKSAAKEPAEKKSPAKATKSPKKA

SEQ ID NO: 46291 - DNA, 465 bp, Linum usitatissimum
  CDS (1)..(465)
atggaatccgcagccaccaaagtgaagaaaggagccggcggcaggaagggcggtggccctaagaagaagccagtctccagatcggtgaaggccggacttcagttccccgtcggtaggatcggaaggtacctgaagaagggaaggtacgctcagcgcgtcggcaccggagctccggtctacttggctgcagtcctcgagtatttggcagctgaggttcttgagcttgctggaaatgctgcccgtgacaacaagaagaacaggatcatcccaaggcatgttcttctggcaatcaggaatgacgaggagctcggaaagctgcttgccggagtgaccattgctcatggaggagtcctgccgaacatcaacccagtgctgctgccgaagaagactgacagagctactaaggagcccaaggaatccaccaagtctccagccaaggccggaaagtcccccaagaaagcttag

SEQ ID NO: 46292 - protein, 154 aa, Linum usitatissimum
MESAATKVKKGAGGRKGGGPKKKPVSRSVKAGLQFPVGRIGRYLKKGRYAQRVGTGAPVYLAAVLEYLAAEVLELAGNAARDNKKNRIIPRHVLLAIRNDEELGKLLAGVTIAHGGVLPNINPVLLPKKTDRATKEPKESTKSPAKAGKSPKKA

SEQ ID NO: 46293 - DNA, 408 bp, Hordeum vulgare
  CDS (1)..(408)
atggccggccgtgggaaggcaatcggcgctggcgctgtcaagaaggcgacgtcgaggagttccaaggccgggctgcagttcccagttggcaggatcgccaggttcctcaaggccggcaagtacgcagagcgcgtcggagccggcgcccctgtctacctcgccgccgtcctcgagtacctcgccgctgaggttctggagctggccggcaatgccgccagggacaacaagaagacccgtatcgtgccccgccacatccagctcgctgtgcgcaatgacgaggagttgaccaagttgcttggcggtgccaccattgccagtggcggtgtgatgcccaacatccaccagcacctcctcccaaagaaggcctcttcttccaaggcctccaccgtcgatgacgacgacaactga

SEQ ID NO: 46294 - protein, 135 aa, Hordeum vulgare
MAGRGKAIGAGAVKKATSRSSKAGLQFPVGRIARFLKAGKYAERVGAGAPVYLAAVLEYLAAEVLELAGNAARDNKKTRIVPRHIQLAVRNDEELTKLLGGATIASGGVMPNIHQHLLPKKASSSKASTVDDDDN

SEQ ID NO: 46295 - DNA, 405 bp, Hordeum vulgare
  CDS (1)..(405)
atggagtcggtagcgaaggcgccgaagaaggccggcgcggccgggcgccggggcggcggcgggccgaagaagaaggccgtctcacgctccgtcaaggccggcctccagttccccgtgggccgcatcgggcgctacctcaagcagggccgctacgccaagcgcgtcggcagcggcgcccccgtctacctcgccgccgtcctcgagtacctcgccgccgagctcctggagctggcggggaacgcggcgcgggacaacaagaagaaccggatcatcccgcggcacgtgctgctcgcgatccgcaacgaccaggagctcgggaagctgctggccggcgtcaccatcgcctacggaggtgtcctgcccaacatcaaccccgtgctgcttcccaagaagcccgccgcttag

SEQ ID NO: 46296 - protein, 134 aa, Hordeum vulgare
MESVAKAPKKAGAAGRRGGGGPKKKAVSRSVKAGLQFPVGRIGRYLKQGRYAKRVGSGAPVYLAAVLEYLAAELLELAGNAARDNKKNRIIPRHVLLAIRNDQELGKLLAGVTIAYGGVLPNINPVLLPKKPAA

SEQ ID NO: 46297 - DNA, 453 bp, Helianthus annuus
  CDS (1)..(453)
atggaaaccacaggaaaagctaagaagggtgccgcaggtcgcaaagccggcggtccaaggaagaagtccgtcacccgctccgtcaaagccggtctccagtttcccgtcggcagaattggccgttacctcaaacacggccggtatgcaaagcgtgtcggtaccggtgctccggtttacctcgccgccgtcttggaataccttgcagctgaagtgttggaattggctggaaatgcagctagggataacaagaagaacaggataacaccgagacatgttttgttggcgataaggaacgatgatgagctggggaagttgttggccggagttacgattgctcatggtggtgttttgccgaacattaacccggtgttgttgccgaagaagagtgctgctgctgccaaagagactaagtcgcctgttaaacctggaaagtctcccaagaaggccgcataa

SEQ ID NO: 46298 - protein, 150 aa, Helianthus annuus
METTGKAKKGAAGRKAGGPRKKSVTRSVKAGLQFPVGRIGRYLKHGRYAKRVGTGAPVYLAAVLEYLAAEVLELAGNAARDNKKNRITPRHVLLAIRNDDELGKLLAGVTIAHGGVLPNINPVLLPKKSAAAAKETKSPVKPGKSPKKAA

SEQ ID NO: 46299 - DNA, 429 bp, Helianthus annuus
  CDS (1)..(429)
atggcgggaaaatccagtgcagaagtaaagaaaggcggtagaggcaaaccaaaggcttcaaagtccgtttcaagatcctctaaagccggtcttcagttccccgttggcagaatcgctaggttcctcaaggccggacggtatgcccaacgtgtcggcgccggagctccagtttatctctccgccgttctcgagtatctggccgctgaggtgttggagttggctggaaatgcagcgagggacaacaagaagagcagagtaggtccaaggcacatacagttagcggtgaggaacgatgaagagttgagtaaactgttgggatctgtgactattgcaaatggtggtgttcttcccaacattcattccactctgcttcctaagaaagcaggaaaggaaaagggagagatcggttcagcttcacaagagttttaa

SEQ ID NO: 46300 - protein, 142 aa, Helianthus annuus
MAGKSSAEVKKGGRGKPKASKSVSRSSKAGLQFPVGRIARFLKAGRYAQRVGAGAPVYLSAVLEYLAAEVLELAGNAARDNKKSRVGPRHIQLAVRNDEELSKLLGSVTIANGGVLPNIHSTLLPKKAGKEKGEIGSASQEF

SEQ ID NO: 46301 - DNA, 399 bp, Helianthus annuus
  CDS (1)..(399)
atggctggaagaggcaaaaacataggatctgcagcggcaaaaaaggcaacatcgagaagcagcaaagctggtcttcaatttccggtcggtagaatcgctcgttttctaaaagccggtaaatacgccgaccgagtcggcgccggagctccggtgtacctcgccgccgtgctggaatacctcgcggctgaggtgctggaattggcgggaaacgcggcaagggataacaagaagacgagaattgtgccgagacatattcaattggcggtgaggaatgatgaggagttgagtaagctgctgggtgacgtcacgattgcgaatggtggcgtcatgccaaatattcataaccttttgttgccgaagaaggctggttcttcgaagccgtctgctgatgacgagtga

SEQ ID NO: 46302 - protein, 132 aa, Helianthus annuus
MAGRGKNIGSAAAKKATSRSSKAGLQFPVGRIARFLKAGKYADRVGAGAPVYLAAVLEYLAAEVLELAGNAARDNKKTRIVPRHIQLAVRNDEELSKLLGDVTIANGGVMPNIHNLLLPKKAGSSKPSADDE

SEQ ID NO: 46303 - DNA, 411 bp, Helianthus annuus
  CDS (1)..(411)
atggctggaaagggtggtaagggtctgttggctggaaaaacacctgcggctgcagctaacaaggaaaaggataagaagagaccgatgtctcggtctgctagagctggtctacagttcccagtaggtaggattcatcgacatctgaaatcaagaacatcagctcatgggcgagtgggggccacagctgcggtttactctgccgcaattctcgagtacttaaccgctgaggtccttgaattggctggaaacgccagcaaagatttgaaagtgaaaaggatcacaccgaggcatttgcagcttgctattcgtggtgacgaggaactcgacacactcatcaaaggtaccattgctggaggtggtgtcattcctcacattcacaagtcacttatcaacaaaaccacaaaagagtaa

SEQ ID NO: 46304 - protein, 136 aa, Helianthus annuus
MAGKGGKGLLAGKTPAAAANKEKDKKRPMSRSARAGLQFPVGRIHRHLKSRTSAHGRVGATAAVYSAAILEYLTAEVLELAGNASKDLKVKRITPRHLQLAIRGDEELDTLIKGTIAGGGVIPHIHKSLINKTTKE

SEQ ID NO: 46305 - DNA, 444 bp, Helianthus annuus
  CDS (1)..(444)
atggagtcaggaaaagcaacgaaagccgccggaggaagaaaaggcgccggagagaggaagaagtctgtcacaaagtccgtcaaagccggtctccagttccccgtcggaagaatcgctaggtttttgaaaaaaggccgatatgctcaacgaaccggatccggagctccgatctaccttgctgctgttctagaatacctagctgctgaggttttggagttggctggaaacgcagcgagagataacaagaagacaaggataaaccctagacacttgctattggctgttaggaacgatgaggaattggggaaattgcttgctggtgttaccattgccagtggaggtgtgttgcccaatatcaatccggttcttttgcccaagaagtcttcttctgctgctgaggctgagaagacccccaaatctaaaaagtcgcctaaaaaggcttag

SEQ ID NO: 46306 - protein, 147 aa, Helianthus annuus
MESGKATKAAGGRKGAGERKKSVTKSVKAGLQFPVGRIARFLKKGRYAQRTGSGAPIYLAAVLEYLAAEVLELAGNAARDNKKTRINPRHLLLAVRNDEELGKLLAGVTIASGGVLPNINPVLLPKKSSSAAEAEKTPKSKKSPKKA

SEQ ID NO: 46307 - DNA, 447 bp, Brassica napus
  CDS (1)..(447)
atggaaaccaccggaaaagtgaagaaggccttcggaggaaggaaagccggcggcccaaaaaccaaatcggtttcgaaatcgatcaaggccggtctccaattccccgtaggaagaatcactcgtttcctgaggaagggacggtacgcgcagagactcggtggcggagctccggtttacatggccgccgtcctcgagtacctcgcagccgaagttttggagcttgctggtaacgcggcgagagacaacaagaagtcgaggatcatcccgaggcatcttctcttggcgataaggaacgatgaggagttagggaagcttctgagtggagtcacgatcgctcacggcggtgtgttgcctaacatcaactctgttctgttgcctaagaagtctgctaagtcgaccgaggatgttgcgtccaagtcaccagccaagtctcctaagaaggcttaa

SEQ ID NO: 46308 - protein, 148 aa, Brassica napus
METTGKVKKAFGGRKAGGPKTKSVSKSIKAGLQFPVGRITRFLRKGRYAQRLGGGAPVYMAAVLEYLAAEVLELAGNAARDNKKSRIIPRHLLLAIRNDEELGKLLSGVTIAHGGVLPNINSVLLPKKSAKSTEDVASKSPAKSPKKA

SEQ ID NO: 46309 - DNA, 405 bp, Brassica napus
  CDS (1)..(405)
atggccggccgtggaaaaactctcggatctggagtcgccaagaaggcgacgtcgaggagcagcaaagccggtctccagttccccgtcggccgtatcgcaagatttctcaagaacggcaaatacgccgaacgtgttggtgccggagctccggtttacttagccgccgttctcgaatacctcgccgcagaggttctcgaactggctggaaacgcggcgagggacaacaagaagacaagaatcgtgccgcgtcacattcaattggcggtgaggaacgatgaggagctgagtaagttgcttggggatgtgacgattgctaacggaggtgtgatgcccaacattcacaaccttcttcttcccaagaaggctggtggtgcttccaaaccttccggtgacgacgatgagtag

SEQ ID NO: 46310 - protein, 134 aa, Brassica napus
MAGRGKTLGSGVAKKATSRSSKAGLQFPVGRIARFLKNGKYAERVGAGAPVYLAAVLEYLAAEVLELAGNAARDNKKTRIVPRHIQLAVRNDEELSKLLGDVTIANGGVMPNIHNLLLPKKAGGASKPSGDDDE

SEQ ID NO: 46311 - DNA, 459 bp, Brassica napus
  CDS (1)..(459)
atggattcaggaaccaaagtaaagaaaggagcgggtggaagaagaggtggtggtccgaagaagaaacctgttacccgttctgttaaagccggtttacagtttccggtcggtaggaacggtcggtatctaaagaaaggtcgctactcgaagcgtgtcggaaccggagctccggtgtatctcgccgccgtgctagagtaccttgctgctgaggttcttgagcttgctggtaacgcagccagagataacaagaagaatcgtatcataccacgccatgttctgttagctgtgaggaacgacgacgagctaggaaagctactcaaaggcgtaacaatcgcacatggaggagttttacctaacataaacccagttctcctcccaaaaaagtctcagaaagcagcttcaactacaaaagtgaccaagtcaacatcaaaggctaccaaatcccctaagaaggcatag

SEQ ID NO: 46312 - protein, 152 aa, Brassica napus
MDSGTKVKKGAGGRRGGGPKKKPVTRSVKAGLQFPVGRNGRYLKKGRYSKRVGTGAPVYLAAVLEYLAAEVLELAGNAARDNKKNRIIPRHVLLAVRNDDELGKLLKGVTIAHGGVLPNINPVLLPKKSQKAASTTKVTKSTSKATKSPKKA

SEQ ID NO: 46313 - DNA, 447 bp, Brassica napus
  CDS (1)..(447)
atggaaaccaccggaaaagtgaagaaggctttcggaggaagaaaagccggtggccccaagaccaaatccgtctcgaaatcgatcaaagccggtctccaattcccggtgggaagaatcactcgtttcctgaagaaaggacgttacgcacagaggctcggtggtggagctccggtttacatggccgccgttctcgagtacctcgccgcagaagttctggagcttgctggtaacgctgcgagagacaacaagaagtcgagaatcatcccgaggcatcttcttttggcgattaggaacgatgaagagctggggaagcttctcagtggagtcacgatcgctcacggtggtgtcttgccaaacattaactctgttcttttgcctaagaagtctgctaagtcgtccgaggatgctgcacccaagtcgcctggcaaatctcccaagaaggcttaa

SEQ ID NO: 46314 - protein, 148 aa, Brassica napus
METTGKVKKAFGGRKAGGPKTKSVSKSIKAGLQFPVGRITRFLKKGRYAQRLGGGAPVYMAAVLEYLAAEVLELAGNAARDNKKSRIIPRHLLLAIRNDEELGKLLSGVTIAHGGVLPNINSVLLPKKSAKSSEDAAPKSPGKSPKKA

SEQ ID NO: 46315 - DNA, 399 bp, Brassica napus
  CDS (1)..(399)
atggctggtcgaggaaaacaactcggatctggcgcggcgaagaaggctacatctcgcagtagcaaggcggggctccaattccccgttggtcgtatcgcccgattcctcaaggccggaaagtacgccgagcgtgttggagcaggagctccggtttacctcgccgccgttcttgaatacctcgccgccgaggtgcttgagcttgctgggaacgcggcaagagataacaagaagactcggattgtgcctcgacacattcagcttgctgtgaggaacgacgaggagctaagcaagttacttggagatgtgacgattgctaatggaggagtgatgcctaacatccacaatctccttctccctaacaagaaggctggttcctctaagcctaccgatgaagattag

SEQ ID NO: 46316 - protein, 132 aa, Brassica napus
MAGRGKQLGSGAAKKATSRSSKAGLQFPVGRIARFLKAGKYAERVGAGAPVYLAAVLEYLAAEVLELAGNAARDNKKTRIVPRHIQLAVRNDEELSKLLGDVTIANGGVMPNIHNLLLPNKKAGSSKPTDED

SEQ ID NO: 46317 - DNA, 402 bp, Brassica napus
  CDS (1)..(402)
atggcgggccgcggcaaaactctcggatccggggctgtgaagaaggcaacctcgagaagtagcaaagccggtctccaattcccggtgggtcgtatcgctcgtttcctgaagaaaggcaagtacgccgaacgcgtcggagccggagctccggtctacttatcggccgttctcgaatacctcgccgcggaggtattggagttggctggtaacgcggcgagggataacaagaagacgaggattgttccgaggcacattcagctcgcggtgaggaacgacgaggagttgagtaaattgctgggagatgttacgattgctaacggaggagtgatgccgaatattcacaatcttcttcttcctaagaaggctggtgcttcatccaagccatctggggatgacgattga

SEQ ID NO: 46318 - protein, 133 aa, Brassica napus
MAGRGKTLGSGAVKKATSRSSKAGLQFPVGRIARFLKKGKYAERVGAGAPVYLSAVLEYLAAEVLELAGNAARDNKKTRIVPRHIQLAVRNDEELSKLLGDVTIANGGVMPNIHNLLLPKKAGASSKPSGDDD

SEQ ID NO: 46319 - DNA, 459 bp, Brassica napus
  CDS (1)..(459)
atggagtcatcgtcaccagcagcagcgaagccggcgagaggcgcaggaggaaggaaaggaggtgatcggaagaagagtgtttccaagtcggccaaggctggtcttcagttccccgtcggtcgtatctctcgttacttgaagaaaggtcgttacgcgatcaggtacggcgccggtgctcccgtttacctcgccgccgttctcgagtacctcgccgccgaggttctggagcttgcggggaacgcagcgagggataataagaagaacaggataaacccgaggcatctctgcttggcgataaggaacgatgaggaattggggaaactgctccacggagtcaccatcgcgagcggtggagttcttccgaacatcaacccggttcttcttccgaagagatccgcatctcaaactgagaagcctgagaaagcagctaaagctgctaaatctcccaagaaggcttaa

SEQ ID NO: 46320 - protein, 152 aa, Brassica napus
MESSSPAAAKPARGAGGRKGGDRKKSVSKSAKAGLQFPVGRISRYLKKGRYAIRYGAGAPVYLAAVLEYLAAEVLELAGNAARDNKKNRINPRHLCLAIRNDEELGKLLHGVTIASGGVLPNINPVLLPKRSASQTEKPEKAAKAAKSPKKA

SEQ ID NO: 46321 - DNA, 456 bp, Brassica napus
  CDS (1)..(456)
atggagtcaccagcagcagcaacagcgaagccggcgagaggagcaggaggaaggaaaggaggagaccgtaagaagagcgtcaccaaatccgtcaaagctggtctccagtttcccgtcggtcgtatctctcgttacctgaagaaaggccgttacgccgtcaggtacggcgccggtgctcccgtttacctcgccgccgttctcgagtacctcgccgccgaggttttggagctggcggggaacgcggcgagggataacaagaagaacaggataaaccctaggcatctctgcttggcgataaggaacgatgaggagctggggaagcttcttcatggagtcacgatctcaagcggaggggtgcttcctaacattaacccggttcttcttcccaagagagctgctggttctgagaaagctgagaagcctgagaaagctactaaatctcccaagaaagcttga

SEQ ID NO: 46322 - protein, 151 aa, Brassica napus
MESPAAATAKPARGAGGRKGGDRKKSVTKSVKAGLQFPVGRISRYLKKGRYAVRYGAGAPVYLAAVLEYLAAEVLELAGNAARDNKKNRINPRHLCLAIRNDEELGKLLHGVTISSGGVLPNINPVLLPKRAAGSEKAEKPEKATKSPKKA

SEQ ID NO: 46323 - DNA, 402 bp, Brassica napus
  CDS (1)..(402)
atggcgggtcgtggcaaaactctcggatccgcggctgcgaagaaggccacaacgaggagtagcaaagccggcctccaattcccggtgggtcgaatcgctcgtttcctgaagaaaggcaaatacgccgaacgcgtcggcgccggagctcccgtctacttagccgccgttctcgagtacctcgccgctgaggtattggaattggctggaaacgcggcgagggacaacaagaagacgaggattgttccgaggcatatccagctggcggtgaggaacgacgaggagctgagtaagttgctgggagatgtgacgattgctaatggaggcgtgatgcccaatattcacaaccttcttttgcccaagaaggctggcggttcgtcgaagccatctggcgatgacgattga

SEQ ID NO: 46324 - protein, 133 aa, Brassica napus
MAGRGKTLGSAAAKKATTRSSKAGLQFPVGRIARFLKKGKYAERVGAGAPVYLAAVLEYLAAEVLELAGNAARDNKKTRIVPRHIQLAVRNDEELSKLLGDVTIANGGVMPNIHNLLLPKKAGGSSKPSGDDD

SEQ ID NO: 46325 - DNA, 456 bp, Brassica napus
  CDS (1)..(456)
atggagtcatcaccaccagcaaccaaggcagcgagaggtggaagaagaggaggagaccgcaagaagagcgtctccaagtccgtcaaagccggtctccagttccccgtcggtcgtatcgctcgttaccttaagaaaggccgttacgcggtcaggtacggctccggcgctccggtctacctcgccgctgttctcgagtacctcgccgccgaggttcttgagctagctgggaacgcggcgagggataacaagaagaacaggataaacccgaggcatctttgtttggcgataaggaacgatgaggagctggggaagctgttgcacggtgtgacgatagcgagtgggggtgtgcttccgaatatcaacccggttctgcttcctaagaggactactggttcgtctcacggtgagaaagagaaagcttcttcgccggctaagaagtctcccaagaagggttga

SEQ ID NO: 46326 - protein, 151 aa, Brassica napus
MESSPPATKAARGGRRGGDRKKSVSKSVKAGLQFPVGRIARYLKKGRYAVRYGSGAPVYLAAVLEYLAAEVLELAGNAARDNKKNRINPRHLCLAIRNDEELGKLLHGVTIASGGVLPNINPVLLPKRTTGSSHGEKEKASSPAKKSPKKG

SEQ ID NO: 46327 - DNA, 456 bp, Brassica napus
  CDS (1)..(456)
atggagtcatcaccagcagcaaccaaggcagcgagaggtggaagaaggggaggagaccgcaagaagagcgtctccaagtccgtcaaagccggtctccagttccccgtcggtcgtatcgctcgttaccttaagaaaggccgttacgcggtcaggtacggctccggcgctccggtctacctcgccgctgttctcgagtacctcgccgccgaggttcttgagctagctggaaacgcggcgagggataacaagaagaacaggataaacccgaggcatctttgtttggcgataaggaacgatgaggagctggggaagctgttgcacggtgtgacgatagcgagtgggggtgtgcttccgaatatcaacccggttctgcttcctaagaggactactggttcgtctcacggtgagaaagagaaagcttcttcgccggctaagaagtctcccaagaagggttga

SEQ ID NO: 46328 - protein, 151 aa, Brassica napus
MESSPAATKAARGGRRGGDRKKSVSKSVKAGLQFPVGRIARYLKKGRYAVRYGSGAPVYLAAVLEYLAAEVLELAGNAARDNKKNRINPRHLCLAIRNDEELGKLLHGVTIASGGVLPNINPVLLPKRTTGSSHGEKEKASSPAKKSPKKG

SEQ ID NO: 46329 - DNA, 402 bp, Brassica napus
  CDS (1)..(402)
atggcgggccgcggcaaaactctcggatccggggctgtgaagaaggcaacatcgaggagtagcaaagccggtctccaattcccggtgggtcgtatcgctcgtttcctgaagaaaggcaaatacgccgaacgcgtcggcgccggagctcccgtctacttatccgccgttctcgagtacctcgccgctgaggtattggaattggctggaaacgcggcgagggacaacaagaagacgaggattgttccgaggcatatccagctggcggtgaggaacgacgaggagctgagtaagttgctgggagatgtgacgattgctaatggaggcgtgatgcccaatattcacaaccttcttttgcccaagaaggctggcggttcgtcgaagccatctggcgatgacgattga

SEQ ID NO: 46330 - protein, 133 aa, Brassica napus
MAGRGKTLGSGAVKKATSRSSKAGLQFPVGRIARFLKKGKYAERVGAGAPVYLSAVLEYLAAEVLELAGNAARDNKKTRIVPRHIQLAVRNDEELSKLLGDVTIANGGVMPNIHNLLLPKKAGGSSKPSGDDD

SEQ ID NO: 46331 - DNA, 405 bp, Brassica napus
  CDS (1)..(405)
atgtcaggaaaaggagcgaaagggctgataatggggaaatccagcggcaacgacaaggacaaagacaagaagaaacccactactcgctcttctcgtgctggtcttcagtttccagttgggagagtccatagactattgaaaggaaggtcaaccgctcacggacgcgttggcgcaaccgcggcggtttacacagccgctattttggagtatctaaccgcggaagtcctggagctcgctggtaacgcgagcaaggatctgaaagtgaagcgtatcacaccgaggcatctgcagctcgctattcgcggtgatgaagagcttgatactctcatcaaaggaactattgctggtggtggtgtcattcctcacattcacaagtccctcatcaacaaatctggccaagagtag

SEQ ID NO: 46332 - protein, 134 aa, Brassica napus
MSGKGAKGLIMGKSSGNDKDKDKKKPTTRSSRAGLQFPVGRVHRLLKGRSTAHGRVGATAAVYTAAILEYLTAEVLELAGNASKDLKVKRITPRHLQLAIRGDEELDTLIKGTIAGGGVIPHIHKSLINKSGQE

SEQ ID NO: 46333 - DNA, 483 bp, Zea mays
  CDS (1)..(483)
atggatgccggagcaaaggtggtgaagaaggccgcggcggggcgtcgcggcgggggcggccccaagaagaagccggtctctcgctccgtgaaggccggcctccagttccccgtaggccgtatcggccgctacctcaagcagggtcgctactcccagcgtgtcggcaccggcgcccccgtctacctcgctgccgtcctcgagtacctcgccgccgagctcctcgagttggcggggaacgcagcgcgggacaacaagaagaaccggatcatcccgcgacacgtactgctggcgatccgcaacgatgaggagctcgggaagctactggccggcgtcaccatcgcacacgggggggttctgcccaacatcaaccctgtgctgctccccaagaaaaccgctgtcgctgctgccaaggaaggcaaagagaagaagtcacccaagaaggccgccgccgccaagtcgcccaaaaaggtggccgactcgtag

SEQ ID NO: 46334 - protein, 160 aa, Zea mays
MDAGAKVVKKAAAGRRGGGGPKKKPVSRSVKAGLQFPVGRIGRYLKQGRYSQRVGTGAPVYLAAVLEYLAAELLELAGNAARDNKKNRIIPRHVLLAIRNDEELGKLLAGVTIAHGGVLPNINPVLLPKKTAVAAAKEGKEKKSPKKAAAAKSPKKVADS

SEQ ID NO: 46335 - DNA, 411 bp, Zea mays
  CDS (1)..(411)
atgagttccggcggcggcaggggcaagcccaaggggtccaaggctttgtcgcggtcgaccaaggccgggctgcagttccccgtcggccgcatcgcgcgctacctcaaggccggcaagtacgccgagcgcgtcggcggtggtgcgcccgtctacctctccgccgtcctcgagtatctcgcggcagaggtgttggaactggcgggcaacgcggcgcgcgacaacaagaagaaccgcatcgtgccgcgtcacatccagctcgccgtgcgcaacgacgaggaactcagcaagctgctcggagctgtcaccatcgccgccggaggtgtgttgcccaacattcatcagacgctgctgcccaagaaggccggtgggaagggcaaggccgacatcggttccgcatcccaggagttctaa

SEQ ID NO: 46336 - protein, 136 aa, Zea mays
MSSGGGRGKPKGSKALSRSTKAGLQFPVGRIARYLKAGKYAERVGGGAPVYLSAVLEYLAAEVLELAGNAARDNKKNRIVPRHIQLAVRNDEELSKLLGAVTIAAGGVLPNIHQTLLPKKAGGKGKADIGSASQEF

SEQ ID NO: 46337 - DNA, 456 bp, Brassica napus
  CDS (1)..(456)
atggagtcaccagcagcagcaacagcgaagccggcgagaggagcaggaggaaggaaaggaggagatcgcaagaagagcgtcaccaaatccgtcaaagctggtctccagtttcccgtcggccgtatctctcgttacctgaagaaaggccgttacgccgtcaggtacggcgccggtgctcccgtttacctcgccgccgttctcgagtacctcgccgccgaggttttggagctggcggggaacgcggcgagggataacaagaagaacaggataaaccctaggcatctttgcttggcgataaggaacgatgaggagctggggaagcttcttcatggagtcacgatctcaagcggaggtgttcttcctaacattaacccggttctgcttcccaagagagctgctggttctgagaaagctgagaagcctgagaaagctgctaaatctcccaagaaggcttga

SEQ ID NO: 46338 - protein, 151 aa, Brassica napus
MESPAAATAKPARGAGGRKGGDRKKSVTKSVKAGLQFPVGRISRYLKKGRYAVRYGAGAPVYLAAVLEYLAAEVLELAGNAARDNKKNRINPRHLCLAIRNDEELGKLLHGVTISSGGVLPNINPVLLPKRAAGSEKAEKPEKAAKSPKKA

SEQ ID NO: 46339 - DNA, 450 bp, Glycine max
  CDS (1)..(450)
atggacgctggcggaaagatcaagaagggcgccggaggaagaaagggcggcggccctaagaagaagccggtttcaaggtccgtcaaggccggtctccaattccccgtcggaagaattggccgttatttgaagaaaggaaggtacgcccagcgtgtcggtaccggtgctcccgtttacttggccgcagttctcgagtacctagctgctgaggtgcttgagttggctgggaatgctgcacgtgacaacaagaagaacaggattattccgagacatgtgctattggctgtgaggaacgatgaggagttggggaaattgcttgctggtgtcaccattgcacatggtggtgtgcttccaaacattaaccctgttttgttgcctaagaagacggagagggctgccaaggagcctaagtctccatccaaggctactaaatctcctaagaaggcctag

SEQ ID NO: 46340 - protein, 149 aa, Glycine max
MDAGGKIKKGAGGRKGGGPKKKPVSRSVKAGLQFPVGRIGRYLKKGRYAQRVGTGAPVYLAAVLEYLAAEVLELAGNAARDNKKNRIIPRHVLLAVRNDEELGKLLAGVTIAHGGVLPNINPVLLPKKTERAAKEPKSPSKATKSPKKA

SEQ ID NO: 46341 - DNA, 435 bp, Glycine max
  CDS (1)..(435)
atgagttccacagaggcagcagccacagagaagaaaggtggaagagggaaaccgaagacttcaaagtccgtttcccgttcctccaaagctggccttcagtttcccgtcggccgtgtcgctcgctacctcaaggccggtcgctacgcccagcgcgttggctccggttcccctgtttatctctccgcggttctcgaatacctcgctgccgaggttttggagcttgcggggaacgctgcgagggacaacaagaagacgaggatcgttccgaggcacattcaactggcggttaggaacgacgaggagttgagcaagctgatgggatctgtgaccattgccaacggtggtgttctgcctaacattcaccagaatttgttgcccaagaaggtcgctggcaaggggaagaccgagattggatctgctagtcaggagttttag

SEQ ID NO: 46342 - protein, 144 aa, Glycine max
MSSTEAAATEKKGGRGKPKTSKSVSRSSKAGLQFPVGRVARYLKAGRYAQRVGSGSPVYLSAVLEYLAAEVLELAGNAARDNKKTRIVPRHIQLAVRNDEELSKLMGSVTIANGGVLPNIHQNLLPKKVAGKGKTEIGSASQEF

SEQ ID NO: 46343 - DNA, 423 bp, Glycine max
  CDS (1)..(423)
atgagttccaccggtggttctaccaagggcggaaggggcaagcccaaagcctccaaatccgtttcaagatcgcagaaagctggtctccaattccccgttggaagaatcgctcgattccttaaggctgggaaatacgctgagcgtgttggtgctggtgctcctgtgtacctctctgcagtgctcgagtatctcgctgctgaggttttggaattggctgggaatgctgctagggataacaagaagaatcgtattgttcctaggcacattcagcttgctgtgaggaacgatgaggagctgagcaagcttttgggatctgttaccattgccaatggaggtgtcttgccgaatattcatcagactctgcttcccaagaaggttggcaaggggaagggcgaaattggatcagcttctcaagagttttag

SEQ ID NO: 46344 - protein, 140 aa, Glycine max
MSSTGGSTKGGRGKPKASKSVSRSQKAGLQFPVGRIARFLKAGKYAERVGAGAPVYLSAVLEYLAAEVLELAGNAARDNKKNRIVPRHIQLAVRNDEELSKLLGSVTIANGGVLPNIHQTLLPKKVGKGKGEIGSASQEF

SEQ ID NO: 46345 - DNA, 423 bp, Glycine max
  CDS (1)..(423)
atgagttcaactggtggttctaccaagggcggaaggggcaagcccaaagcctccaaatccgtttcaagatcgcagaaagctggtctccaattccccgttggaagaatcgctcgattccttaaggctgggaaatacgccgagcgtgttggtgctggtgctcctgtgtacctctctgcagtgctcgaatatctcgctgctgaggttttggaattggctgggaatgctgctagggataacaagaagaatcgtattgttcctaggcacattcagcttgctgtgaggaacgatgaggaactgagcaagcttttggggtctgttaccattgccaacggaggtgtcttgccgaacattcaccagactctgcttcccaagaaggctggaaaggggaagggcgaaattggatctgcctctcaagagttttag

SEQ ID NO: 46346 - protein, 140 aa, Glycine max
MSSTGGSTKGGRGKPKASKSVSRSQKAGLQFPVGRIARFLKAGKYAERVGAGAPVYLSAVLEYLAAEVLELAGNAARDNKKNRIVPRHIQLAVRNDEELSKLLGSVTIANGGVLPNIHQTLLPKKAGKGKGEIGSASQEF

SEQ ID NO: 46347 - DNA, 450 bp, Glycine max
  CDS (1)..(450)
atggacgctggcggaaagatcaagaagggcgccggaggtagaaagggcggcggcccaaagaagaagccggtttcaaggtccgtcaaagccggtctccaattccccgtcggaagaattggccgttatttgaagaaaggaaggtacgctcagcgtgtcggtaccggtgctcccgtatacttggctgcagttctcgaatacctagctgccgaggtgcttgagttggctgggaatgccgcacgtgacaacaagaagaacaggattattccaagacacgtgcttttggcagtgaggaacgatgaagagttggggaaattgcttgctggagtgacaattgcacatggtggcgtgcttccaaacatcaaccctgttttgttgcctaagaagactgagagggcttccaaggaacctaaatctccatccaaggctaccaaatctcctaagaaagcttag

SEQ ID NO: 46348 - protein, 149 aa, Glycine max
MDAGGKIKKGAGGRKGGGPKKKPVSRSVKAGLQFPVGRIGRYLKKGRYAQRVGTGAPVYLAAVLEYLAAEVLELAGNAARDNKKNRIIPRHVLLAVRNDEELGKLLAGVTIAHGGVLPNINPVLLPKKTERASKEPKSPSKATKSPKKA

SEQ ID NO: 46349 - DNA, 408 bp, Glycine max
  CDS (1)..(408)
atggcgggtagaggcaaaaccctaggatccagcgccgctaagaaggccacctcaaggagcagcaaagccggcctccaattccccgtcggtcgtatcgccaggttcctcaaggccggaaagtacgccgagcgcgtcggcgccggagcccccgtctacctcgccgccgttctcgaatatctcgctgctgaggttttggaattggctggaaacgctgcgagagataacaagaagactcgaattgttccacgccacatccaattggcggtgaggaacgacgaagagttgagcaagcttctaggagatgttaccattgctaacggcggtgttatgcctaacattcacaaccttcttcttcccaagaaggctgggggctcatccaagggtgctgctgctgacgatgactcttaa

SEQ ID NO: 46350 - protein, 135 aa, Glycine max
MAGRGKTLGSSAAKKATSRSSKAGLQFPVGRIARFLKAGKYAERVGAGAPVYLAAVLEYLAAEVLELAGNAARDNKKTRIVPRHIQLAVRNDEELSKLLGDVTIANGGVMPNIHNLLLPKKAGGSSKGAAADDDS

SEQ ID NO: 46351 - DNA, 405 bp, Glycine max
  CDS (1)..(405)
atgtcggggaaaggagcgaaggggttgatcacaggcaaaacctccgccgccaacaaagacaaggacaagaagaaacccatctcgcgttcttctcgtgccggccttcagttcccagttggtcgtatccaccggcttttgaagtcaaggacaaccgctaatggtagagttggggccacagctgctgtctactctgctgctatcttggagtatctcactgctgaagtattggagctggcagggaatgctagcaaggatctcaaggtcaaacgtattactccccggcatctacagctagcaatccgtggggacgaagagctggataccctgataaaaggaacaattgctggaggaggagtgattcctcacatccacaagtctcttatcaacaagtcttccaaggagtag

SEQ ID NO: 46352 - protein, 134 aa, Glycine max
MSGKGAKGLITGKTSAANKDKDKKKPISRSSRAGLQFPVGRIHRLLKSRTTANGRVGATAAVYSAAILEYLTAEVLELAGNASKDLKVKRITPRHLQLAIRGDEELDTLIKGTIAGGGVIPHIHKSLINKSSKE

SEQ ID NO: 46353 - DNA, 450 bp, Glycine max
  CDS (1)..(450)
atggacactggtggaaagatcaagaagggcgccggaggaagaaagggcggcggcccaaagaagaagccggtttcaaggtccgtcaaggccggtctccaattccccgtcggaagaattggccgttatttgaagaaaggaaggtacgcccagcgtgtcggtaccggtgctcccgtttacttggccgcagttctcgagtacctagctgctgaggtgcttgagttggctgggaatgctgcacgtgacaacaagaagaacaggattattccgagacatgtgctattggctgtgaggaacgatgaggagttggggaaattgcttgctggtgtcaccattgctcatggtggtgttcttccgaacattaaccctgttttgttgcctaagaagactgagagggcttccaaggagcctaagtctccatccaaggctactaaatctcctaaaaagtcttaa

SEQ ID NO: 46354 - protein, 149 aa, Glycine max
MDTGGKIKKGAGGRKGGGPKKKPVSRSVKAGLQFPVGRIGRYLKKGRYAQRVGTGAPVYLAAVLEYLAAEVLELAGNAARDNKKNRIIPRHVLLAVRNDEELGKLLAGVTIAHGGVLPNINPVLLPKKTERASKEPKSPSKATKSPKKS

SEQ ID NO: 46355 - DNA, 411 bp, Glycine max
  CDS (1)..(411)
atggcgggaaaaggagggaaggggcttgtggccggaaaaaccacggcagcgaacaaggacaaagacaaggataagaaaaggcctgtctctcgttcatcccgtgctgggatccagtttcctgtgggtcgtatccataggcagttgaagcaaagggtgcaagcaaatggacgtgtgggggcgactgctgctgtgtacttggcctccattctggaatatctgactgctgaggtgctggagctggcggggaatgctagcaaagatctgaaggtgaagaggatcacaccaaggcacttgcaactcgctatcaggggagacgaagagcttgacaccctcatcaaagggaccattgctggtggtggtgttatccctcacattcacaagtccttgatcaacaaagctgccaaagaatga

SEQ ID NO: 46356 - protein, 136 aa, Glycine max
MAGKGGKGLVAGKTTAANKDKDKDKKRPVSRSSRAGIQFPVGRIHRQLKQRVQANGRVGATAAVYLASILEYLTAEVLELAGNASKDLKVKRITPRHLQLAIRGDEELDTLIKGTIAGGGVIPHIHKSLINKAAKE

SEQ ID NO: 46357 - DNA, 435 bp, Glycine max
  CDS (1)..(435)
atgagttccacagaggtcgcagccacaacgaagaagggtggaagagggaaacccaagaccacaaagtccgtttcccgttcctccaaagccggccttcagttccccgtcggccgcgtcgctcgctacctcaaggccggtcgctatgcccagcgcgttggttccggttcccctgtttacctatctgcggttctcgaataccttgccgctgaggttttggagcttgccggcaacgctgcgagggacaacaagaagacgaggatcgttcctaggcacattcaacttgcggtgaggaacgatgaggagttgagcaagctgatggggtctgtgaccattgccaatggtggtgttctgcctaacattcaccagaatttgttgcccaagaaggccgctggcaagggaaagcccgagattggatctgccagtcaggagttttag

SEQ ID NO: 46358 - protein, 144 aa, Glycine max
MSSTEVAATTKKGGRGKPKTTKSVSRSSKAGLQFPVGRVARYLKAGRYAQRVGSGSPVYLSAVLEYLAAEVLELAGNAARDNKKTRIVPRHIQLAVRNDEELSKLMGSVTIANGGVLPNIHQNLLPKKAAGKGKPEIGSASQEF

SEQ ID NO: 46359 - DNA, 450 bp, Glycine max
  CDS (1)..(450)
atggacgctgacggaaagatcaagaagggcgccggcggaagaaagggcggcggcccaaagaagaagccggtttcaaggtccgtcaaagccggtctccaattccccgtcggaagaattggccgttatttgaagaaaggaaggtacgctcagcgtgtcggtaccggtgctcccgtatacttggctgcagttctcgaatacctagctgccgaggtgcttgagttggctgggaatgcagcacgtgacaacaagaagaacaggattattccaagacacgtgcttttggcagtgaggaacgatgaggagttggggaaattgcttgctggagtgacaattgcacatggtggcgtgcttccaaacattaaccctgttttgttgcctaagaagtctgagagggcttccaaggaacctaaatctccatccaaggctactaaatctcctaagaaggcttaa

SEQ ID NO: 46360 - protein, 149 aa, Glycine max
MDADGKIKKGAGGRKGGGPKKKPVSRSVKAGLQFPVGRIGRYLKKGRYAQRVGTGAPVYLAAVLEYLAAEVLELAGNAARDNKKNRIIPRHVLLAVRNDEELGKLLAGVTIAHGGVLPNINPVLLPKKSERASKEPKSPSKATKSPKKA

SEQ ID NO: 46361 - DNA, 411 bp, Glycine max
  CDS (1)..(411)
atggcgggaaaaggagggaaggggcttgtggccggaaaaaccacggcagcgaacaaggacaaagacaaggataagaaaaggcctgtctctcgttcatcccgtgctgggatccagtttcctgtgggtcgtatccataggcagttgaagcaaagggtgcaagcaaatggacgtgtgggggcgactgctgctgtgtacttggcctccattctggaatatctgactgctgaggtgctggagctggcggggaatgctagcaaagatctgaaggtgaagaggatcacaccaaggcacttgcaactcgctatcaggggagacgaagagcttgacaccctcatcaaagggaccattgctggtggtggtgttatccctcacattcacaagtccttaatcaacaaagctaccaaagaataa

SEQ ID NO: 46362 - protein, 136 aa, Glycine max
MAGKGGKGLVAGKTTAANKDKDKDKKRPVSRSSRAGIQFPVGRIHRQLKQRVQANGRVGATAAVYLASILEYLTAEVLELAGNASKDLKVKRITPRHLQLAIRGDEELDTLIKGTIAGGGVIPHIHKSLINKATKE

SEQ ID NO: 46363 - DNA, 447 bp, Glycine max
  CDS (1)..(447)
atggacgctggcggaaagatcaagaagggcgccggaggaagaaagggcggcggccctaagaagaagccggtttcaaggtccgtcaaggccggtctccaattccccgtcggaagaattggccgttatttgaagaaaggaaggtacgcccagcgtgtcggtaccggtgctcccgtttacttggccgcagttctcgagtacctagctgctgaggtgcttgagttggctgggaatgctgcacgtgacaacaagaagaacaggattattccgagacatgtgctgttggctgtaaggaacgatgaggagttggggaaattgcttgctggtgtcaccattgctcatggtggtgttcttccaaacattaaccctgttttgctacctaagaagactcaggttgctaaggaaccaaaatctccatccaaggctaccaagtctccaaagaaagcttag

SEQ ID NO: 46364 - protein, 148 aa, Glycine max
MDAGGKIKKGAGGRKGGGPKKKPVSRSVKAGLQFPVGRIGRYLKKGRYAQRVGTGAPVYLAAVLEYLAAEVLELAGNAARDNKKNRIIPRHVLLAVRNDEELGKLLAGVTIAHGGVLPNINPVLLPKKTQVAKEPKSPSKATKSPKKA

SEQ ID NO: 46365 - DNA, 408 bp, Glycine max
  CDS (1)..(408)
atggcaggtcgcggcaaaaccctaggatctagcgccgccaagaaggctacctcaaggagcagcaaagccggcctccaattccccgtcggccgtatcgcccgtttcctcaaggccggaaaatacgctgagcgtgtcggcgccggcgcccctgtctacctcgccgccgtactcgaatatctcgcggctgaggttttggaattggctggaaacgctgcgagagacaacaagaagactcgaattgtgccgcgccacattcaattggcggtgaggaacgacgaggagttgagcaagctactcggtgacgtcaccatcgctaacggtggcgtcatgcctaacattcacaatcttctccttcccaagaaggctggtggatcatccaaggctgctgctgcagacgatgactcttaa

SEQ ID NO: 46366 - protein, 135 aa, Glycine max
MAGRGKTLGSSAAKKATSRSSKAGLQFPVGRIARFLKAGKYAERVGAGAPVYLAAVLEYLAAEVLELAGNAARDNKKTRIVPRHIQLAVRNDEELSKLLGDVTIANGGVMPNIHNLLLPKKAGGSSKAAAADDDS

SEQ ID NO: 46367 - DNA, 435 bp, Glycine max
  CDS (1)..(435)
atggaagccccacccaaaggcgctgctggaagaagaggtgacaggaagaagtccgtttccaaatccatcaaagctggcctccaattccccgtcagccgcgtcgccaggtacttgaagaaaggccgttactctcgccgccttggcaccggcgctcccatttatctcgccgccgttctcgaatatctcgccgcagaagtgttggagctggccgggaacgctgcacgtgacaacaagaagaataggattaaccctaggcacgtgttgctggcggtgaggaatgatgatgagctggggaaactgcttcaaggtgtgactattgctagcggtggagtgttgccgaacattaacccggttttgttgcctaagaagagtaccactgcgccttctgagaagtcctctactcctaagtcccccaaatctcctaagaagaaatag

SEQ ID NO: 46368 - protein, 144 aa, Glycine max
MEAPPKGAAGRRGDRKKSVSKSIKAGLQFPVSRVARYLKKGRYSRRLGTGAPIYLAAVLEYLAAEVLELAGNAARDNKKNRINPRHVLLAVRNDDELGKLLQGVTIASGGVLPNINPVLLPKKSTTAPSEKSSTPKSPKSPKKK

SEQ ID NO: 46369 - DNA, 387 bp, Glycine max
  CDS (1)..(387)
atgtcagggaaaggcgcaaagggtttgataactgctaaggacaaagataagaaaaaaccaatttctcgctcctcaagagccggtcttcagtttcctgttggacgcattcatcgtcttctgaagtcaagggtgacagcacatggaagagttggggcaacagctgcagtttattctgctgccatcctggagtatttaactgcagaggtgttggagttggctgtcaatgcgagcaaggatctgaaggtgaagcgtattaccccaagacatctacagcttgccatccgtggagatgaagaacttgataccctcatcaaaggaacaatagctggtggaggtgttattcctcatatccacaagtcccttatcaacaaatcttcgaaggaatga

SEQ ID NO: 46370 - protein, 128 aa, Glycine max
MSGKGAKGLITAKDKDKKKPISRSSRAGLQFPVGRIHRLLKSRVTAHGRVGATAAVYSAAILEYLTAEVLELAVNASKDLKVKRITPRHLQLAIRGDEELDTLIKGTIAGGGVIPHIHKSLINKSSKE

SEQ ID NO: 46371 - DNA, 420 bp, Glycine max
  CDS (1)..(420)
atggcaagtcgaggaaaaacccagggatctggcacaaccaaaaagggcatctcccgaagcaacaaagctggtctccaattcccagttggtcgtattgctcgatacctcaagattggcaagtatgctgaccgtatcggttctggcgctcccgtgtatctcgcctctgttcttgaatatcttgctgctgaggttttggagttagcggggaatgccgcaatggacaacaagaagactcgtattatgcctcgccatatccaattggctgttaggaatgatgaagagttgagcaggcttctcggagatgtgactatcgccagtggtggtgtgacacctaacattcacaacatgttgctgcctaagaaggttgggacctcgacctcaacctttatgggtcctagtgccgatgatgacgacgcttaa

SEQ ID NO: 46372 - protein, 139 aa, Glycine max
MASRGKTQGSGTTKKGISRSNKAGLQFPVGRIARYLKIGKYADRIGSGAPVYLASVLEYLAAEVLELAGNAAMDNKKTRIMPRHIQLAVRNDEELSRLLGDVTIASGGVTPNIHNMLLPKKVGTSTSTFMGPSADDDDA

SEQ ID NO: 46373 - DNA, 393 bp, Glycine max
  CDS (1)..(393)
atgtcggggaaaggagcgaaggggttgatcacaggcaaaacctccgccgccaacaaagacaaggacaagaagaaacccatctcgcgttcttctcgtgccggccttcagttcccagttggtcgtatccaccggcttttgaagtcaaggacaaccgctaatggtagagttggggccacagctgctgtctactctgctgctatcttggagtatctcactgctgaagtattggagctggcagggaatgctagcaaggatctcaaggtcaaacgtattactccccggcatttacaactagcaatccgcggggatgaagagttggataccctgataaaaggaacaattgctggaggaggagtgattcctcacattcacaagtctcttatcaacaagtaa

SEQ ID NO: 46374 - protein, 130 aa, Glycine max
MSGKGAKGLITGKTSAANKDKDKKKPISRSSRAGLQFPVGRIHRLLKSRTTANGRVGATAAVYSAAILEYLTAEVLELAGNASKDLKVKRITPRHLQLAIRGDEELDTLIKGTIAGGGVIPHIHKSLINK

SEQ ID NO: 46375 - DNA, 411 bp, Zea mays
  CDS (1)..(411)
atgagttccggcggcggcaggggcaagcccaaggggtccaaggctgtgtctcggtcgaccaaagctgggctgcagttccccgtcggccgcatcgcgcgctacctcaaggccggcaagtacgccgagcgcgtcggcggtggtgcgcccgtctacctctccgccgtcctcgagtatctcgcggcagaggtgttggaactggcgggcaacgcggcgcgcgacaacaagaagaaccgcatcgtgccgcgccacatccagctcgccgtgcgcaacgacgaggaactcagtaagctgctcggagctgtcaccatcgccgccggcggggtgttgcccaacattcatcagacgctgctgcccaagaaggccggtggcaagggcaaggccgacatcggctccgcatcccaggagttctaa

SEQ ID NO: 46376 - protein, 136 aa, Zea mays
MSSGGGRGKPKGSKAVSRSTKAGLQFPVGRIARYLKAGKYAERVGGGAPVYLSAVLEYLAAEVLELAGNAARDNKKNRIVPRHIQLAVRNDEELSKLLGAVTIAAGGVLPNIHQTLLPKKAGGKGKADIGSASQEF

SEQ ID NO: 46377 - DNA, 402 bp, Zea mays
  CDS (1)..(402)
atgtctggtggtaaaggaggcaaagccggaggcgacaaagccgcgagccaatcccgatcgtccaaggctggtctccaattccctgtcggtcgtatccaccgacttctccggaagggtaactacgcccaacgcgttggagccggtgcccctgtgtacctggctgccgtcttggagtatctggccgccgaaatcctcgaattggctggcaacgctgctcgtgataacaagaagtcccgtatcatcccccgtcatctccaacttgctatccggaacgacgaggagttgaacaagctcctaggccaaaaagatatctcacagggaggtgtcattcctcagattcactcggagctccttcctgccaaatcaaaggacaaaacttccaaagtctctcaggaagtttga

SEQ ID NO: 46378 - protein, 133 aa, Zea mays
MSGGKGGKAGGDKAASQSRSSKAGLQFPVGRIHRLLRKGNYAQRVGAGAPVYLAAVLEYLAAEILELAGNAARDNKKSRIIPRHLQLAIRNDEELNKLLGQKDISQGGVIPQIHSELLPAKSKDKTSKVSQEV

SEQ ID NO: 46379 - DNA, 471 bp, Zea mays
  CDS (1)..(471)
atggacgcgagcgcaaccggagccggcgggaaggcgaagaagggcgcggccgggcgcaaggccggcgggcccaggaagaagtcggtgacgaggtccgtcaaggccgggctccagttccccgtcggccgcatcgggcgctacctcaagaagggccgctacgcgcagcgcgtcggcaccggcgcccccgtctacctcgccgccgtcctcgagtacctcgccgccgaggtgctggagctggccggcaacgctgccaaggacaacaagaagacccgcatcatcccgcgccacctgctcctcgccatccgcaacgaccaggagctcggcaagctgctggccggcgtcaccatcgcccacggcggcgtcatccccaacatcaacccggtgctcctccccaagaagaccgctgagaaggcggcggccaaggaggccaagtcgcccaagaaggccgccaagtcccccaagaaggcatag

SEQ ID NO: 46380 - protein, 156 aa, Zea mays
MDASATGAGGKAKKGAAGRKAGGPRKKSVTRSVKAGLQFPVGRIGRYLKKGRYAQRVGTGAPVYLAAVLEYLAAEVLELAGNAAKDNKKTRIIPRHLLLAIRNDQELGKLLAGVTIAHGGVIPNINPVLLPKKTAEKAAAKEAKSPKKAAKSPKKA

SEQ ID NO: 46381 - DNA, 480 bp, Zea mays
  CDS (1)..(480)
atggacgccaccggcactggagctggagggaaggcgaagaagggagcggccggtcgcaaggccggcgggccgaggaagaagtcggtgacgaggtccgtgaaggccgggctccagttccccgtcggccgcatcgggcgctacctcaagaagggccgctacgcgcagcgcgtcggcagcggtgcccccgtctacctcgcggccgtcctggagtacctcgccgctgaggtcctggagctcgccggcaacgctgccaaggacaacaagaagacgcgcatcgtcccgcgccacgtgctgctggcgatccgcaacgacgaggagctcgggaagctgctgaccggcgtgaccatcgcccacggcggcgtgttgcccaacatcaacccggtcctgctgcccaagaagacggcggagaaggcgtccagcggcgggagcaaggaggccaagtcgcccaagaaggccgccaagtcccccaagaaggcatag

SEQ ID NO: 46382 - protein, 159 aa, Zea mays
MDATGTGAGGKAKKGAAGRKAGGPRKKSVTRSVKAGLQFPVGRIGRYLKKGRYAQRVGSGAPVYLAAVLEYLAAEVLELAGNAAKDNKKTRIVPRHVLLAIRNDEELGKLLTGVTIAHGGVLPNINPVLLPKKTAEKASSGGSKEAKSPKKAAKSPKKA

SEQ ID NO: 46383 - DNA, 408 bp, Zea mays
  CDS (1)..(408)
atggccgggagagggaaggcgatcggctcaggggccgccaagaaggccatgtccaggagctccaaggccgggctccagttccccgtgggaaggatcgccaggttcctcaaggccggcaagtacgccgagagggtcggcgccggcgcccccgtctacctcgctgccgtgctcgagtatcttgctgctgaggttctcgagcttgccgggaacgcggctcgtgacaacaagaagacccgcatcgtcccgcgccacatccagctcgccgtccgcaacgacgaggagctctcccgcttgctgggcacggtgaccatcgccagcggcggtgtcatgcccaacatccataacctgctgctgcccaagaagtctggcggcggcagtgccaaggctgcagctggtgatgaggactag

SEQ ID NO: 46384 - protein, 135 aa, Zea mays
MAGRGKAIGSGAAKKAMSRSSKAGLQFPVGRIARFLKAGKYAERVGAGAPVYLAAVLEYLAAEVLELAGNAARDNKKTRIVPRHIQLAVRNDEELSRLLGTVTIASGGVMPNIHNLLLPKKSGGGSAKAAAGDED

SEQ ID NO: 46385 - DNA, 402 bp, Zea mays
  CDS (1)..(402)
atgtctggtggtaaaggaggcaaagccggaggcgacaaagccgcgagccaatcccgatcgtccaaggctggtctccaattccctgtcggtcgtatccaccgacttctccggaagggtaactacgcccaacgcgttggagccggtgcccctgtgtacctggctgccgtcttggagtatctggccgccgaaatcctcgaattggctggcaacgctgctcgtgataacaagaagtcccgtatcatcccccgtcatctccaacttgctatccggaacgacgaggagttgaacaagctcctaggccaatatgttatctcacagggaggtgtcattcctcagattcactcggagctccttcctgccaaatcaaaggacaaaacttccaaagtctctcaggaagtttga

SEQ ID NO: 46386 - protein, 133 aa, Zea mays
MSGGKGGKAGGDKAASQSRSSKAGLQFPVGRIHRLLRKGNYAQRVGAGAPVYLAAVLEYLAAEILELAGNAARDNKKSRIIPRHLQLAIRNDEELNKLLGQYVISQGGVIPQIHSELLPAKSKDKTSKVSQEV

SEQ ID NO: 46387 - DNA, 483 bp, Zea mays
  CDS (1)..(483)
atggatgccggagcaaaggtggtgaagaaggccgcggcggggcgtcgcggcgggggcggccccaagaagaagccggtctctcgctccgtgaaggccggcctccagttccccgtaggccgtatcggccgctacctcaagcagggtcgctactcccagcgtgtcggcaccggcgcccccgtctacctcgctgccgtcctcgagtacctcgccgccgagctcctcgagttggcggggaacgcagcgcgggacaacaagaagaaccggatcatcccgcggcacgtactgctggcgatccgcaacgacgaggagctcgggaagctactggccggcgtcaccatcgcacacggcggggttctgcccaacatcaaccctgtgctgctccccaagaaaaccgctgtcgctgctgccaaggaaggcaaagagaagaagtcacccaagaaggccgccgccgccaagtcgcccaaaaaggtggccgcctcgtag

SEQ ID NO: 46388 - protein, 160 aa, Zea mays
MDAGAKVVKKAAAGRRGGGGPKKKPVSRSVKAGLQFPVGRIGRYLKQGRYSQRVGTGAPVYLAAVLEYLAAELLELAGNAARDNKKNRIIPRHVLLAIRNDEELGKLLAGVTIAHGGVLPNINPVLLPKKTAVAAAKEGKEKKSPKKAAAAKSPKKVAAS

SEQ ID NO: 46389 - DNA, 480 bp, Zea mays
  CDS (1)..(480)
atggacgccaccggcactggagctggagggaaggcgaagaagggagcggccggtcgcaaggccggcgggccgaggaagaagtcggtgacgaggtccgtgaaggccgggctccagttccccgtcggccgcatcgggcgctacctcaagaagggccgctacgcgcagcgcgtcggcagcggtgcccccgtctacctcgcggccgtcctggagtacctcgccgctgaggtcctggagctcgccggcaacgctgccaaggacaacaagaagacgcgcatcgtcccgcgccacgtgctgctggcgatccgcaacgacgaggagctcgggaagctgctgaccggcgtgaccatcgcccacggcggcgtgttgcccaacatcaacccggtcctgctgcccaagaagacggcggagaaggcgtccagcggcgggagcaaggaggccaagtcgcccaagaaggccgccaagccccccaagaaggcatag

SEQ ID NO: 46390 - protein, 159 aa, Zea mays
MDATGTGAGGKAKKGAAGRKAGGPRKKSVTRSVKAGLQFPVGRIGRYLKKGRYAQRVGSGAPVYLAAVLEYLAAEVLELAGNAAKDNKKTRIVPRHVLLAIRNDEELGKLLTGVTIAHGGVLPNINPVLLPKKTAEKASSGGSKEAKSPKKAAKPPKKA

SEQ ID NO: 46391 - DNA, 453 bp, Zea mays
  CDS (1)..(453)
atggacgtgagcggagcaggcggtaaggcgaagaagggcgcggcggggcgcaaggccggcgggccgacgaagaagtcggtgtcgcggtcctccagggccgggctgcagttccccgtcagccgcgtcgggcggtacctcaaaaagggccggtacgcgcagcgtgtaggcacgggtgcccccgtctacctcgccgccgtcctggagtacctcgcggccgaggtgctcgagctcgccggcaacgcggcaagggacaacaagaagacgcgcatcatcccgcgccacgtgctcctcgccatccgcaacgacgaggagctcggcaagctgctggccggcgtcaccatcgcccacggcggcgtcctccccaacatccacactgtgctcctccccaagaaggtggccgagaaggcggccaaggagcccaagaaggccgctaagtcccccaagaaggcgtag

SEQ ID NO: 46392 - protein, 150 aa, Zea mays
MDVSGAGGKAKKGAAGRKAGGPTKKSVSRSSRAGLQFPVSRVGRYLKKGRYAQRVGTGAPVYLAAVLEYLAAEVLELAGNAARDNKKTRIIPRHVLLAIRNDEELGKLLAGVTIAHGGVLPNIHTVLLPKKVAEKAAKEPKKAAKSPKKA

SEQ ID NO: 46393 - DNA, 414 bp, Zea mays
  CDS (1)..(414)
atggctgggaagggagggaaaggcttgctcgccgcgaagactacggcggccaagtccgccgagaaggacaaggggaagaaggccccaatctcacgctcctcccgcgccggcctccagttccctgttgggcgtatccaccgtcagctgaagcaaaggactcaggcaaatggtcgcgttggtgccaccgcagccgtctactccgctgccatcctggagtacttgactgccgaggttctggagctggctgggaatgctagcaaggatctgaaggtgaagcgtatcacccctcgccatttgcagctagccattcgtggagacgaggagctggacaccctcatcaagggcaccatcgcaggcggaggtgtcatcccgcacattcacaagtccctgatcaacaagtcctccaaggagtga

SEQ ID NO: 46394 - protein, 137 aa, Zea mays
MAGKGGKGLLAAKTTAAKSAEKDKGKKAPISRSSRAGLQFPVGRIHRQLKQRTQANGRVGATAAVYSAAILEYLTAEVLELAGNASKDLKVKRITPRHLQLAIRGDEELDTLIKGTIAGGGVIPHIHKSLINKSSKE

SEQ ID NO: 46395 - DNA, 453 bp, Zea mays
  CDS (1)..(453)
atggacgtgaacgaacaaggcggtaaggcaaagaagggcccggcggggcgcaaggccggcgggccgacaaagaagtcggtgtcgcggtcctccagggccgggctgcagttccccgtcagccgcgtcgggcggtacctcaaaaagggccggtacgcgcagcgtgtaggcacgggtgcccccgtctacctcgccgccgtcctggagtacctcgcggccgaggtgctcgagctcgccggcaacgcggcaagggacaacaagaagacgcgcatcatcccgcgccacgtgctcctcgccatccgcaacgacgaggagctcggcaagctgctggccggcgtcaccatcgcccacggcggcgtcctccccaacatccacactgtgctcctccccaagaaggtggccgagaaggcggccaaggagcccaagaaggccgctaagtcccccaagaaggcgtag

SEQ ID NO: 46396 - protein, 150 aa, Zea mays
MDVNEQGGKAKKGPAGRKAGGPTKKSVSRSSRAGLQFPVSRVGRYLKKGRYAQRVGTGAPVYLAAVLEYLAAEVLELAGNAARDNKKTRIIPRHVLLAIRNDEELGKLLAGVTIAHGGVLPNIHTVLLPKKVAEKAAKEPKKAAKSPKKA

SEQ ID NO: 46397 - DNA, 21 bp, Artificial sequence
  primer
atggcgggaaaaggagggaag

SEQ ID NO: 46398 - DNA, 22 bp, Artificial sequence
  primer
tcaatccttggcggttttgttg

SEQ ID NO: 46399 - protein, 142 aa, Artificial sequence
  consensus sequence
  Variant (2)..(14): Xaa in position 2 to 14 is any amino acid
  Variant (15)..(36): Xaa in position 15 to 36 is any or no amino acid
  Variant (39)..(40): Xaa in position 39 to 40 is any amino acid
  Variant (41)..(41): Xaa in position 41 is any or no amino acid
  Variant (51)..(52): Xaa in position 51 to 52 is any amino acid
  Variant (54)..(54): Xaa in position 54 is any amino acid
  Variant (56)..(60): Xaa in position 56 to 60 is any amino acid
  Variant (62)..(62): Xaa in position 62 is any amino acid
  Variant (63)..(63): Xaa in position 63 is any or no amino acid
  Variant (67)..(68): Xaa in position 67 to 68 is any amino acid
  Variant (70)..(70): Xaa in position 70 is any amino acid
  Variant (73)..(74): Xaa in position 73 to 74 is any amino acid
  Variant (81)..(81): Xaa in position 81 is any amino acid
  Variant (84)..(84): Xaa in position 84 is any amino acid
  Variant (93)..(93): Xaa in position 93 is any amino acid
  Variant (95)..(95): Xaa in position 95 is any amino acid
  Variant (97)..(97): Xaa in position 97 is any amino acid
  Variant (98)..(98): Xaa in position 98 is any or no amino acid
  Variant (101)..(101): Xaa in position 101 is any amino acid
  Variant (105)..(106): Xaa in position 105 to 106 is any amino acid
  Variant (107)..(108): Xaa in position 107 to 108 is any or no amino acid
  Variant (111)..(111): Xaa in position 111 is any amino acid
  Variant (113)..(113): Xaa in position 113 is any amino acid
  Variant (118)..(119): Xaa in position 118 to 119 is any amino acid
  Variant (121)..(123): Xaa in position 121 to 123 is any amino acid
  Variant (124)..(124): Xaa in position 124 is any or no amino acid
  Variant (128)..(128): Xaa in position 128 is any amino acid
  Variant (132)..(132): Xaa in position 132 is any amino acid
  Variant (134)..(134): Xaa in position 134 is any amino acid
  Variant (136)..(136): Xaa in position 136 is any amino acid
  Variant (137)..(138): Xaa in position 137 to 138 is any or no amino acid
  Variant (141)..(141): Xaa in position 141 is any amino acid
MXXXXXXXXXXXXXXXXXXXXXXXXXXXXXXXXXXXRSXXXAGLQFPVGRXXRXLXXXXXAXXRVGXXAXVYXXAVLEYLXAEXLELAGNAAXDXKXXRIXPRHXXXXLAXRXDEELXXLXXXXTIAXGGVXPXIXXXLLXK

SEQ ID NO: 46400 - protein, 15 aa, Artificial sequence
  protein pattern
  Variant (2)..(2): Xaa in position 2 is any or no amino acid
  Variant (6)..(7): Xaa in position 6 to 7 is any or no amino acid
  Variant (10)..(10): Xaa in position 10 is Ile or Val
  Variant (12)..(12): Xaa in position 12 is Gly or Asn
IXPRHXXLAXRXDEE

SEQ ID NO: 46401 - protein, 20 aa, Artificial sequence
  protein pattern
  Variant (5)..(5): Xaa in position 5 is Ala or Thr
  Variant (8)..(8): Xaa in position 8 is Ile, Leu or Val
  Variant (16)..(16): Xaa in position 16 is Ala or Ser
  Variant (17)..(17): Xaa in position 17 is Lys or Arg
  Variant (19)..(19): Xaa in position 19 is any amino acid
LEYLXAEXLELAGNAXXDXK

SEQ ID NO: 46402 - protein, 19 aa, Artificial sequence
  protein pattern
  Variant (3)..(3): Xaa in position 3 is any amino acid
  Variant (4)..(4): Xaa in position 4 is Lys or Arg
  Variant (7)..(7): Xaa in position 7 is Ile or Leu
  Variant (8)..(8): Xaa in position 8 is Ala, Gln or Thr
  Variant (14)..(14): Xaa in position 14 is Ile or Val
  Variant (15)..(15): Xaa in position 15 is any amino acid
  Variant (17)..(17): Xaa in position 17 is any amino acid
  Variant (19)..(19): Xaa in position 19 is Lys or Arg
RSXXAGXXFPVGRXXRXLX

SEQ ID NO: 46403 - protein, 15 aa, Artificial sequence
  protein pattern
  Variant (4)..(4): Xaa in position 4 is any amino acid
  Variant (8)..(8): Xaa in position 8 is Ile or Leu
  Variant (10)..(10): Xaa in position 10 is any amino acid
  Variant (12)..(14): Xaa in position 12 to 14 is any amino acid
TIAXGGVXPXIXXXL

SEQ ID NO: 46404 - protein, 15 aa, Artificial sequence
  protein pattern
  Variant (2)..(2): Xaa in position 2 is any amino acid
  Variant (3)..(3): Xaa in position 3 is any or no amino acid
  Variant (5)..(5): Xaa in position 5 is any amino acid
  Variant (7)..(7): Xaa in position 7 is Ala, Gly, Ser or Thr
  Variant (8)..(8): Xaa in position 8 is Gly or Thr
  Variant (10)..(10): Xaa in position 10 is Ala or Pro
  Variant (11)..(11): Xaa in position 11 is Ile or Val
  Variant (13)..(13): Xaa in position 13 is any amino acid
  Variant (14)..(14): Xaa in position 14 is Ala, Cys, Ser or Thr
  Variant (15)..(15): Xaa in position 15 is Ala or Ser
AXXRXGXXAXXYXXX

SEQ ID NO: 46405 - DNA, 255 bp, Glycine max
  CDS (1)..(255)
atggcttccaacatctcgccttctgcccttgataaagaacagatatttggaatggctgaaaaggagatggagtatcgagttgaattattcaacaagatgacccagacctgttttaaaaagtgtgttgacaataggtacaaggagtccgagctaaatatgggtgaaaatagttgcattgatcgctgtgtttcaaaatactggcatgtgactaatctaattggccagctgcttggttctggaaggcctcctatgtaa

SEQ ID NO: 46406 - protein, 84 aa, Glycine max
MASNISPSALDKEQIFGMAEKEMEYRVELFNKMTQTCFKKCVDNRYKESELNMGENSCIDRCVSKYWHVTNLIGQLLGSGRPPM

SEQ ID NO: 46407 - DNA, 255 bp, Glycine max
  CDS (1)..(255)
atggcttccaacatctcgccctctgcctttgataaagaacagatatttggaatggctgaaaaggagatggaatatagggtcgaattattcaacaagatgacccagacctgtttcaataagtgtgttgacaataggtacaaggagtctgagctaaatatgggtgaaaatagttgcattgaccgctgtgtttcaaaatattggcatgtgactaatctaattggtcagctgcttggttctgggaggcctccaatgtaa

SEQ ID NO: 46408 - protein, 84 aa, Glycine max
MASNISPSAFDKEQIFGMAEKEMEYRVELFNKMTQTCFNKCVDNRYKESELNMGENSCIDRCVSKYWHVTNLIGQLLGSGRPPM

SEQ ID NO: 46409 - DNA, 476 bp, Oryza sativa
  CDS (110)..(361)
ccggccgagctggaggcgcgctgctcttcgcggcatctcaattcccaccgccgcatcgcgagatctccggccttttctccttccggttgaggagcaaagagcagcaattatggcggcgaaacccgagccgacccagttggagaaggagcagatgttcgggatgatggagaaggagatggagtaccgggtcgatcttttcaaccgacttacacagacttgttttgacaagtgcattgagaaaaggtataaagaagctgagctcaatatgggtgagaacagttgcattgatcgatgtgtttcgaagtactggcaggcaagtaatatggtaggtcagatgctcggtaaccggcctcagatgtgaggcgagaagcagtagaagcattaggccagaccattgtcgctatgtttctccacattggttttagaatgttaccgattgccagaagtacacagcacgagtgagtgtgaccgactaa

SEQ ID NO: 46410 - protein, 83 aa, Oryza sativa
MAAKPEPTQLEKEQMFGMMEKEMEYRVDLFNRLTQTCFDKCIEKRYKEAELNMGENSCIDRCVSKYWQASNMVGQMLGNRPQM

SEQ ID NO: 46411 - DNA, 252 bp, Sorghum bicolor
  CDS (1)..(252)
atggccgcgggtgctgcgccgaccaatttgcagaaggagcagatgtttggattggcggagaaagagatggagtatagggttgaccttttcaatcggcttacacatacatgttttgacaagtgcatcgagaagaggcacaaggatgctgagctcaatatgggagagaacagctgcattgaccgatgtgtttctaagtattggcaggtgactaatctagttggacagcttcttggaaatcagcctaaaatgtga

SEQ ID NO: 46412 - protein, 83 aa, Sorghum bicolor
MAAGAAPTNLQKEQMFGLAEKEMEYRVDLFNRLTHTCFDKCIEKRHKDAELNMGENSCIDRCVSKYWQVTNLVGQLLGNQPKM

SEQ ID NO: 46413 - DNA, 252 bp, Sorghum bicolor
  CDS (1)..(252)
atggctgggaaaggcgggccgaccaacttggagaaggagcagatgtttgggatggcagagaaggagatggagtacagagttgatcttttcaataggcttacacagacctgtttcgacaagtgcattgagaaaaggtataaagaagctgagctcaatatgggcgagaacagttgcattgatcgatgtgtttcaaagtattggcaggtgactaatttagttggtcagatgcttgggaaccgtcctcagatgtga

SEQ ID NO: 46414 - protein, 83 aa, Sorghum bicolor
MAGKGGPTNLEKEQMFGMAEKEMEYRVDLFNRLTQTCFDKCIEKRYKEAELNMGENSCIDRCVSKYWQVTNLVGQMLGNRPQM

SEQ ID NO: 46415 - DNA, 252 bp, Zea mays subsp. mays
  CDS (1)..(252)
atggctgggaaaggcgggccgaccaacctggagaaggagcagatgtttgggatggcggagaaggagatggagtacagggttgatcttttcaacaggcttacaaagacctgttttgagaagtgcgttgaaaaaaggtataaagaagctgagctcaatatgggtgagaacagttgcattgatcgatgtgtttcaaagtattggcaggtgactaatttagtaggtcagatgcttgggaaccagcctcagatgtga

SEQ ID NO: 46416 - protein, 83 aa, Zea mays subsp. mays
MAGKGGPTNLEKEQMFGMAEKEMEYRVDLFNRLTKTCFEKCVEKRYKEAELNMGENSCIDRCVSKYWQVTNLVGQMLGNQPQM

SEQ ID NO: 46417 - DNA, 252 bp, Zea mays subsp. mays
  CDS (1)..(252)
atggctgggaaaggcgggtcgaccaacttagaaaaggagcagatgtttgggatggcggagaaagagatggagtacagggttgatcttttcaacaggcttacacagacctgttttaacaagtgcattgaaaaaaggtataaagaagctgagctcaatatgggcgagaacagttgcattgatcgatgtgtttcaaagtattggcaggtgactaatttagttggtcagatgcttggaaaccggcctcaaatgtga

SEQ ID NO: 46418 - protein, 83 aa, Zea mays subsp. mays
MAGKGGSTNLEKEQMFGMAEKEMEYRVDLFNRLTQTCFNKCIEKRYKEAELNMGENSCIDRCVSKYWQVTNLVGQMLGNRPQM

SEQ ID NO: 46419 - DNA, 252 bp, Arabidopsis thaliana
  CDS (1)..(252)
atggcttctcctattcccgtcggcgttactaaggaaaaggcgtttagtatggcacaaacggagatggagtatcgcgtggaactctttaacaagcttgctcaaacatgctttaataaatgtgtggataaaaggtacaaggaagctgagctaaacatgggtgagaatagttgcatcgaccgttgtgtttccaagtactggcaggtaaatggaatggttggacagcttctaagtgctggcaagcctcccgtgtaa

SEQ ID NO: 46420 - protein, 83 aa, Arabidopsis thaliana
MASPIPVGVTKEKAFSMAQTEMEYRVELFNKLAQTCFNKCVDKRYKEAELNMGENSCIDRCVSKYWQVNGMVGQLLSAGKPPV

SEQ ID NO: 46421 - DNA, 444 bp, Unknown
  Unidentified
  CDS (49)..(306)
gcgttcggccaacccgtccgcccacccgtccgctgggtcagggctctaatggctgccaacaacatgccggctggaatagacaaagagcaggcctttggcatggcggaaacagagatggaatatagggtagaactttttaacaggcttgcacaaacatgtttcaacaagtgtgttgacaaaaggtacaaggaatctgagctaaacatgggggaaaacagttgcattgatcgctgcgtttctaagtattggcaggtgaatagcatgatcggtcagatgctcagtgctggtggtcggcctccgatgtaaaacacagtcattgtcatcctcccatcttgaattcgtttaaaatgtaaaacaaggctaagtcctgcaattgacattagcaatttatctttggttgggacagctaatcaaaacctcttataaaccaagctttcatccatg

SEQ ID NO: 46422 - protein, 85 aa, Unknown
  Unidentified
MAANNMPAGIDKEQAFGMAETEMEYRVELFNRLAQTCFNKCVDKRYKESELNMGENSCIDRCVSKYWQVNSMIGQMLSAGGRPPM

SEQ ID NO: 46423 - DNA, 279 bp, Aedes aegypti
  CDS (1)..(279)
atgagcatgccccagatggatgccgcccagcaggcaaagctgcagcttatgcaggagatggaaatcgagatgatgtccgacctgtacagtcggatgacccaggcgtgccacaaaaagtgcatcccacccaagtacagcgatgcagaactcggcaaaggcgaatccgtttgcctggaccgctgcgtggccaagtatctggagattcacgaacggataggcaagaagctgacggcgatgtccgcccaggacgatgacctcaagaagaagatgggtgtttaa

SEQ ID NO: 46424 - protein, 92 aa, Aedes aegypti
MSMPQMDAAQQAKLQLMQEMEIEMMSDLYSRMTQACHKKCIPPKYSDAELGKGESVCLDRCVAKYLEIHERIGKKLTAMSAQDDDLKKKMGV

SEQ ID NO: 46425 - DNA, 348 bp, Ciona intestinalis
  CDS (1)..(348)
atggatccacaagaagcacagaagttggctgccgagctcgaagtagaaatgatggcagatatgtacaacaggatgacaagcagttgtcataaaaagtgtatcagcacaaggtatgacactggggatttggaaaagggggaagctgtgtgtatagatcgatgtgtagctaaatatttggacattcatgaacaaattgggaaaaagttgactgaaatgtctcaaactgatgaagaagcaatgagcaaaatgtcacaaaaacctggttattcctgcaaatgttttgcaaagatgaaacatatattacgctttccagtttatgctaactattttgtttgcaaaaaatgttaa

SEQ ID NO: 46426 - protein, 115 aa, Ciona intestinalis
MDPQEAQKLAAELEVEMMADMYNRMTSSCHKKCISTRYDTGDLEKGEAVCIDRCVAKYLDIHEQIGKKLTEMSQTDEEAMSKMSQKPGYSCKCFAKMKHILRFPVYANYFVCKKC

SEQ ID NO: 46427 - DNA, 213 bp, Bombyx mori
  CDS (1)..(213)
atggcagtaccgcagctagaccctgcaaagctgcaattggtgcaggaactggagattgagatgatgtccgacatgtacaaccgcttggtgagcgcatgtcaccggaagtgcataccaattaaatatcatgaacctgaattaggaaaaggcgaatctgtatgtttagatcgctgtgtagcccaatacttggacgtacatgaacgcatagggtaa

SEQ ID NO: 46428 - protein, 70 aa, Bombyx mori
MAVPQLDPAKLQLVQELEIEMMSDMYNRLVSACHRKCIPIKYHEPELGKGESVCLDRCVAQYLDVHERIG

SEQ ID NO: 46429 - DNA, 252 bp, Oryza sativa (japonica cultivar-group)
  CDS (1)..(252)
atggcggcgaaacccgagccgacccagttggagaaggagcagatgttcgggatgatggagaaggagatggagtaccgggtcgatcttttcaaccgacttacacagacttgttttgacaagtgcattgagaaaaggtataaagaagctgagctcaatatgggtgagaacagttgcattgatcgatgtgtttcgaagtactggcaggtaactaatatggtaggtcagatgctcggtaaccggcctcagatgtga

SEQ ID NO: 46430 - protein, 83 aa, Oryza sativa (japonica cultivar-group)
MAAKPEPTQLEKEQMFGMMEKEMEYRVDLFNRLTQTCFDKCIEKRYKEAELNMGENSCIDRCVSKYWQVTNMVGQMLGNRPQM

SEQ ID NO: 46431 - DNA, 273 bp, Oryza sativa (japonica cultivar-group)
  CDS (1)..(273)
atggccgcgaaaggtcagccggtgaatgtgcagaaggagcaggtgaatatgcagaaggagcagatgtttggattggcagagaaagagatggaatatagggtggatcttttcaatcggcttacacaaacatgtttcagcaagtgcattgagaaaaggcataaagaagctgaactaaatatgggtgagaatagctgcattgatcgatgtgcttcgaagtattggcaggtgactaatttagttggacagctccttggaaatcagcctcaaatgtga

SEQ ID NO: 46432 - protein, 90 aa, Oryza sativa (japonica cultivar-group)
MAAKGQPVNVQKEQVNMQKEQMFGLAEKEMEYRVDLFNRLTQTCFSKCIEKRHKEAELNMGENSCIDRCASKYWQVTNLVGQLLGNQPQM

SEQ ID NO: 46433 - DNA, 273 bp, Apis mellifera
  CDS (1)..(273)
atgagtgcacttacatctgaatccttaactgataaagagaaaagtgaatttatgcaacaaataaaacaagaatttgccattgcaagtgcacaagagatgctctcgaaaatgtcagagaaatgcttcaaaaaatgtgtggttagacctggcacttctctggatagttctgaacagaaatgtgtagcaatgtgtatggaccgatatatggatgcatttaatcttgtatcaaaaacatatagtgctcgaatacaaagagagcataatagaatgtaa

SEQ ID NO: 46434 - protein, 90 aa, Apis mellifera
MSALTSESLTDKEKSEFMQQIKQEFAIASAQEMLSKMSEKCFKKCVVRPGTSLDSSEQKCVAMCMDRYMDAFNLVSKTYSARIQREHNRM

SEQ ID NO: 46435 - DNA, 276 bp, Apis mellifera
  CDS (1)..(276)
atggctggattacctcaatttagtgaagaacaattgaagttagtacgagacatagaaatagaaatgatgactgatatgtttcatcgtatgacagcagcatgtcatagaaagtgtattccaccaaagtatactagttcagaattaagtaaaggtgaatctgtatgtcttgatcgttgtattgctaaatacttggatgtacaagaacgtattggaaaaaaattacaacaaatttctttgcaagaaggcaaaattgtagaacaaccaaaattaagttaa

SEQ ID NO: 46436 - protein, 91 aa, Apis mellifera
MAGLPQFSEEQLKLVRDIEIEMMTDMFHRMTAACHRKCIPPKYTSSELSKGESVCLDRCIAKYLDVQERIGKKLQQISLQEGKIVEQPKLS

SEQ ID NO: 46437 - DNA, 264 bp, Strongylocentrotus purpuratus
  CDS (1)..(264)
atgaatcaacaacagcagcttcagcttttggctgaattggaagtagagatgatggcagatatgtacaacagaatgaccgttgcctgtcagaagaagtgtatagcaccgacatacaaggaaggtgacctttccaaaggagaagctgtctgcctggatcgctgtgtcgctaagtacctggaggttcacgagagcatcggcaaaaagttaaccgagaagtctgctcaggacgaggccacgatgaaacaaatgcaaggacagagttag

SEQ ID NO: 46438 - protein, 87 aa, Strongylocentrotus purpuratus
MNQQQQLQLLAELEVEMMADMYNRMTVACQKKCIAPTYKEGDLSKGEAVCLDRCVAKYLEVHESIGKKLTEKSAQDEATMKQMQGQS

SEQ ID NO: 46439 - DNA, 276 bp, Nasonia vitripennis
  CDS (1)..(276)
atggccggactaccaccgttagatgaagagaaattgaaattggtccaagacctggagatagagatgatgtcggacatgtacaatcgaatgacagcagcgtgtcacaggaagtgtattcttcccaagtacctagagcccgagctggggaaaggtgaatcagtttgtattgataggtgtattgctaagtacctagacgttcatgaaagaattggcaaaaaattgacgcagatctctatgcaagaagaaagccttgtcaaaggagccaaacctggttaa

SEQ ID NO: 46440 - protein, 91 aa, Nasonia vitripennis
MAGLPPLDEEKLKLVQDLEIEMMSDMYNRMTAACHRKCILPKYLEPELGKGESVCIDRCIAKYLDVHERIGKKLTQISMQEESLVKGAKPG

SEQ ID NO: 46441 - DNA, 279 bp, Anopheles gambiae str. PEST
  CDS (1)..(279)
atgagcatgccccagctggacgcggcccagcaggccaaactgcagctgatgcaggagatggaaatcgaaatgatgtcggatctgtacagccgcatgacacaggcttgccacaaaaagtgtatcccaccaaagtatgccgactcggagctgggaaagggagaatcggtgtgcattgaccggtgtgtggcaaagtacctggaggtgcacgaacgcatcggcaagaagctgacggcaatgtcagcgcaggacgaggatctgaaaaagaagatgggtgtgtag

SEQ ID NO: 46442 - protein, 92 aa, Anopheles gambiae str. PEST
MSMPQLDAAQQAKLQLMQEMEIEMMSDLYSRMTQACHKKCIPPKYADSELGKGESVCIDRCVAKYLEVHERIGKKLTAMSAQDEDLKKKMGV

SEQ ID NO: 46443 - DNA, 306 bp, Candida glabrata CBS 138
  CDS (1)..(306)
atgtctatgtggttggacccgcttgcgggacaagaagtgtcagcggagcgcatgaagctggcggaagtgcagttcgaggcgatgcagacgaccttcaacaacatcatggagacgtgcaggaagaagtgcataccgcgggatgaagggttcagcgagtcggacctcaccaagggcgagatgacatgcgtggacaggtgtgtcgccaagatgcactacagcaaccgtgtgatcggcgcgtacgtacagacccagcgcttctcgccagagagacaactgccgcactacgagaagttctaccccaaatag

SEQ ID NO: 46444 - protein, 101 aa, Candida glabrata CBS 138
MSMWLDPLAGQEVSAERMKLAEVQFEAMQTTFNNIMETCRKKCIPRDEGFSESDLTKGEMTCVDRCVAKMHYSNRVIGAYVQTQRFSPERQLPHYEKFYPK

SEQ ID NO: 46445 - DNA, 360 bp, Kluyveromyces lactis NRRL Y-1140
  CDS (1)..(360)
atgtcattattcctagacccatactcggcacaaaccgttgatgaagaaaagattgggattgccaaggttcaattcgatgcgatgaacacaacgttcaatacaatgttacggacgtgtcttgagaagtgtataccgcatgacgagtacggtgaatccgatttgaacaagggagaaatgtgctgtatcgatagatgcgttgccaagatccatttgagcaataggctaataggtgggtttgcccagtcgagaggattcacacctgagcgtcatctaccgtacgacaggtttgtggaccagaagataactgccaagacaataacgactcctataccgactagtaaagaggaggagcaacaatga

SEQ ID NO: 46446 - protein, 119 aa, Kluyveromyces lactis NRRL Y-1140
MSLFLDPYSAQTVDEEKIGIAKVQFDAMNTTFNTMLRTCLEKCIPHDEYGESDLNKGEMCCIDRCVAKIHLSNRLIGGFAQSRGFTPERHLPYDRFVDQKITAKTITTPIPTSKEEEQQ

SEQ ID NO: 46447 - DNA, 336 bp, Debaryomyces hansenii CBS767
  CDS (1)..(336)
atgtcattttttataggaggtagttcacaatactctcaagcagcggttgatcctgaaaagattaaacttgcagaaattcaatttacggctatgtcgactacgtttggcaaggtgttggatacttgtcggaataaatgtattcctgctgaatacggtgaaagtgaattgaataccggcgaacagtgttgtattgatagatgtgttgccaaatatgtcaaagcaaatgcctttattggtaccaatatagagagaaaagggtttaatccaaattatagtatgccagaataccaaaaagtcaatagtatgttggcggaggcagaacgaaaacagaaatga

SEQ ID NO: 46448 - protein, 111 aa, Debaryomyces hansenii CBS767
MSFFIGGSSQYSQAAVDPEKIKLAEIQFTAMSTTFGKVLDTCRNKCIPAEYGESELNTGEQCCIDRCVAKYVKANAFIGTNIERKGFNPNYSMPEYQKVNSMLAEAERKQK

SEQ ID NO: 46449 - DNA, 330 bp, Yarrowia lipolytica CLIB122
  CDS (1)..(330)
atgtctctctactcgatgggtatgaactcacaggaggtggatcctgctcgaatgcagatggcggagttggaaatggagtcgctgacggctctgttcgactcgctgatgaacacctgtcgatccaaatgcatccccgccgagtacggagagggcgaaatcaacaagggcgagtccgtgtgcatcgaccggtgcgtcaacaagtacttcaccgccaacctcaagatcggccaaattttccgagacaagggcatcactcctggcgatacccagatgatccagaacgcctcgtcaaagtacgctgcacacgagtctaccgacgcttctgactag

SEQ ID NO: 46450 - protein, 109 aa, Yarrowia lipolytica CLIB122
MSLYSMGMNSQEVDPARMQMAELEMESLTALFDSLMNTCRSKCIPAEYGEGEINKGESVCIDRCVNKYFTANLKIGQIFRDKGITPGDTQMIQNASSKYAAHESTDASD

SEQ ID NO: 46451 - DNA, 330 bp, Candida albicans SC5314
  CDS (1)..(330): transl_table=12
atgtcggtatttttaggaagctcagcccaattttctcaagctaccatagatccagaaaagataaaattggccgatatacaattcctggccatggcttttacttttaataaattattaagaagatgtgaacaaaaatgtttattacgtgaatatggtgaaggtgaattaactaaaggtgaacaagaatgtatagatcgttgtgtatcaaaatatgttaaagctaatgtgattattggagaacatttacaaaaacaacgattggatccttttaattcgatgccagaatatcgaaaagttcaagatatcttggcgagttctgtgaaatcgtga

SEQ ID NO: 46452 - protein, 109 aa, Candida albicans SC5314
MSVFLGSSAQFSQATIDPEKIKLADIQFSAMAFTFNKLLRRCEQKCLLREYGEGELTKGEQECIDRCVSKYVKANVIIGEHLQKQRLDPFNSMPEYRKVQDILASSVKS

SEQ ID NO: 46453 - DNA, 351 bp, Pichia guilliermondii
  CDS (1)..(351)
atgggaaaaatcgcctgcatagatctacacttgctcattattctcaagagtggccaacgaaaaattatcacagatatgtttggacttggaggagcagccccacaaatctcgtcgcaacaaaagcttctggccgccgaggccgagttggatatggtcacaggaatgttcaaccaacttgtagaacaatgtcacagcaaatgtatcaataaatcgtataacgactctgacgtttccaagcaagaagctctctgcttagaccgatgcgtatcgaaatactttgagactaatgtgcaagtcggggagcacatgcaaaagatgggccagtctggccagtttatgggtcgtcaatag

SEQ ID NO: 46454 - protein, 116 aa, Pichia guilliermondii
MGKIACIDLHLLIILKSGQRKIITDMFGLGGAAPQISSQQKLLAAEAELDMVTGMFNQLVEQCHSKCINKSYNDSDVSKQEALCLDRCVSKYFETNVQVGEHMQKMGQSGQFMGRQ

SEQ ID NO: 46455 - DNA, 291 bp, Pichia guilliermondii
  CDS (1)..(291)
atgtcgttttttttaggaaatacttcccagtactccaactcgattgtcgatgagaccaagatccaattggccaaaattcaacatgaggccatgtctttgactttcaattccatgctcgatacctgtaaagaaaaatgcattgcccacgaatacggagagtccgatttgaacaccggagaaatgtgttgcgttgatcgctgtgtagcgaaatatgtcaaagccaatttggaggttggcaccgcacttcaaagtaaagggtttacgccggaaggcatcgttgccacagtataa

SEQ ID NO: 46456 - protein, 96 aa, Pichia guilliermondii
MSFFLGNTSQYSNSIVDETKIQLAKIQHEAMSLTFNSMLDTCKEKCIAHEYGESDLNTGEMCCVDRCVAKYVKANLEVGTALQSKGFTPEGIVATV

SEQ ID NO: 46457 - DNA, 282 bp, Bombyx mori
  CDS (1)..(282)
atggcagtaccgcagctagaccctgcaaagctgcaattggtgcaggaactggagattgagatgatgtccgacatgtacaaccgcttggtgagcgcatgtcaccggaagtgcataccaattaaatatcatgaacctgaattaggaaaaggcgaatctgtatgtttagatcgctgtgtagccaaatacttggacgtacatgaacgcataggtaagaaactttccaatatgtcacaaggagaaaccgaagatctcacaaaggtcaacataccagacaaaaaatag

SEQ ID NO: 46458 - protein, 93 aa, Bombyx mori
MAVPQLDPAKLQLVQELEIEMMSDMYNRLVSACHRKCIPIKYHEPELGKGESVCLDRCVAKYLDVHERIGKKLSNMSQGETEDLTKVNIPDKK

SEQ ID NO: 46459 - DNA, 213 bp, Oryza sativa
  CDS (1)..(213)
atggcggcgaaacccgagccgacccagttggagaaggagcagatgttcgggatgatggagaaggagatggagtaccgggtcgatcttttcaaccgacttacacagacttgttttgacaagtgcattgagaaaaggtataaagaagctgagctcaatatgggtgagaacagttgcattgatcgatgtgtttcgaagtactggcaggcaagttaa

SEQ ID NO: 46460 - protein, 70 aa, Oryza sativa
MAAKPEPTQLEKEQMFGMMEKEMEYRVDLFNRLTQTCFDKCIEKRYKEAELNMGENSCIDRCVSKYWQAS

SEQ ID NO: 46461 - DNA, 246 bp, Solanum lycopersicum
  CDS (1)..(246)
atggctggtgttccttctaaccttgaaagagaacagatattctctatggcagagaaagagatggagtatagagtggagatgtttaacaagcttacgcatacatgcttcaaaaaatgcgtcgagaacaagtacaaggactcggagttgaacatgggtgaaaatagttgtattgaccgatgcgtttcaaagtactggcaggtgactaaccttgtggggacgcttcttgggaacactcgacccatgtaa

SEQ ID NO: 46462 - protein, 81 aa, Solanum lycopersicum
MAGVPSNLEREQIFSMAEKEMEYRVEMFNKLTHTCFKKCVENKYKDSELNMGENSCIDRCVSKYWQVTNLVGTLLGNTRPM

SEQ ID NO: 46463 - DNA, 255 bp, Pinus taeda
  CDS (1)..(255)
  misc_feature (248)..(248): n is a, g, c or t
atggcatcagttccttctggactcgacaaagatcagatttttggcatggcggagcaggaaatggagtacagagttgagcttttcaataagcttaccaagacttgctttgataaatgcattgaaagaagatataaagaaagtgagctgaacatgggagaatgcagttgtgttgatcgctgtgttgccaaatattggcaggttacttccattgtaggccaacttcttggttcaagtaggccacctatgtnaatctga

SEQ ID NO: 46464 - protein, 84 aa, Pinus taeda
  misc_feature (83)..(83): The Xaa at location 83 stands for Stop, Leu, or Ser.
MASVPSGLDKDQIFGMAEQEMEYRVELFNKLTKTCFDKCIERRYKESELNMGECSCVDRCVAKYWQVTSIVGQLLGSSRPPMXI

SEQ ID NO: 46465 - DNA, 252 bp, Arabidopsis thaliana
  CDS (1)..(252)
atggcttctcctattcccgtcggcgttactaaggaacaggcgtttagtatggcacaaacggagatggagtatcgcgtggaactctttaacaagcttgctcaaacatgctttaataaatgtgtggataaaaggtacaaggaagctgagctaaacatgggtgagaatagttgcatcgaccgttgtgtttccaagtactggcaggtaaatggaatggttggacagcttctaagtgctggcaagcctcccgtgtaa

SEQ ID NO: 46466 - protein, 83 aa, Arabidopsis thaliana
MASPIPVGVTKEQAFSMAQTEMEYRVELFNKLAQTCFNKCVDKRYKEAELNMGENSCIDRCVSKYWQVNGMVGQLLSAGKPPV

SEQ ID NO: 46467 - DNA, 270 bp, Ashbya gossypii
  CDS (1)..(270)
atgtttggactaggtggtcaacctcaattatcttcgcagcagaaaatcgcggccgcggaagcggaattggaccttgttacagacatgttcaacaagcttgtctcaaactgccacagaaagtgcatagacatgaactacaacgagggcgacttgaacaagaacgagtcgaactgccttgacagatgtgtcgcgaagtactttgagaccaacgtcaaggtgggcgaaaacatgcagcaattgggccagaacttctccccaggcaagttctga

SEQ ID NO: 46468 - protein, 89 aa, Ashbya gossypii
MFGLGGQPQLSSQQKIAAAEAELDLVTDMFNKLVSNCHRKCIDMNYNEGDLNKNESNCLDRCVAKYFETNVKVGENMQQLGQNFSPGKF

SEQ ID NO: 46469 - DNA, 282 bp, Aspergillus fumigatus
  CDS (1)..(282)
atgtctttcctcttcggcggtccccccaagatgtcctcggcagagaagattgctgccgcagagacggaagtcgagatggtttccgatatgttcaaccgtctcaccgagtcttgccagaagaagtgcattcccaacgactaccgggaaggcgacttgaacaagggcgaatcagtctgcctcgaccgctgcgtctccaagttctttgaggtcaacatcaaggtcagcgagaagatgcagggtgaggcggcccagaaacagggcgctcctggattcggcatgtaa

SEQ ID NO: 46470 - protein, 93 aa, Aspergillus fumigatus
MSFLFGGPPKMSSAEKIAAAETEVEMVSDMFNRLTESCQKKCIPNDYREGDLNKGESVCLDRCVSKFFEVNIKVSEKMQGEAAQKQGAPGFGM

SEQ ID NO: 46471 - DNA, 309 bp, Cryptococcus neoformans
  CDS (1)..(309)
atgagttttcttttcggaggcaacaaccgatctgtcgagggctctgtcgaccccgccaaaatagaaatggccgtcgctgagctcgatatgatcacagatgtcttcaaccgtcttgtcaactcatgtcacactaaatgtatctcttcaacaccgctcaaccaccgatacgctgaaggggatcttttgaagggcgaaagcgtgtgcatcgaccgctgcactgcgaaattttttgaggtaaacaaaaaggttggagagaggatgtctgctatgggcagtgcggctcaggccactggaagtttcgggaggtaa

SEQ ID NO: 46472 - protein, 102 aa, Cryptococcus neoformans
MSFLFGGNNRSVEGSVDPAKIEMAVAELDMITDVFNRLVNSCHTKCISSTPLNHRYAEGDLLKGESVCIDRCTAKFFEVNKKVGERMSAMGSAAQATGSFGR

SEQ ID NO: 46473 - DNA, 276 bp, Debaryomyces hansenii
  CDS (1)..(276)
atgttcggattaggtggtgctgctcctcaaatttcatctcaacaaaagttacaagctgctgaggctgaattagacatggttactggtatgttcaaccaattggtcgaacaatgccattccaaatgtatcaacaaaacctataacgactcagaagtatccaaacaggaagctctttgtttagatagatgtgttgctaaatactttgaaaccaatgtccaagttggtgaacatatgcaaaaaatgggtcaatctggtcaatttatgggtagacaatag

SEQ ID NO: 46474 - protein, 91 aa, Debaryomyces hansenii
MFGLGGAAPQISSQQKLQAAEAELDMVTGMFNQLVEQCHSKCINKTYNDSEVSKQEALCLDRCVAKYFETNVQVGEHMQKMGQSGQFMGRQ

SEQ ID NO: 46475 - DNA, 279 bp, Drosophila melanogaster
  CDS (1)..(279)
atggcattgccccagatcagcaccgcagaccaggccaagctgcagctgatgcaggaaatggagatcgaaatgatgtccgatttatataaccgcatgacgaacgcttgccacaaaaagtgcattccgccgcgctactccgagtcggagttgggcaaaggcgagatggtgtgcatcgatcgctgtgtggccaaatatctggacattcacgagaagatcggcaagaagctgacggccatgtccatgcaggacgaggagctgatgaagaagatgtctagttaa

SEQ ID NO: 46476 - protein, 92 aa, Drosophila melanogaster
MALPQISTADQAKLQLMQEMEIEMMSDLYNRMTNACHKKCIPPRYSESELGKGEMVCIDRCVAKYLDIHEKIGKKLTAMSMQDEELMKKMSS

SEQ ID NO: 46477 - DNA, 282 bp, Emericella nidulans
  CDS (1)..(282)
atgtctttcctatttggcggcgctcccaaaatgagctcggagcagaagattgctgccgcagagaccgaagtcgaaatgatcacagacatgttcaaccgattatcggaatcctgctcgaagaagtgcatccccaacgactaccgcgagggcgatctgaacaagggcgagtccgtctgccttgaccgctgtgtcggcaagttcttcgaggtcaacatcaaggtcagcgaaaagatgcagggtgttgctggtcagcagcagggtggtgcgggactaagcctgtga

SEQ ID NO: 46478 - protein, 93 aa, Emericella nidulans
MSFLFGGAPKMSSEQKIAAAETEVEMITDMFNRLSESCSKKCIPNDYREGDLNKGESVCLDRCVGKFFEVNIKVSEKMQGVAGQQQGGAGLSL

SEQ ID NO: 46479 - DNA, 288 bp, Gibberella zeae
  CDS (1)..(288)
atgagctttctcggaatgggtcgacctcagcctacctcggagcaaaagattgctgccgttgagagtgagatgcgcatgatggccgacacctacaaccgtctccagcagtcttgccagaagaagtgcgttcccaacgactaccgcgagggcgagctcaacaagggcgagtctgtctgcctcgaccgttgcacagccaagttcctcgacacatcgatgaaggtcagcgagatcatgcagcagcagggccaggccctcggtggccagcagggcggcggcggcatgttctaa

SEQ ID NO: 46480 - protein, 95 aa, Gibberella zeae
MSFLGMGRPQPTSEQKIAAVESEMRMMADTYNRLQQSCQKKCVPNDYREGELNKGESVCLDRCTAKFLDTSMKVSEIMQQQGQALGGQQGGGGMF

SEQ ID NO: 46481 - DNA, 270 bp, Kluyveromyces lactis
  CDS (1)..(270)
atgttcggtctaggcggtcaacctcaattatcttctcaacaaaagctatcagcagctgaagctgaactagatttggttactgacatgttcaacaagttggtcgacaactgtcacaagaaatgtattgaacaaatttataacgatggtcaactaaacaagaacgaatctacttgtatcgacagatgtgttgccaagtactttgaaactaacgttaaggttggtgaaaacatgcaacagctaggccaagctttctctccaggtaaattctaa

SEQ ID NO: 46482 - protein, 89 aa, Kluyveromyces lactis
MFGLGGQPQLSSQQKLSAAEAELDLVTDMFNKLVDNCHKKCIEQIYNDGQLNKNESTCIDRCVAKYFETNVKVGENMQQLGQAFSPGKF

SEQ ID NO: 46483 - DNA, 273 bp, Neurospora crassa
  CDS (1)..(273)
atgttcggactcggcaggccgcagcccacttcggccgagaagattgccgccgttgagaacgagctcaaggttgtcgctgagatgcactctcgcatggtcaagatctgcaccctcaagtgcatcgacaagtcgtaccgcgagggcgacctcagcaagggcgagtccgtctgcctcgaccgctgcgccgccaagttctttgagacgcaccagaagatctcggaccagctgcagaaggagacccaggcccgtggtggaggtggcttcggcatgtaa

SEQ ID NO: 46484 - protein, 90 aa, Neurospora crassa
MFGLGRPQPTSAEKIAAVENELKVVAEMHSRMVKICTLKCIDKSYREGDLSKGESVCLDRCAAKFFETHQKISDQLQKETQARGGGGFGM

SEQ ID NO: 46485 - DNA, 270 bp, Schizosaccharomyces pombe
  CDS (1)..(270)
atgtctatgtttggaatcggaaagaataatcagaccattaatcctcagaacattgctatggctgagcaagaggttgagatgatgtctgatatctttaatagacttgtaatgacctgtcataaaaagtgcatatctcctaaatactatgaagccgatttaacgaaaggagaaagcgtgtgtattgaccgttgtgtatcgaaatactttgaagcaaatcagagtctttcacagcacatgcaaaagcgtggtcaagaaaatccaacaccatga

SEQ ID NO: 46486 - protein, 89 aa, Schizosaccharomyces pombe
MSMFGIGKNNQTINPQNIAMAEQEVEMMSDIFNRLVMTCHKKCISPKYYEADLTKGESVCIDRCVSKYFEANQSLSQHMQKRGQENPTP

SEQ ID NO: 46487 - DNA, 423 bp, Yarrowia lipolytica
  CDS (1)..(423)
atgtcattccttggactcggaggccagaaccctaacggacctagcaacccccagaagctgctcgccgctgaggccgagctcgacatggtcaccgacatgttcaaccgtctggttgagtcttgccacgagaagtgcatcaaggccgactactcttccggcgacctcaacgccaacgagggtctgtgtctcgaccgatgtgtcgccaagtactttgacgtcaacaccaaggtcggagaggtgagtatgagaggagcggatggcaattatggattggaagacactgctaacacagtacatgcagaagcttggaagcagcggatccttcatgggccgaccctaaatgtgaaatatgtacatagaataaaagtccatgagattgtacgtctgacgatggtttatttggccccctggcacttcaattga

SEQ ID NO: 46488 - protein, 140 aa, Yarrowia lipolytica
MSFLGLGGQNPNGPSNPQKLLAAEAELDMVTDMFNRLVESCHEKCIKADYSSGDLNANEGLCLDRCVAKYFDVNTKVGEVSMRGADGNYGLEDTANTVHAEAWKQRILHGPTLNVKYVHRIKVHEIVRLTMVYLAPWHFN

SEQ ID NO: 46489 - DNA, 282 bp, Saccharomyces cerevisiae
  CDS (1)..(282)
atgtctttcttaggtttcggtggtggtcagcctcaattatcatctcaacaaaagattcaagctgcggaagctgaactagatttggtcacagacatgttcaataaattggttaataactgttataaaaaatgtatcaatacttcttattccgagggtgagctgaataagaatgaatcttcgtgcctagacagatgtgtggccaaatattttgagaccaatgttcaagtcggtgaaaacatgcagaaaatgggccaatcatttaacgcagccggtaagttttag

SEQ ID NO: 46490 - protein, 93 aa, Saccharomyces cerevisiae
MSFLGFGGGQPQLSSQQKIQAAEAELDLVTDMFNKLVNNCYKKCINTSYSEGELNKNESSCLDRCVAKYFETNVQVGENMQKMGQSFNAAGKF

SEQ ID NO: 46491 - DNA, 264 bp, Arabidopsis thaliana
  CDS (1)..(264)
atggattcatactcttcgccgccgatgggaggttcaggtagttcggtttcgcccgaagtaatgatggagtcggtcaagactcagctcgctcaagcttacgccgaagagttaatcgagactttgaggacaaaatgttttgacaagtgcgtaacgaagccaggatcaagcctcggtggaagtgagagtagctgtatttcgagatgtgttgaacgttacatggaagctactgcaatcataagtcgttctcttttcactcaacgttga

SEQ ID NO: 46492 - protein, 87 aa, Arabidopsis thaliana
MDSYSSPPMGGSGSSVSPEVMMESVKTQLAQAYAEELIETLRTKCFDKCVTKPGSSLGGSESSCISRCVERYMEATAIISRSLFTQR

SEQ ID NO: 46493 - DNA, 312 bp, Ashbya gossypii
  CDS (1)..(312)
atggcgttatcttcgatatttggtggcggatcaccatcgcagcaatcaaacctacctacttcctctgcatcttcttcggtcaaggatcaattgaaaggccagattgctcaagagctggctgtcgcaaatgcaactgagttagttaacaaagtgacggaaaactgctttgagaaatgcttaatggcaccttacaccagcaaacaggatacttgcgttgaccagtgtctagccaagtacatgagaagctggaacgctatttcgcaagcatacgttgccagaatccagcaggcttccgccaacggagacatctaa

SEQ ID NO: 46494 - protein, 103 aa, Ashbya gossypii
MALSSIFGGGSPSQQSNLPTSSASSSVKDQLKGQIAQELAVANATELVNKVTENCFEKCLMAPYTSKQDTCVDQCLAKYMRSWNAISQAYVARIQQASANGDI

SEQ ID NO: 46495 - DNA, 306 bp, Kluyveromyces lactis
  CDS (1)..(306)
atggctttaacttcgatctttggtggtagctcttcatcatctggtaccccagccacatccagtcctagcgatgtcaagacccaacttaaatctcaaatctctcaagaattagccatcgccaatgctaccgagttagttaacaaagtcactgagaactgttttgagaaatgtctgaatgctccatatgctgcttctcaagataactgcgtcgaccaatgtttggctaaatatatgagaagttggaatgccatttcaaaggcttacattaacagaattcagcaagcttcggttaacggtgaaatctaa

SEQ ID NO: 46496 - protein, 101 aa, Kluyveromyces lactis
MALTSIFGGSSSSSGTPATSSPSDVKTQLKSQISQELAIANATELVNKVTENCFEKCLNAPYAASQDNCVDQCLAKYMRSWNAISKAYINRIQQASVNGEI

SEQ ID NO: 46497 - DNA, 288 bp, Schizosaccharomyces pombe
  CDS (1)..(288)
atgggcattttcggtggaaatagtggaaatgcaccttcttctgaagacaaaaaatccattttcatgaaacaaattcgtcaggaacttgctgttgctcaagctggcgaattgataagtaaaatcaatgagaactgttttgataaatgtatcccggagcctggttccacattcgatcccaatgaaaagtcttgcgtttccaaatgtatggaacgctatatggatgcttggaacattgtttctcgaacctatatctctcgtatgcaacgagagcagaaaaatctcaactga

SEQ ID NO: 46498 - protein, 95 aa, Schizosaccharomyces pombe
MGIFGGNSGNAPSSEDKKSIFMKQIRQELAVAQAGELISKINENCFDKCIPEPGSTFDPNEKSCVSKCMERYMDAWNIVSRTYISRMQREQKNLN

SEQ ID NO: 46499 - DNA, 255 bp, Oryza sativa
  CDS (1)..(255)
atggactccttctcgtcgtcgtccgggtcgccccccaatacggaggcgctcatggaccagatcaaggcgcagctcgctcaggcctacgcccaggagttccttgagactgttggaaacaagtgctttgccaagtgcgtgacaaagccaggatcaagcttgagcgggagcgagagcagttgcatatcacgctgtgttgatcgttacattgaggcaactggtattgtcagccgagctctgttcagttccacacgctga

SEQ ID NO: 46500 - protein, 84 aa, Oryza sativa
MDSFSSSSGSPPNTEALMDQIKAQLAQAYAQEFLETVGNKCFAKCVTKPGSSLSGSESSCISRCVDRYIEATGIVSRALFSSTR

SEQ ID NO: 46501 - DNA, 261 bp, Brassica napus
  CDS (1)..(261)
atggctgctcccagtccaattcccgccggcatttctaaggaacaggcgtttagcatggcacaaacggagatggaatatcgagttgaactcttcaacaagcttgctcaaacatgctttgttaaatgtgtggataaaaggtacaaggaaactgagttaaacatgggtgagaacagttgcattgaccgttgtgtttccaagtactggcaggtaaatggaatggtcggacagctcttaagtgctggcaagcctcctccacagtaa

SEQ ID NO: 46502 - protein, 86 aa, Brassica napus
MAAPSPIPAGISKEQAFSMAQTEMEYRVELFNKLAQTCFVKCVDKRYKETELNMGENSCIDRCVSKYWQVNGMVGQLLSAGKPPPQ

SEQ ID NO: 46503 - DNA, 261 bp, Brassica napus
  CDS (1)..(261)
atggctgctcccaacccaattcctgccggcatttctaaggaacaggcgtttagcatggcccacacggaaatggaatatcaagatgaactcttcaccaaccttgctcaaacatgcttagataaatgtgtggataaaaggtccacggaaaatgacttaaacatgggtgagaacagttgcattgaccgttgtgtttccaagtactggcaggtaaatggaatggtcggacagctcttaagcgctggcaagcctcctccacagtaa

SEQ ID NO: 46504 - protein, 86 aa, Brassica napus
MAAPNPIPAGISKEQAFSMAHTEMEYQDELFTNLAQTCLDKCVDKRSTENDLNMGENSCIDRCVSKYWQVNGMVGQLLSAGKPPPQ

SEQ ID NO: 46505 - DNA, 255 bp, Glycine max
  CDS (1)..(255)
atggcttccaacatctcgcccgctgcctttgataaagaacagatatttggaatggctgaaaaggagatggaatatagggttgaattattcaacaagatgacccagacctgtttcaagaagtgtgttgacaataggtacaaggagtctgagctaaatatgggtgaaaatagttgcattgaccgctgtgtttcaaaatactggcatgtgactaatctagttggtcagctgcttggttctgggaggtctccaatgtaa

SEQ ID NO: 46506 - protein, 84 aa, Glycine max
MASNISPAAFDKEQIFGMAEKEMEYRVELFNKMTQTCFKKCVDNRYKESELNMGENSCIDRCVSKYWHVTNLVGQLLGSGRSPM

SEQ ID NO: 46507 - DNA, 255 bp, Glycine max
  CDS (1)..(255)
atggcttccaacatctcaccttctgcctttgataaagagcagatatttggaatggctgaaaaggagatggagtatcgggttgaattattcaacaagatgacccagacatgtttcaataagtgtgttgacaataggtacaaggaatccgagctaaatatgggtgaaaatagttgcattgaccgctgtgtttcaaaatactggcatgtgactaatctaattggtcagctgcttggttctgggaagcctgcaatgtaa

SEQ ID NO: 46508 - protein, 84 aa, Glycine max
MASNISPSAFDKEQIFGMAEKEMEYRVELFNKMTQTCFNKCVDNRYKESELNMGENSCIDRCVSKYWHVTNLIGQLLGSGKPAM

SEQ ID NO: 46509 - DNA, 255 bp, Glycine max
  CDS (1)..(255)
atggcttccaacatctcgcccgctgcctttgataaagaacagatatttggaatggctgaaaaggagatggaatatagggttgaattattcaacaagatgacccagacctgtttcaagaagtgtgttgacaataggtacaaggagtctgagctaaatatgggtgaaaatagttgcattgaccgctgtgtttcaaaatactggcatgtgactaatctagttggtcagctgcttggttctgggaggcctccaatgtaa

SEQ ID NO: 46510 - protein, 84 aa, Glycine max
MASNISPAAFDKEQIFGMAEKEMEYRVELFNKMTQTCFKKCVDNRYKESELNMGENSCIDRCVSKYWHVTNLVGQLLGSGRPPM

SEQ ID NO: 46511 - DNA, 20 bp, Artificial sequence
  primer
atggcttccaacatctcgcc

SEQ ID NO: 46512 - DNA, 20 bp, Artificial sequence
  primer
ttacataggaggccttccag

SEQ ID NO: 46513 - protein, 86 aa, Artificial sequence
  consensus sequence
  Variant (2)..(28): Xaa in position 2 to 28 is any amino acid
  Variant (29)..(51): Xaa in position 29 to 51 is any or no amino acid
  Variant (53)..(54): Xaa in position 53 to 54 is any amino acid
  Variant (57)..(60): Xaa in position 57 to 60 is any amino acid
  Variant (61)..(70): Xaa in position 61 to 70 is any or no amino acid
  Variant (72)..(74): Xaa in position 72 to 74 is any amino acid
  Variant (76)..(77): Xaa in position 76 to 77 is any amino acid
  Variant (79)..(79): Xaa in position 79 is any amino acid
  Variant (84)..(84): Xaa in position 84 is any amino acid
MXXXXXXXXXXXXXXXXXXXXXXXXXXXXXXXXXXXXXXXXXXXXXXXXXXCXXKCXXXXXXXXXXXXXXLXXXEXXCXDRCVXKY

SEQ ID NO: 46514 - protein, 15 aa, Artificial sequence
  protein pattern
  Variant (2)..(3): Xaa in position 2 to 3 is any amino acid
  Variant (4)..(4): Xaa in position 4 is Gly or Asn
  Variant (6)..(7): Xaa in position 6 to 7 is any amino acid
  Variant (9)..(9): Xaa in position 9 is Ile, Leu or Val
  Variant (13)..(13): Xaa in position 13 is any amino acid
  Variant (14)..(14): Xaa in position 14 is Ala, Gly or Ser
LXXXEXXCXDRCXXK

SEQ ID NO: 46515 - DNA, 1302 bp, Glycine max
  CDS (1)..(1302)
atggctcaacccagttccaacggggatctgaataataaccagcagggtcaggttcagcaacagcagcagcagtgggcggcggcgcagccgcatcagtatcagcagcaatggatggccatgcagtacccggccacagccatggccatgatgcagcagcagatgatgatgtacccgcagcattacatgccctacgctcacccccattatccgccgccgccgccgccgccgcctcctcagtcgtctcaccatcaccaccacaaacaggccgcagccgcggcggcggctgcggcctcctccgacgagatcaggaccgtctggctcggcgacctccaccattggatggacgagaactacctccacaactgctttgctcacaccggcgaggttgtgtcggccaaggtcattcgaaataagcaaactggtcagtctgagggatatggattcgtggagttctattcacgagcgacggctgagaaagtcttgcagaactataatggcacgatgatgcccaatacagatcaggcattccgtctgaattgggccacattcagtgcgggggaaaggcgttcttccgatgctacttctgatctctctatatttgtgggggacttggccattgatgttaccgatgctatgctgcaagagacttttgctggccgatattcgtctattaagggagcaaaagttgtcattgattctaatactggccgctcaaaaggctatggttttgttaggtttggtgatgaaaacgagagaacgagggcaatgaccgaaatgaatggcgtttattgttctagtaggcccatgcgaataggtgttgcaactcccaagaaaacttatggcttccaacaacaatattcttctcaagctgtggtattggctgggggacactcagctaatggtgctgtggcccaaggttcccattctgaaggggatataaacaacactactatatttgttggagggcttgattctgataccagtgatgaggatctcagacaaccatttttgcaatttggtgaggttgtctctgtgaaaattccagtgggtaaagggtgtggatttgttcaatttgcagacagaaagaatgctgaggaagcaattcacgcattgaatgggacagtaattgggaagcagacagtgcgactttcttggggtcgcagtccaggaaataagcattggagatctgattccaatggaggctattttggtggtcagagttatggaggccatggatttgctgtgagacagaatcaggatatagccatgcaacctgcaactgcaattcaaggggcttcctaa

SEQ ID NO: 46516 - protein, 433 aa, Glycine max
MAQPSSNGDLNNNQQGQVQQQQQQWAAAQPHQYQQQWMAMQYPATAMAMMQQQMMMYPQHYMPYAHPHYPPPPPPPPPQSSHHHHHKQAAAAAAAAASSDEIRTVWLGDLHHWMDENYLHNCFAHTGEVVSAKVIRNKQTGQSEGYGFVEFYSRATAEKVLQNYNGTMMPNTDQAFRLNWATFSAGERRSSDATSDLSIFVGDLAIDVTDAMLQETFAGRYSSIKGAKVVIDSNTGRSKGYGFVRFGDENERTRAMTEMNGVYCSSRPMRIGVATPKKTYGFQQQYSSQAVVLAGGHSANGAVAQGSHSEGDINNTTIFVGGLDSDTSDEDLRQPFLQFGEVVSVKIPVGKGCGFVQFADRKNAEEAIHALNGTVIGKQTVRLSWGRSPGNKHWRSDSNGGYFGGQSYGGHGFAVRQNQDIAMQPATAIQGAS

SEQ ID NO: 46517 - DNA, 1729 bp, Oryza sativa
  CDS (84)..(1391)
cggcacgaggctaatccctcctcctcctcgcctagggggttcgtcccggggcgccaccccatacccctcccgccgccgccgccatgatgccgcagccgcagccagggatggccccgccgccgccgcccccgcaggcgggggtcgccgggggcggcggcgcgccgccgcagtggggcgccatccctcccccggtgccgcaccaacagcagcagtacgcgccgccgccgccgcagatgtggggccaggctcccccgccgccgccgcagatgtggggccaggctcccccgccgccgcagcccgcgtacggccagccgccgccggcccaggcggggtactacggggcgccgccgcaggcggccccggccgtccccgcggggcccaacgaggtcaggacgctctggatcggggatctccagtactggatggatgagaactacatctccgcctgctttgcgcccaccggcgagctacaatctgtgaagctaattcgtgacaagcagactggacaacttcagggttatggctttattgaattcacatcccatgctggtgctgaaagagttcttcaaacatacaatggggcaatgatgccaaatgttgagcagacataccggttgaattgggcctctgctggtgaaaaacgtgatgatacccctgattacacaatttttgttggtgatttggctgctgatgttacagactacatattgcaagagacgttcagggtacattacccatctgtgaagggtgcaaaggttgtgacagataaaatgacaatgcgttcaaagggctatggcttcgtcaaatttggtgatccttccgagcaagcccgtgcaatgacagaaatgaatgggatggtttgttcttcaagacctatgcgtatcggcccagctgcaaataagaaagcaactggagttcaagagaaagtaccgagtgctcaaggagttcagtctgacagtgatcctagcaataccactatatttgttggtggccttgatcccagtgtcactgacgatatgttgaaacaagttttcactccctatggagatgtggtccatgttaagatcccagttggaaaaagatgtggttttgttcaatttgctaacagagcttctgcagatgaagctttggtacttctacaaggtaccttgattggaggacagaatgtgaggctttcatggggccgcagcccttcaaatagacaagctcagcctcaacaggattccaaccagtggggtggtgctaatgctggatactacggttatgggcaaggatatgagggttatgggtatgctcaacctcaggaccctaatatgtacgggtatggagcttatgctggttatcccaactaccaacaacccctagctcagcagccgcagcagcaacagtgagatccaatctattatatggttttcgagactgatcaaagccgtcgaacgaggtgatgcttctgcattccggagcatgtctgggttatgtcaatagagattgtgatttgtagttctccagattttgactgcttatgaggtgttttgattaagcgacatgttctgtacttctgtgagcctgggctggtgcacattgtgattctgtcgtacatgtgaactgcatgtagtaaaaaaatctttcgtggtttgttttctgccttaaaattatcattgctttgctgttatgtattctgcacagcttgttacccagatggatgtcatatgccattcgattttgacct

SEQ ID NO: 46518 - protein, 435 aa, Oryza sativa
MMPQPQPGMAPPPPPPQAGVAGGGGAPPQWGAIPPPVPHQQQQYAPPPPQMWGQAPPPPPQMWGQAPPPPQPAYGQPPPAQAGYYGAPPQAAPAVPAGPNEVRTLWIGDLQYWMDENYISACFAPTGELQSVKLIRDKQTGQLQGYGFIEFTSHAGAERVLQTYNGAMMPNVEQTYRLNWASAGEKRDDTPDYTIFVGDLAADVTDYILQETFRVHYPSVKGAKVVTDKMTMRSKGYGFVKFGDPSEQARAMTEMNGMVCSSRPMRIGPAANKKATGVQEKVPSAQGVQSDSDPSNTTIFVGGLDPSVTDDMLKQVFTPYGDVVHVKIPVGKRCGFVQFANRASADEALVLLQGTLIGGQNVRLSWGRSPSNRQAQPQQDSNQWGGANAGYYGYGQGYEGYGYAQPQDPNMYGYGAYAGYPNYQQPLAQQPQQQQ

SEQ ID NO: 46519 - DNA, 1791 bp, Zea mays
  CDS (119)..(1417)
cctgccgggagacagatgtcaaccccgaattttccgtcgccccccctgctcgccgtcgctccttcggcccttcctctctcccatctcggctagggttaggtcgtctcgccaagtcgccatgatgcagcagcccccgccgcagcagccgcagccgggcatggcgccgcctccgcctccgcaggctgctggcgggcagccaccgcagtggggtgggatcccgccgccgatggcgcagcagtacggcgcaccgcctccgcagcagcctccggcgatgtggggccagcctccgccgcaggcgcactacgggcaggcaccaacccctcagcagtactacgccgcgccgccggtgccggtgcaggcgccagccgcccccgctgcggcggacgaggtcaggacgctctggatcggggacctgcaatactggatggacgagaactacgtcttcgggtgcttttcgaacactggggaggttcaaaatgtgaagctcatccgtgacaagaattcagggcagcttcagggttatggttttgttgagtttacaagccgtgcagctgcagaacgagttcttcagacatacaatggacaaatgatgccaaatgttgacttgacatttcggctgaattgggccagtgctggtgaaaagcgcgatgatactcctgaatatactatttttgttggggatttggctgcagatgttacagattacttgttacaagagacattcagggttcattatccctctgtcaagggtgcaaaagttgtgactgataaattgacaatgcgcacaaagggttatggatttgtgaaatttggtgatcctacagagcaagctcgtgcaatgactgaaatgaatggaatgccttgttcttccaggcctatgcgtattggtcctgcagcaagtaggaaaaatacaggaggtgttgttcaagagagagtaccaaattctcaaggagctcagtctgagaatgatcctaacaataccactatatttgttggtgggcttgaccccaatgtcactgaagataccctaaaacaagttttttctccttacggtgaagtcgtccatgttaagatccctgttgggaagagatgtggttttgttcagttcgttaccagaccttctgctgagcaagcgctgctaatgctgcaaggggccttgattggtgcacagaatgttcgactttcatggggtagaagcctgtcgaacaagcaggctcagcctcagcaggaatccaatcaatggggtgcggctgctggtgctggtggctactatgggggctatggacaaggttatgaggcttatggcagtgggtatgcacaaccccaggatcctaacatgtatggttatggcgcttatggcggttatcccaattaccaacagcaaccagctgcacagcagcaacagcaacaacagtgatgcctgtttgctcgggtaggtcattgggttgtcgcgacggaattaattaaatattatttcaggacactctcatattgcattcttgtcaattgaggtggttttgaaaggctcctgattttgatggccccatggcacggtttcatctatttattagtatatgacatatatgcgctgtgaacaagtggcgctctactgtgattgctgtgttgagacatgctttcttagtttctttccatgtttctcggatctgttgtgttacctttattactgtgtatttgcatatctactgtgatgctatatatgcactgtgccgtttgtttcctataaaaaaaaaaaaaaaagagcccccgcccgggaatccggaccgtacggca

SEQ ID NO: 46520 - protein, 432 aa, Zea mays
MMQQPPPQQPQPGMAPPPPPQAAGGQPPQWGGIPPPMAQQYGAPPPQQPPAMWGQPPPQAHYGQAPTPQQYYAAPPVPVQAPAAPAAADEVRTLWIGDLQYWMDENYVFGCFSNTGEVQNVKLIRDKNSGQLQGYGFVEFTSRAAAERVLQTYNGQMMPNVDLTFRLNWASAGEKRDDTPEYTIFVGDLAADVTDYLLQETFRVHYPSVKGAKVVTDKLTMRTKGYGFVKFGDPTEQARAMTEMNGMPCSSRPMRIGPAASRKNTGGVVQERVPNSQGAQSENDPNNTTIFVGGLDPNVTEDTLKQVFSPYGEVVHVKIPVGKRCGFVQFVTRPSAEQALLMLQGALIGAQNVRLSWGRSLSNKQAQPQQESNQWGAAAGAGGYYGGYGQGYEAYGSGYAQPQDPNMYGYGAYGGYPNYQQQPAAQQQQQQQ

SEQ ID NO: 46521 - DNA, 1699 bp, Triticum aestivum
  CDS (119)..(1420)
actgctcctccctcctccctcctcctccacctcttccctcccctgacccctcgcctccaaattactatctccgtcggacgcacgcacgcgcgcggaaaggtttggttttgcggtgaccatgcaggcagcgacggtggcagcggcggcgaacggcgggggcgacgtgcagaagcagcagcaggtgggggcggcgccgctcccggcggtggcggcgctggcgccgccgccccattgggtggccatgccgttcgcgccgccgggcgccgcggccatggtggtgccgcaccagatggcgccggcgccgccccaccagttcgcgccgcacttcgtgccgttccacgccgtcgcaccgccgcccccgccgctgcagccgcgcccggcgcacgtcgccatgggctcgcccgcccccgccgcgcagcccggccaggaggagaacaagaccatctgggtcggcgacctccattactggatggacgagaactacctccacacctgcttcggctacaccggcgaggttgtcgcaatcaaggttattcgtaataagcaaaccggacaatcagaaggatatggatttgtagagttctacagtcatgctgcagctgaaaaagtacttgatggttttgctgggcatataatgccaaatactgaccaaccttttaggataaactgggcatcatttagcatgggggataggcgctcggacattgcttcagatcattccatatttgtaggcgatcttgcctctgatgtcaatgatactgcattgctagagactttctccagcaggtactcctctgtcaaaggtgcaaaagttgttattgatgctaacactggtagatccaagggctatggctttgtgcggtttggagatgatagtgagaagacaaacgccatgactgagatgaatggagtgtattgctcaactaggcccatgaggattggccctgcaactcccagaaaatcttcaggtacttctggatctactgtttcatctgctcgatcagacggagatttgacaaacacaactgtatttgtcggtgggcttgacccaaatgttagtgaagatgatcttaagcaaaccttctcccagtatggcgagatttcctctgtgaagattccagttgggaaacagtgcgggtttgtgcagtttcttcagagaaagaatgcagaagatgcattgcaagggctgaacgggagcaccattgggaaacagaccgtgcgcctttcatggggtcgcaatccagcaaacaagcagttgaggagtgacaacggcaaccagtggaacaacgggatgtactacgcgccctcgcccttctacaacgggtacggctaccccgcggcaccgttccctgacccgggcatgtacgccgctgcctatggcgcataccccgtctacgggaaccagcaacaggtcagctgaagatcggaggatcacacgcccatcgatccctcgacaacaacccgaggcgcgcacgcagtagctgtagctcttgctagagaaagaaggtagacgatgacggcttcttaggtgagctagatgtagtgactggtcatgtaaagtacattactattacgaagaactagcaccactaaggcacctaaaatgactcgaccgccatggccgtctagctggattgttctagggaaaaaaaaagttttggcatagagctgcaatataaggtagaacaataatctattc

SEQ ID NO: 46522 - protein, 433 aa, Triticum aestivum
MQAATVAAAANGGGDVQKQQQVGAAPLPAVAALAPPPHWVAMPFAPPGAAAMVVPHQMAPAPPHQFAPHFVPFHAVAPPPPPLQPRPAHVAMGSPAPAAQPGQEENKTIWVGDLHYWMDENYLHTCFGYTGEVVAIKVIRNKQTGQSEGYGFVEFYSHAAAEKVLDGFAGHIMPNTDQPFRINWASFSMGDRRSDIASDHSIFVGDLASDVNDTALLETFSSRYSSVKGAKVVIDANTGRSKGYGFVRFGDDSEKTNAMTEMNGVYCSTRPMRIGPATPRKSSGTSGSTVSSARSDGDLTNTTVFVGGLDPNVSEDDLKQTFSQYGEISSVKIPVGKQCGFVQFLQRKNAEDALQGLNGSTIGKQTVRLSWGRNPANKQLRSDNGNQWNNGMYYAPSPFYNGYGYPAAPFPDPGMYAAAYGAYPVYGNQQQVS

SEQ ID NO: 46523 - DNA, 1589 bp, Unknown
  Unidentified
  CDS (68)..(1372)
ctttcttttcgatcgggaaaagaaaaaaacacccagagtctcagatcaccctgttctttaaatcaagatgcagtcaaccaacggttctgatctgagctcaaagcaccaaaaacagcagcccccaccgccgccgcagccacagcagcctcaatggatgccgaaccaatggatgggagctatgcaatacccggcggctgctatggcaatgatgcaacaacaacagatgatgatgatgtatcctcctcatcattacatggcttataataaccctcattttcattatcaacaacagtatcaacaacaacagttgcataaacaacaacaaggatctaattcagatgaggttaaaacgatctgggttggtgaccttcttcattggatggatgaaacttatcttcatagtttcttctctcaatctggcgaggtttcgtctataaaaatcatacgaaataagcaaaccggacagtctgaagggtacggattcgtggagtttagctctcgagcaacggctgaaaaggttttacagagctgtaatggttctctgatgccaaatacagagcagcctttccgtctgaactgggcctcgttcggtgtgaacgaaagacgatctgatgctggctctgatctatctatattcgtaggagatttggctgccgatgttactgatacagtgttgcatgaaaccttttctagtaaatttcaatctgtcaaaggagcaaaagttgttatcgattcgaataccggtcgttcgaaaggttacggtttcgttcggttcggtgatgaaaatgaaaggtcgagggccatgactgaaatgaatggtgtgtattgctcaagtagacctatgagaattggtgttgctactcccaagaaagcatccggatatcagcaacagtattcttcacaagctgtggtattggccggtggacatgcatcaaatggtgctgtagcccaaggttctcaatatcataatgactcaaacaatgctaccatttttgttggaggacttgactcggatgttagcgatgatgatctcagacaacccttttcccagtttggtgagatcatctctgtgaaaataccacctggaaaaggatgtggatttgtgctatttgcaaacaggaaggacgctgaggaagcaatccagagcttgaacggaacaaccataggcaagcagactgtccgactttcttggggtcgaagtattggaaacaaacagcggagagctgattctggaaaccagtggaatggaggttattatcgacggcaaggctatggtggttacggctacggttatggttatggctatgcaacaccaccaagtccaggtcctagcatgtacgctgctgcagctgccgggcctagtgcttcataagagtggtgaggtatggaaattttaacaatggcatgtaatctgaaaaaattgcagaaaaggttattcattatttaagtaggatcgccctctcattgctgctttagcttgatgttcagattacataagttttgtagctggattttgtttttatatcttttgggcatgtttttagaactttattaatatgttattttacaatttcgattttgtgtttgag

SEQ ID NO: 46524 - protein, 434 aa, Unknown
  Unidentified
MQSTNGSDLSSKHQKQQPPPPPQPQQPQWMPNQWMGAMQYPAAAMAMMQQQQMMMMYPPHHYMAYNNPHFHYQQQYQQQQLHKQQQGSNSDEVKTIWVGDLLHWMDETYLHSFFSQSGEVSSIKIIRNKQTGQSEGYGFVEFSSRATAEKVLQSCNGSLMPNTEQPFRLNWASFGVNERRSDAGSDLSIFVGDLAADVTDTVLHETFSSKFQSVKGAKVVIDSNTGRSKGYGFVRFGDENERSRAMTEMNGVYCSSRPMRIGVATPKKASGYQQQYSSQAVVLAGGHASNGAVAQGSQYHNDSNNATIFVGGLDSDVSDDDLRQPFSQFGEIISVKIPPGKGCGFVLFANRKDAEEAIQSLNGTTIGKQTVRLSWGRSIGNKQRRADSGNQWNGGYYRRQGYGGYGYGYGYGYATPPSPGPSMYAAAAAGPSAS

SEQ ID NO: 46525 - DNA, 1657 bp, Zea mays
  CDS (33)..(1331)
gtgctagggttaggtcgtctcggcaagtcgccatgatgcagcagcccccgccgcagcagccgcagccgggtatggcgctacctcctccccctcagaccggtggcgggcagccaccgcagtggggcgcgatcccgccgccgatgacgcagcagtacggcgcaccacctccgcagcagcctccagcgatgtggggccagcctccgtcgcaggcgcactacgggcaggcgccgccccatcagccgtattatgccgcgccgccggtgccggtgcaggcgccagccgcccccgctgcggcggacgaggtcaggacgctctggatcggggacctgcaatactggatggacgagaactacgtcttcgggtgcttttcgaacactggggaggttcaaaatgtgaagctcatccgcgacaagaattcaggacagcttcagggctatggttttgttgagtttacaagccgtgcagctgcagaacgagttcttcagacatacaatggacaaatgatgccaaatgttgacttgacatttcggctgaattgggccagtgctggtgaaaagcgcgatgatactcctgaatatactatttttgttggggatttggctgcagatgttacagattacttgttacaagagacattcagggttcattatccctctgtcaagggtgcaaaagttgtgactgataaattgacaatgcgcacaaagggttatggatttgtgaaatttggtgatcctacagagcaagctcgtgcaatgactgaaatgaatggaatgccttgttcttccaggcctatgcgtattggtcctgcagcaagtaggaaaaatacaggaggtgttgttcaagagagagtaccaaattctcaaggagctcagtctgagaatgatcctaacaataccactatatttgttggtgggcttgaccccaatgtcactgaagataccctaaaacaagttttttctccttacggtgaagtcgtccatgttaagatccctgttgggaagagatgtggttttgttcagttcgttaccagaccttctgctgaacaagcgctgctaatgctgcaaggggccttgattggtgcacagaatgttcgactttcatggggtagaagcctgtcgaacaagcaggctcagcctcagcaggaatccaatcaatggggtgcggctgctggtgctggtggctactatgggggctatggacaaggttatgaggcttatggcagtgggtatgcacaaccccaggatcctaacatgtatggttatggcgcttatggcggttatcccaattaccaacagcaaccagctgcacagcagcaacagcaacaacagtgatgcctgtttgctcgggtaggtcattgggttgtcgcgacggaattaattaaatattatttcaggacactctcatattgcattcttgtcaattgaggtggttttgaaaggctcctgattttgatggccccatggcacggtttcatctatttattagtatatgacatatatgcgctgtgaacaagtggcgctctactgtgattgctgtgttgagacatgctttcttagtttctttccatgtttctcggatctgttgtgttacctttattactgtgtatttgcatatctactgtgatgctatatatgcactgtgccgcctttcgttcgtt

SEQ ID NO: 46526 - protein, 432 aa, Zea mays
MMQQPPPQQPQPGMALPPPPQTGGGQPPQWGAIPPPMTQQYGAPPPQQPPAMWGQPPSQAHYGQAPPHQPYYAAPPVPVQAPAAPAAADEVRTLWIGDLQYWMDENYVFGCFSNTGEVQNVKLIRDKNSGQLQGYGFVEFTSRAAAERVLQTYNGQMMPNVDLTFRLNWASAGEKRDDTPEYTIFVGDLAADVTDYLLQETFRVHYPSVKGAKVVTDKLTMRTKGYGFVKFGDPTEQARAMTEMNGMPCSSRPMRIGPAASRKNTGGVVQERVPNSQGAQSENDPNNTTIFVGGLDPNVTEDTLKQVFSPYGEVVHVKIPVGKRCGFVQFVTRPSAEQALLMLQGALIGAQNVRLSWGRSLSNKQAQPQQESNQWGAAAGAGGYYGGYGQGYEAYGSGYAQPQDPNMYGYGAYGGYPNYQQQPAAQQQQQQQ

SEQ ID NO: 46527 - DNA, 1799 bp, Zea mays
  CDS (126)..(1436)
gcacgagcctcttcttccctccactcgcctccaaatcttctctctcctttcctcctctcgtctcaccgcatcacctctccctccggcgcgcgcgtccgggtacagcgctagagtcactcaccaccatgcaggcggcggcggcggcgaatggcgcgggcgacgtgcagaagcctcagcagcaaccgctggtggcgggggcgccgcccccaccgccgccggcggccgtggtgccgccccattgggtcgccatgccgttcgcaccgcctcccggggccgcggccatggtgatgcagccgcaccatatggcgcctccgccgccgcagttcgcgccgactcacttcgtgccgttccacgccgtcgcgccgccgcgggcacagtcggtgccagcagcggtcgcactgggttccccggcgccgcatcagcccgggcaggaggagaacaagagcgtctgggtcggcgacctccattactggatggacgagaactacctacacagctgcttcggctacaccggcgaggttgtggcgatcaaagttatccgcaacaagcagactgggcagtccgaaggatacgggttcgtcgagttctacagccacgctgcggctgaaaaagttctcgaagggttttctggccatatcatgccgaacaccgaccagcctttcaggctaaactgggcatcgtttagcatgggagacaggcgctcggattctgcctcggaccattccatattcgtaggcgaccttgcctctgacgtcaatgacgccacgctgctggaggccttctccagcaggtactcctctgtcaaaggtgccaaggttgttatcgatgctaacactggtagatccaagggctatggcttcgtgaggtttggagatgacagcgagaagacacaggccatgactgagatgaacggcgtgtattgctcgtctaggcccatgagaattggcccggcaactccgaggaaatcatcaggtacttctggatcgaatggttcagctgctcgatcagacggaggagatttgacaaacacaacggtatttgtgggtgggctcgacccaaatgttagcgaagaggaccttaggcaaaccttctcccagtacggagagatttcttctgtaaagattccaattgggaaacagtgcggcttcgtgcagtttgctcagaggaagaacgcagaggacgcattgcaaggattaaatggcagcactattggcaaacaaaacgtgcgtctttcatggggccgcaacccagcaaacaagcagttcagaggcgacaacggcaaccagtggaacaacgggggcatgtactacgcggcgcccccgttctacaacggctacggttaccctgcggcggccccgttccctgatccaggcatgtacgctgctccagcctacggtgcctatccgttctatggcaatcagcagcaagtgagctgacctggactaccgcgacacgcacgcctcgctcggagctggagactggaggtgttaggcgcttaggtgtagctctcggtagaagaagaagaggaagaaggtagacgacgacggtttcttaggtgagctagataccgtgactagtctcgtatagtgcgatttgttatacgtgctatggtctagcgccgccgacgactgagagtccgagtgtccgacacacctattgactggccacggcatgtcgaattgaacgacaaaaagaatttctgatgtcctggagctgcatgcatgctaccttgaagcagaacaataagctaatggaatcctttggcctctgctaaaaaaaaaaaaaaaaaaaaaaaaaaa

SEQ ID NO: 46528 - protein, 436 aa, Zea mays
MQAAAAANGAGDVQKPQQQPLVAGAPPPPPPAAVVPPHWVAMPFAPPPGAAAMVMQPHHMAPPPPQFAPTHFVPFHAVAPPRAQSVPAAVALGSPAPHQPGQEENKSVWVGDLHYWMDENYLHSCFGYTGEVVAIKVIRNKQTGQSEGYGFVEFYSHAAAEKVLEGFSGHIMPNTDQPFRLNWASFSMGDRRSDSASDHSIFVGDLASDVNDATLLEAFSSRYSSVKGAKVVIDANTGRSKGYGFVRFGDDSEKTQAMTEMNGVYCSSRPMRIGPATPRKSSGTSGSNGSAARSDGGDLTNTTVFVGGLDPNVSEEDLRQTFSQYGEISSVKIPIGKQCGFVQFAQRKNAEDALQGLNGSTIGKQNVRLSWGRNPANKQFRGDNGNQWNNGGMYYAAPPFYNGYGYPAAAPFPDPGMYAAPAYGAYPFYGNQQQVS

SEQ ID NO: 46529 - DNA, 1806 bp, Zea mays
  CDS (154)..(1440)
gcacgagccgcacggcccacggcccacggcaagtctcccgcgaagtcgcaagtctcccgcacgaaccacgacaaatgtcaaccccgattcctcgccgtcgctcatctcctctctcccatctctgctagggttaggtcgtctcggcaagtcgccatgatgcagcagcccccgcagccgcagccgggtatggcgctacctcctccccctcagaccggtggcgggcagccaccgcagtggggcgcgatcccgccgccgatgacgcagcagtacggcgcaccacctccgcagcagcctccagcgatgtggggccagcctccgtcgcaggcgcactacgggcaggcgccgccccctcagccgtattatgccgcgccgccggtgccggccgcccccgctgcggcggacgaggtcaggacgctctggatcggggacctgcagtactggatggacgataactatgtcttcgggtgcttttcgaacaccggcgaggttcaaaatgtgaagctcatccgcgacaagaattcaggacagcttcagggctatggttttgttgaatttacaagccgtgcagctgcagagcgagttcttcagacatataatggacaaatgatgccaaatgttgacttgacatttcggctgaactgggccagtgctggtgaaaagcgtgatgatactcctgactatactattttcgttggtgatttggctgcagatgttacagattacttgttacaagagacattcagggttcattatccctcggtgaagggtgcaaaagttgtgactgataaattgacaatgcgtaccaagggttatggatttgtgaaatttggcgatcctacagagcaagctcgtgcaatgactgaaatgaatggaatgccttgttcttccaggcctatgcgtattggtcctgcagcaagtagaaaaaatgcaggtggtgttgttcaagagagagtaccaaattctcaaggagctcagtctgagaatgatcctaacaataccactatatttgttggtgggcttgaccccaatgtcactgaagatgtcctaaaacaagcattttctccttatggcgaagtcatccatgttaagatccctgttgggaagagatgtggttttgttcagtttgttaccagaccttctgctgagcaggcgctgctaatgttgcaaggggccttgattggtgcacagaatgttcggctttcgtggggtagaagcctgtcgaacaagcagactcagcctcagcaggaatccatgcaatggggtgcgggtgcgcctgctggtgttggtgattactatggtggctatggacaaggttatgaggcttatggcagtgggtatgcacaaccccaggaccctaacatgtatggttatggcgcttatgttggttatcccaattaccaacagcaaccagctgcacagcagccacagcaacaacagtgaggcctctttgctcgggtaggtcattgggttgtctgagatgggatcaattagtattatttctaggcattcatatattgatttcttgaaaatagaggtggtttcgaaaatctcctgattttgatggccccatggcatgttttcttcgagttatatcatatatatatgcactatgttatgtctatgaacaagtggtgctcaactgtgattgctatgttgaggcatgcttcgtagtttccttccagacttgtcttatatattgttctctcttttactctgtattgttatctctattagtgtgtattgcatatctactgcgatgctatatatgcgctgtgccgcctttcgttaaaaaaaaaaaaaaaaaaa

SEQ ID NO: 46530 - protein, 428 aa, Zea mays
MMQQPPQPQPGMALPPPPQTGGGQPPQWGAIPPPMTQQYGAPPPQQPPAMWGQPPSQAHYGQAPPPQPYYAAPPVPAAPAAADEVRTLWIGDLQYWMDDNYVFGCFSNTGEVQNVKLIRDKNSGQLQGYGFVEFTSRAAAERVLQTYNGQMMPNVDLTFRLNWASAGEKRDDTPDYTIFVGDLAADVTDYLLQETFRVHYPSVKGAKVVTDKLTMRTKGYGFVKFGDPTEQARAMTEMNGMPCSSRPMRIGPAASRKNAGGVVQERVPNSQGAQSENDPNNTTIFVGGLDPNVTEDVLKQAFSPYGEVIHVKIPVGKRCGFVQFVTRPSAEQALLMLQGALIGAQNVRLSWGRSLSNKQTQPQQESMQWGAGAPAGVGDYYGGYGQGYEAYGSGYAQPQDPNMYGYGAYVGYPNYQQQPAAQQPQQQQ

SEQ ID NO: 46531 - DNA, 1722 bp, Glycine max
  CDS (141)..(1436)
tttctctcttcgcctggtcttggcatctccgcagcaccaccacccaccaccctgcttagaccaggtcctctctctctctagagagaaagagaaaaaagaaaaaaaaaaaacaactaacattaagcttttaatagtaagacatggctcaacccagttccaacggggatctgaataataaccagcagcagggtcaggttcagcaacaacagcagcagggtcagtgggcggcggcggcgcagccgcatcagtatcagcagcaatggatggctatgcagtacccggccaccgccatggccatgatgcagcaacagatgttgatgtacccgcagcattatatgccctatgctcaccctcattacccgccgccgccgccgcctcctccctcctcccaccaccaccaccaccacaaacaggccgcggcctcctccgacgagatcaggaccgtctggctcggcgacctccaccattggatggacgagaactacctccacaactgctttgctcacaccggcgaggttgtttcggccaaggtcattcggaataagcaaactggtcagtccgagggatatggattcgtggagttctattcgcgagggacggctgagaaagtcttgcagaactataatggcacgatgatgcccaatacagatcaggcattccgtctgaattgggccacattcagtgccggggaaggacgttcctccgatgctacttcggatctctctatatttgttggggacttggccattgatgttaccgatgctatgctgcaggatacttttgctggccgatattcgtctattaagggagcaaaagttgtcattgattctaatactggccgctcaaaaggctatggttttgttaggtttggtgatgaaaacgagagaacgagggcaatgaccgaaatgaatggcgtttattgttctagtaggcccattcgaataggtgttgcaactcccaagaaaacttatggcttccaacaacaatattcttctcaagctgtggtattggctgggggacactcagctaatggtgctgtggcccaaggttcccattctgaaggggatataaacaacactactatatttgttggagggcttgattctgataccagtgatgaggatctcagacaaccatttttgcaatttggtgaggttgtctctgtgaaaattccagttggtaaagggtgtggatttgttcaatttgctgacagaaagaatgctgaggaagcaattcagggattgaatgggacagtaattgggaagcagacagtgcgtctttcttggggtcgcagtccaggaaataagcattggagatctgattccaatggaggccattatggtggtcatcagggttatggtggccatggatttgctgtgagacagaatcaggatatagccatgcaacctgctgctgcaattcaaggtgcttcctaacggggcttattagcagaactgtgtgttgaagtaggatggattttattgctctcccctaaactgtagtattatttttaaatttgtagctgggttaaggtatgccaggttcttaagattgtattaaaatgtctgaaattttggattgaacccgaccatataatatatgattcgggtatttttgttttttttttaaaccctcaaaacatattggtagcagacagctaagattatttaaatacttatctttacagtacaatgttactgcttgcaaaaaaaaaaaaaaaaa

SEQ ID NO: 46532 - protein, 431 aa, Glycine max
MAQPSSNGDLNNNQQQGQVQQQQQQGQWAAAAQPHQYQQQWMAMQYPATAMAMMQQQMLMYPQHYMPYAHPHYPPPPPPPPSSHHHHHHKQAAASSDEIRTVWLGDLHHWMDENYLHNCFAHTGEVVSAKVIRNKQTGQSEGYGFVEFYSRGTAEKVLQNYNGTMMPNTDQAFRLNWATFSAGEGRSSDATSDLSIFVGDLAIDVTDAMLQDTFAGRYSSIKGAKVVIDSNTGRSKGYGFVRFGDENERTRAMTEMNGVYCSSRPIRIGVATPKKTYGFQQQYSSQAVVLAGGHSANGAVAQGSHSEGDINNTTIFVGGLDSDTSDEDLRQPFLQFGEVVSVKIPVGKGCGFVQFADRKNAEEAIQGLNGTVIGKQTVRLSWGRSPGNKHWRSDSNGGHYGGHQGYGGHGFAVRQNQDIAMQPAAAIQGAS

SEQ ID NO: 46533 - DNA, 1583 bp, Glycine max
  CDS (38)..(1315)
gcacgaggtcatcagtcatcaccgttgattgattaagatgcagcaatcaaacggctctgattcgtccacgacggagcagaaagcgccgccgccgaggcaatcaccggcggtggcgaggccgcagcaatggctgccgatgcagtaccctgcggcggcgatggtaatgccgcaccacatgttgccgcctcagcattacgcgccgccgccctacgtgcccttccaccaccaccaccaccatcaccagtacgcggcgccgcacgtgccgaaccaacatcagcagcagcagcagcatcaccaccatcagaacggatccggcggcgagaacaaaaccatctggatcggcgatttgcatcactggatggacgaaaactatctccatcgctgtttcgcttccaccggcgagatttcctccatcaaggttattcgcaataagcaaactggcttatcagagggttatggatttgtggagttctattcacatgctacagctgagaaagttttgcaaaattatgctggaattttgatgcccaatactgagcaaccattccgtctgaactgggcaacatttagcacaggagacaagggttcagataatgttcctgacctttctatttttgtaggagatttagctgcagatgttacagatagtttgttgcatgaaacttttgctagtgtatatccttctgttaaagctgcaaaagttgtttttgatgccaatactggccgttcaaagggctatggtttcgtcaggtttggagatgacaatcagagaacccaggccatgactcagatgaatggtgtttactgttctagcaggcctatgcgtattggagctgcaactccaaggaaatcatctggccatcaacaaggtgggcagtcaaatggcacagccaaccaatctgaagcagattctacaaacacaactatatttgttggaggactcgaccctaatgtttcagatgaagatctcaggcagccattctcccagtatggtgagatagtctctgttaagatacctgttggaaagggctgtggttttgtccaattcgcaaacagaaataatgctgaagaggccttgcagaagctaaacgggacatcgattggcaagcaaacagttcgtctttcttggggccgtaatccagcaaataagcagtttagaatggatttcggcaacccctggactggggcatattatggggcccctatgtatgatggctatgggtacgcattgacccctcgtcatgatcccagcatatatgctgctgcttatggggcttaccccctttatggaggccaccaacaacaagtaagctgaacgaagtgcagtacagtgctggagtaccattcacaacaagttagacagtatcgagcttgaatgtgcaaattaagtttctctgttttaacttgcttgatctgttgaattcttaagacaagaatccctcctaattgtggagcggagatgaattttgatagcctgaggtagctctgtaggggattcaattagtcatttgtttaggcctgtaggagtaatgactaatgaggaccttaaacttattataggaaaaaaaaaaaaaaaaaaaaaa

SEQ ID NO: 46534 - protein, 425 aa, Glycine max
MQQSNGSDSSTTEQKAPPPRQSPAVARPQQWLPMQYPAAAMVMPHHMLPPQHYAPPPYVPFHHHHHHHQYAAPHVPNQHQQQQQHHHHQNGSGGENKTIWIGDLHHWMDENYLHRCFASTGEISSIKVIRNKQTGLSEGYGFVEFYSHATAEKVLQNYAGILMPNTEQPFRLNWATFSTGDKGSDNVPDLSIFVGDLAADVTDSLLHETFASVYPSVKAAKVVFDANTGRSKGYGFVRFGDDNQRTQAMTQMNGVYCSSRPMRIGAATPRKSSGHQQGGQSNGTANQSEADSTNTTIFVGGLDPNVSDEDLRQPFSQYGEIVSVKIPVGKGCGFVQFANRNNAEEALQKLNGTSIGKQTVRLSWGRNPANKQFRMDFGNPWTGAYYGAPMYDGYGYALTPRHDPSIYAAAYGAYPLYGGHQQQVS

SEQ ID NO: 46535 - DNA, 1341 bp, Oryza sativa (japonica cultivar-group)
  CDS (1)..(1341)
ttggacggctgggacaaccttaggggcatctctccacgattttatctcatccgtttggccctgctgctgctgtgctgccccttctctagggttttgactcctaaaccgccgcccccgtcctcccgcgccgccatgatgcagccgccgccgccgccgcagtgggcaatggggccgccgcctcctccgcagtacttccaggctggccctccgccgccgccgccacagtacttccagggggcgcatccacccgctgccatgtggggccagcccccgccgccgcaggctgcccctccgccggcgccggctggtggcgcagcaggggacgaggtgaggaccctgtggatcggcgacctccagttctggatggaagagaactacctgtacaactgcttctcccaggccggcgagcttatctcagcaaagataattcggaacaagcaaactgggcaacctgagggttatggtttcattgaatttggcagccatgctatagccgaacaagttctgcaaggctataatggtcaaatgatgcctaatggtaatcaggttttcaaattaaattgggcgacaagtggtgctggcgagaagcgtggagatgatggctcagattatactatatttgttggggatctcgcctcggatgttacagatttaattcttcaagatacattcaaggcccattaccaatcagttaagggtgcaaaagttgtctttgacagaagtactggtcgttcaaaaggctatggatttgttaagtttggagatttggatgaacagacacgtgcaatgactgaaatgaatggacaatattgttctagcaggcctatgcgtattggaccagcatccaacaagaaaaatataggtggccaacaacaaccaagtgctacataccagaatacacaaggaacagattctgatagcgatccaaacaatactactgtatttgttggtggtcttgatccaagtgtgactgatgaggttctgaaacaagccttcagtccatatggagaacttgtctacgtcaaaatacctgtaggaaagcgttgtggatttgttcaatattccaatagggcttcagctgaggaggccataaggatgctaaatggaagccaattaggaggtcagagcataaggctttcatggggtcgtagccctggaaacaagcagcctcagcaagaccagaaccaatggaatgctggctattatggatatcccccccaaggatatgatccatatggttatgttcggccgcctcaagatcctgccatgtacgcttatgcagcatatcctggatacgggaattatcaacaaccagcgccacagcagccccctcaacagtaa

SEQ ID NO: 46536 - protein, 446 aa, Oryza sativa (japonica cultivar-group)
LDGWDNLRGISPRFYLIRLALLLLCCPFSRVLTPKPPPPSSRAAMMQPPPPPQWAMGPPPPPQYFQAGPPPPPPQYFQGAHPPAAMWGQPPPPQAAPPPAPAGGAAGDEVRTLWIGDLQFWMEENYLYNCFSQAGELISAKIIRNKQTGQPEGYGFIEFGSHAIAEQVLQGYNGQMMPNGNQVFKLNWATSGAGEKRGDDGSDYTIFVGDLASDVTDLILQDTFKAHYQSVKGAKVVFDRSTGRSKGYGFVKFGDLDEQTRAMTEMNGQYCSSRPMRIGPASNKKNIGGQQQPSATYQNTQGTDSDSDPNNTTVFVGGLDPSVTDEVLKQAFSPYGELVYVKIPVGKRCGFVQYSNRASAEEAIRMLNGSQLGGQSIRLSWGRSPGNKQPQQDQNQWNAGYYGYPPQGYDPYGYVRPPQDPAMYAYAAYPGYGNYQQPAPQQPPQQ

SEQ ID NO: 46537 - DNA, 1281 bp, Oryza sativa (japonica cultivar-group)
  CDS (1)..(1281)
atgcagatggcggcgaccaccaccaccaccgactcctcccaggcggccgtgccgcctcaccaccctcaccctcacgcccacccgcacccggacgcgcacccgcacccgcaccaccccatggcgcaggcgcggtgggtcgtcctgccttacccgcctccgccgccgcccatggtggccgctccgccgcccccgccgccgcagtacgccaagcacttcgcggcggggccgccccccgccgcggcggccgggcggcgcacgccgaccccgcccgcccccgccggatccggcgggaacgggtgcgaggagaacaagacgatctgggttggcgacctccagtattggatggacgagaactacctccacagctgtttcggacccagcggcgaggtagtgacgataaaagttatccgcaatagacaaactggacaatccgagggatatggttttgtagagttctactctcacggatcggcagagaaggctcttcagaattttactggtcatgtgatgcctaacactgatcgacctttcaagttaaactgggcttcatatagcatgggtgaaaagcgatctgaagttgcttctgactactcaattttcgttggtgatctagctgctgatgttactgatgaaatgttgatggagctttttgctaataagtaccgctctgtgaaaggagctaaagttattattgatgcaaacacaggccgttctaggggctatgggtttgttagatttggagatgacaatgacaaatcccatgcaatgactgaaatgaatggtgcgtattgctctactaggccaattcgtattggacctgcaactcccagaaggtcttcaggtgattctggctcctcaacacctgggcattcagatggcgattctactaacagaacggtatatgttggtgggctcgatccaaatgtcagcgaagatgagctgaggaaggcatttgccaaatatggtgatgttgcctctgtaaaaattcctctagggaagcaatgtggctttgttcaattcgtcagcagaactgatgcggaagaagcactgcaaggattgaatggatcagtcattggaaagcaggcagttcgcctttcatggggccgcagcccatcacataaacagtctagggctgattctggcagccgaagaaacaatatgtactatgggacgccattctacggtggatacggttatgcctcccccgtcccgcaccctaacatgtatgctgctgcatatggagcctaccctgtctatggcagtcagcagctagtgagctag

SEQ ID NO: 46538 - protein, 426 aa, Oryza sativa (japonica cultivar-group)
MQMAATTTTTDSSQAAVPPHHPHPHAHPHPDAHPHPHHPMAQARWVVLPYPPPPPPMVAAPPPPPPQYAKHFAAGPPPAAAAGRRTPTPPAPAGSGGNGCEENKTIWVGDLQYWMDENYLHSCFGPSGEVVTIKVIRNRQTGQSEGYGFVEFYSHGSAEKALQNFTGHVMPNTDRPFKLNWASYSMGEKRSEVASDYSIFVGDLAADVTDEMLMELFANKYRSVKGAKVIIDANTGRSRGYGFVRFGDDNDKSHAMTEMNGAYCSTRPIRIGPATPRRSSGDSGSSTPGHSDGDSTNRTVYVGGLDPNVSEDELRKAFAKYGDVASVKIPLGKQCGFVQFVSRTDAEEALQGLNGSVIGKQAVRLSWGRSPSHKQSRADSGSRRNNMYYGTPFYGGYGYASPVPHPNMYAAAYGAYPVYGSQQLVS

SEQ ID NO: 46539 - DNA, 1467 bp, Oryza sativa (japonica cultivar-group)
  CDS (1)..(1467)
atgatgccgcagccgcagccagggatggccccgccgccgccgcccccgcaggcgggggtcgccgggggcggcggcgcgccgccgcagtggggcgccatccctcccccggtgccgcaccaacagcagcagtacgcgccgccgccgccgcagatgtggggccaggctcccccgccgccgccgcagatgtggggccaggctcccccgccgccgcagcccgcgtacggccagccgccgccggcccaggcggggtactacggggcgccgccgcaggcggccccggccgtccccgcggggcccaacgaggtcaggacgctctggatcggggatctccagtactggatggatgagaactacatctccgcctgctttgcgcccaccggcgagctacaatctgtgaagctaattcgtgacaagcagactggacaacttcagggttatggctttattgaattcacatcccatgctggtgctgaaagagttcttcaaacatacaatggggcaatgatgccaaatgttgagcagacataccggttgaattgggcctctgctggtgaaaaacgtgatgatacccctgattacacaatttttgttggtgatttggctgctgatgttacagactacatattgcaagagacgttcagggtacattacccatctgtgaagggtgcaaaggttgtgacagataaaatgacaatgcgttcaaagggctatggcttcgtcaaatttggtgatccttccgagcaagcccgtgcaatgacagaaatgaatgggatggtttgttcttcaagacctatgcgtatcggcccagctgcaaataagaaagcaactggagttcaagagaaagtaccgagtgctcaaggagttcagtctgacagtgatcctagcaataccactatatttgttggtggccttgatcccagtgtcactgacgatatgttgaaacaagttttcactccctatggagatgtggtccatgttaagatcccagttggaaaaagatgtggttttgttcaatttgctaacagagcttctgcagatgaagctttggtacttctacaaggtaccttgattggaggacagaatgtgaggctttcatggggccgcagcccttcaaatagacaagctcagcctcaacaggattccaaccagtggggtggtgctaatgctggatactacggttatgggcaaggatatgagggttatgggtatgctcaacctcaggaccctaatatgtacgggtatggagcttatgctggttatcccaactaccaacaacccctagctcagcagccgcagcagcaacaggtctttaggaggagaggaaaggagggaggtgggcttgcattgcaggccatactgttcctaacggtgttgagaatggatgccttgagaaatactccctccgtttcacaataccaacactgcagcgtcacgcaagcatgtgaaaagttcgacgctgatgcctaa

SEQ ID NO: 46540 - protein, 488 aa, Oryza sativa (japonica cultivar-group)
MMPQPQPGMAPPPPPPQAGVAGGGGAPPQWGAIPPPVPHQQQQYAPPPPQMWGQAPPPPPQMWGQAPPPPQPAYGQPPPAQAGYYGAPPQAAPAVPAGPNEVRTLWIGDLQYWMDENYISACFAPTGELQSVKLIRDKQTGQLQGYGFIEFTSHAGAERVLQTYNGAMMPNVEQTYRLNWASAGEKRDDTPDYTIFVGDLAADVTDYILQETFRVHYPSVKGAKVVTDKMTMRSKGYGFVKFGDPSEQARAMTEMNGMVCSSRPMRIGPAANKKATGVQEKVPSAQGVQSDSDPSNTTIFVGGLDPSVTDDMLKQVFTPYGDVVHVKIPVGKRCGFVQFANRASADEALVLLQGTLIGGQNVRLSWGRSPSNRQAQPQQDSNQWGGANAGYYGYGQGYEGYGYAQPQDPNMYGYGAYAGYPNYQQPLAQQPQQQQVFRRRGKEGGGLALQAILFLTVLRMDALRNTPSVSQYQHCSVTQACEKFDADA

SEQ ID NO: 46541 - DNA, 1266 bp, Arabidopsis thaliana
  CDS (1)..(1266)
atggcgatgatgcatcctccgcagccgccgcaaggctcctatcaccatcctcagacgctcgaagaagttcgaactctttggattggtgatttgcagtactgggtcgacgaaaattacctcacttcctgcttctcccaaaccggcgagctcgtttctgtcaaggtaatacgtaacaagatcacgggacagccagaggggtatggttttatagagtttatatctcatgcagcagcagagagaactctgcagacgtacaatgggacacagatgcctggaactgagttaacttttcggttaaattgggcttcttttggttcaggacagaaagttgatgctggacctgatcattctatctttgttggagatttagcacctgatgttacagattatcttcttcaagagacattccgtgttcattattcttctgttagaggtgccaaggttgttactgatccaagtactggacgatcaaagggttatggatttgtaaaatttgcagaggaaagtgaaaggaatcgggctatggctgaaatgaatggtttgtattgctcaacaaggcctatgcgtattagcgcagcaacacctaaaaaaaacgtcggtgtgcagcaacaatatgtcaccaaagttacagtcccatctgcagttgctgcaccagtccaagcatacgttgctccacctgaaagtgatgtcacctgtacaacgatttcagttgccaatttggaccaaaatgttacagaggaagagctgaagaaagcattctcccaattaggagaggttatttatgtcaaaatacctgcaacaaagggatatggttatgttcaattcaaaaccaggccttctgcagaagaagctgttcaaagaatgcagggacaagtgattggtcaacaagcagttcgcatctcttggagtaaaaatccaggacaggatggttgggttacacaagcagatccgaatcagtggaatgggtattatggttatgggcaaggctatgatgcatatgcttatggggcaactcaagatccatccgtgtacgcatatggtggatatggctatccccagtatccgcaacagggagagggtacacaagacatttcgaactctgcggcgggtggagtagcaggtgcagagcaagagttgtatgatcctctggccactcctgatgtagacaagttaaatgctgcttacctttcggttcatgcaagtgccatattaggaaggccaatgtggcagcggacctcatcgctcacatcacaattgggcaaatga

SEQ ID NO: 46542 - protein, 421 aa, Arabidopsis thaliana
MAMMHPPQPPQGSYHHPQTLEEVRTLWIGDLQYWVDENYLTSCFSQTGELVSVKVIRNKITGQPEGYGFIEFISHAAAERTLQTYNGTQMPGTELTFRLNWASFGSGQKVDAGPDHSIFVGDLAPDVTDYLLQETFRVHYSSVRGAKVVTDPSTGRSKGYGFVKFAEESERNRAMAEMNGLYCSTRPMRISAATPKKNVGVQQQYVTKVTVPSAVAAPVQAYVAPPESDVTCTTISVANLDQNVTEEELKKAFSQLGEVIYVKIPATKGYGYVQFKTRPSAEEAVQRMQGQVIGQQAVRISWSKNPGQDGWVTQADPNQWNGYYGYGQGYDAYAYGATQDPSVYAYGGYGYPQYPQQGEGTQDISNSAAGGVAGAEQELYDPLATPDVDKLNAAYLSVHASAILGRPMWQRTSSLTSQLGK

SEQ ID NO: 46543 - DNA, 1218 bp, Arabidopsis thaliana
  CDS (1)..(1218)
atgatgcagcagccaccacccggaggtatccttccacatcacgctcctcctccttctgcgcaacaacagtacggttaccaacaaccttacgggattgctggagctgctccaccaccaccacagatgtggaatcctcaagcggcggcgccgccatcagttcagcctacgaccgctgacgagatccggactctttggatcggggacttacagtattggatggatgagaatttcctctacggttgctttgctcataccggagagatggtttctgctaaagtgattcgtaacaagcaaaccggtcaagttgaaggatacggtttcattgaattcgcatctcatgctgctgctgaaagagttctacaaacattcaacaacgctcctatcccgagctttcctgatcagctctttagactgaactgggcatcattgagttcaggagataaacgagacgattcaccggactacacgatatttgtcggtgatctggctgctgatgttacggattatatcttacttgagacgttcagagcctcttatccgtcagtgaagggtgcaaaggttgttattgacagagtcactggacgtacaaaaggatatgggtttgttaggttttctgatgaaagtgaacagatccgtgctatgacggagatgaatggcgttccttgttctactagacctatgagaattggtcccgctgctagcaagaaaggtgtaactggtcaaagagattcataccagagctctgctgcaggggtaacaactgataatgatccaaataacacaactgtttttgttggtggattagatgcatctgtcacggatgatcatctgaagaatgtctttagccaatatggtgagattgtgcatgtgaaaatacccgctggaaagcgctgtggattcgttcagttttccgagaagagctgtgcagaggaagctcttagaatgctgaatggagtgcaattaggcggaacaaccgtcaggctctcatggggccgaagtccttcgaacaaacagtcgggggatccgagccagttttactacggtgggtatggacaaggacaggagcagtatgggtacacgatgcctcaagaccctaatgcatattacggaggctactctggtggaggatacagcggtggttaccagcagacaccacaggcaggacagcaaccaccacaacagccaccacagcagcaacaagtcgggtttagctactaa

SEQ ID NO: 46544 - protein, 405 aa, Arabidopsis thaliana
MMQQPPPGGILPHHAPPPSAQQQYGYQQPYGIAGAAPPPPQMWNPQAAAPPSVQPTTADEIRTLWIGDLQYWMDENFLYGCFAHTGEMVSAKVIRNKQTGQVEGYGFIEFASHAAAERVLQTFNNAPIPSFPDQLFRLNWASLSSGDKRDDSPDYTIFVGDLAADVTDYILLETFRASYPSVKGAKVVIDRVTGRTKGYGFVRFSDESEQIRAMTEMNGVPCSTRPMRIGPAASKKGVTGQRDSYQSSAAGVTTDNDPNNTTVFVGGLDASVTDDHLKNVFSQYGEIVHVKIPAGKRCGFVQFSEKSCAEEALRMLNGVQLGGTTVRLSWGRSPSNKQSGDPSQFYYGGYGQGQEQYGYTMPQDPNAYYGGYSGGGYSGGYQQTPQAGQQPPQQPPQQQQVGFSY

SEQ ID NO: 46545 - DNA, 1299 bp, Arabidopsis thaliana
  CDS (1)..(1299)
atggcagacgtcaagattcaatccgaatccgaatcctcggattctcatccagtggtcgacaatcaaccacctcctccgcctccgccgccgcaacagccggcgaaagaagaggagaatcaaccaaaaacatctccgactccgccgccacactggatgcggtatccaccaacggtgataatccctcatcagatgatgtacgcgccgccgccgttcccaccttatcatcagtatccgaatcaccaccaccttcaccatcaatctcgtggtaataagcatcaaaacgcttttaatggtgagaataaaaccatatgggttggtgatttgcatcactggatggatgaggcttatcttaattcttcttttgcttccggcgacgagagagagattgtttcggtgaaggtgattcgtaataagaacaatggtttatcagaaggatatggatttgtggagtttgagtcccatgatgtagctgataaggttttgcgggagtttaacgggacgactatgccaaatactgaccaaccttttcgtttgaactgggctagttttagcaccggtgagaagcggttagagaacaatggacctgatctctctattttcgtgggggatttgtcaccagatgtttcggataatttgttgcacgagaccttctctgagaagtatccgtcggttaaagctgcgaaagttgtccttgatgctaatactggtaggtcaaaggggtatgggtttgtgaggtttggtgatgagaatgaaaggaccaaagcaatgactgagatgaatggtgttaaatgttctagtagagctatgcgcatcggtcctgctaccccgaggaagactaatggttatcaacaacaaggtggatacatgccgaatggtaccttgacgcgtcctgaaggggacataatgaacacaacaatatttgttggagggcttgactctagtgtcactgatgaagacttaaagcaacctttcaatgaattcggggaaatagtctctgtcaagattcctgttggtaaaggatgcggatttgttcagtttgttaacagaccaaatgcagaggaggctttggagaaactaaatgggactgtaattggaaaacaaacagttcggctttcttggggacgtaatcccgccaataagcagcctagagataagtatggaaaccaatgggttgatccgtactatggaggacagttttacaatgggtatggatacatggtacctcaacctgacccgagaatgtatcccgctgcaccttactatccaatgtacggtggtcatcagcaacaagttagctga

SEQ ID NO: 46546 - protein, 432 aa, Arabidopsis thaliana
MADVKIQSESESSDSHPVVDNQPPPPPPPPQQPAKEEENQPKTSPTPPPHWMRYPPTVIIPHQMMYAPPPFPPYHQYPNHHHLHHQSRGNKHQNAFNGENKTIWVGDLHHWMDEAYLNSSFASGDEREIVSVKVIRNKNNGLSEGYGFVEFESHDVADKVLREFNGTTMPNTDQPFRLNWASFSTGEKRLENNGPDLSIFVGDLSPDVSDNLLHETFSEKYPSVKAAKVVLDANTGRSKGYGFVRFGDENERTKAMTEMNGVKCSSRAMRIGPATPRKTNGYQQQGGYMPNGTLTRPEGDIMNTTIFVGGLDSSVTDEDLKQPFNEFGEIVSVKIPVGKGCGFVQFVNRPNAEEALEKLNGTVIGKQTVRLSWGRNPANKQPRDKYGNQWVDPYYGGQFYNGYGYMVPQPDPRMYPAAPYYPMYGGHQQQVS

SEQ ID NO: 46547 - DNA, 1305 bp, Arabidopsis thaliana
  CDS (1)..(1305)
atggcagacgtcaaggttcaatccgaatccgaatcctcggattctcatcccttggtcgactatcaatcacttccaccttatcctccgccgcatccaccggttgaagtagaggagaatcaaccaaaaacatctccgactccgccgccgccacactggatgcgttatccaccggtgttaatgcctcagatgatgtacgcgccgccgccaccgatgccgttctcaccttatcatcaatatccgaatcaccaccactttcaccatcaatctcgtggtaataagcatcaaaacgcttttaatggtgagaataaaactatttgggttggtgatttgcaaaactggatggatgaggcttatcttaattctgcttttacttccgccgaagagagagagattgtttcgctgaaggtgattcgtaataagcacaatggttcatcggaaggatatggatttgtggagtttgagtcccatgatgtagctgataaggttttgcaggagtttaacggggcgcctatgccaaatactgaccaaccttttcgtttgaactgggctagttttagcaccggtgagaagcggttagagaacaatggacctgatctctctatatttgttggggatttggcgccagatgtttcggatgctttgttgcacgagaccttctctgagaagtatccgtcggttaaagctgccaaagttgtccttgatgctaatactggtagatcaaaggggtatgggtttgtgaggtttggagatgagaatgaaaggaccaaagcaatgactgagatgaatggtgttaaatgctctagtagagctatgcgtatcggtcctgctaccccaaggaaaactaatggttatcaacaacaaggtggatacatgccgagtggtgcctttacgcgttctgaaggggacacaatcaacacaacaatatttgttggagggcttgactctagtgtcactgatgaagacttaaagcaacctttctctgaattcggggaaatagtgtctgtcaagattcctgttggtaaaggatgcggatttgttcagtttgttaacagaccaaatgcagaggaggctttggaaaaactcaatgggactgtaattggcaaacaaacagtccggctttcttggggccgtaatccagccaataagcagcctagagataagtatggaaaccaatgggttgatccgtactatggaggacagttttacaatgggtatggatacatggtacctcaacctgacccgagaatgtatcctgctgcaccttactatccaatgtacggtggtcatcagcaacaagttagctga

SEQ ID NO: 46548 - protein, 434 aa, Arabidopsis thaliana
MADVKVQSESESSDSHPLVDYQSLPPYPPPHPPVEVEENQPKTSPTPPPPHWMRYPPVLMPQMMYAPPPPMPFSPYHQYPNHHHFHHQSRGNKHQNAFNGENKTIWVGDLQNWMDEAYLNSAFTSAEEREIVSLKVIRNKHNGSSEGYGFVEFESHDVADKVLQEFNGAPMPNTDQPFRLNWASFSTGEKRLENNGPDLSIFVGDLAPDVSDALLHETFSEKYPSVKAAKVVLDANTGRSKGYGFVRFGDENERTKAMTEMNGVKCSSRAMRIGPATPRKTNGYQQQGGYMPSGAFTRSEGDTINTTIFVGGLDSSVTDEDLKQPFSEFGEIVSVKIPVGKGCGFVQFVNRPNAEEALEKLNGTVIGKQTVRLSWGRNPANKQPRDKYGNQWVDPYYGGQFYNGYGYMVPQPDPRMYPAAPYYPMYGGHQQQVS

SEQ ID NO: 46549 - DNA, 1338 bp, Arabidopsis thaliana
  CDS (1)..(1338)
atgcagacaccaaacaacaacggttcaacagattcagtgttaccaccaacatcagccggaacaacaccaccaccaccgttgcagcaatcaacaccaccaccgcagcagcaacaacaacaacagtggcaacaacaacaacaatggatggctgcgatgcagcaataccctgcagctgctatggctatgatgcaacaacaacagatgatgatgtatcctcaccctcaatacgctccttacaatcaagctgcttatcaacagcatcctcagtttcaatacgctgcttatcaacagcagcagcagcaacatcaccagagtcagcagcagccacgcggtggatctggtggtgatgatgtcaagactctttgggttggtgatcttcttcattggatggatgagacttatctccatacctgtttctctcacaccaatgaggtttcttctgtgaaagttatacgcaacaagcaaacttgtcaatctgaaggatatgggtttgttgagtttctttcacgttcagcagctgaggaagctcttcagagctttagcggtgttacaatgccgaacgcggaacagcctttccgtttaaactgggcatctttcagtactggtgagaaaagagcatcagagaatggtcctgacctatccatatttgttggagatttggctccagatgtgagtgatgctgtcttgcttgagacttttgctggtagatatccatctgtcaaaggtgctaaagttgtgattgattccaacactgggcgttccaaaggttacgggtttgttaggtttggtgatgagaatgagcgatcaagagctatgacagaaatgaatggtgctttctgttcaagcaggcaaatgcgtgttggtatcgcaaccccgaaaagggctgctgcttacggccaacaaaatggttcacaagctcttacacttgctggtggacatggagggaatggttcaatgtctgatggagaatcaaataactcaacaatatttgttggcggtcttgatgctgatgttactgaagaagacctcatgcaacctttttccgattttggggaggttgtttcagtgaagatcccagtagggaaaggatgtggctttgtccaatttgctaacaggcaaagtgctgaggaagccatcgggaacttgaacgggacagtcattgggaagaacactgtccgcctttcatggggaagaagccccaacaaacagtggagaagtgactctggcaaccaatggaatggaggatattcaagaggtcaaggatacaacaatggatatgccaatcaggactcaaacatgtacgctactgcagcggctgcagtcccgggagcttcttga

SEQ ID NO: 46550 - protein, 445 aa, Arabidopsis thaliana
MQTPNNNGSTDSVLPPTSAGTTPPPPLQQSTPPPQQQQQQQWQQQQQWMAAMQQYPAAAMAMMQQQQMMMYPHPQYAPYNQAAYQQHPQFQYAAYQQQQQQHHQSQQQPRGGSGGDDVKTLWVGDLLHWMDETYLHTCFSHTNEVSSVKVIRNKQTCQSEGYGFVEFLSRSAAEEALQSFSGVTMPNAEQPFRLNWASFSTGEKRASENGPDLSIFVGDLAPDVSDAVLLETFAGRYPSVKGAKVVIDSNTGRSKGYGFVRFGDENERSRAMTEMNGAFCSSRQMRVGIATPKRAAAYGQQNGSQALTLAGGHGGNGSMSDGESNNSTIFVGGLDADVTEEDLMQPFSDFGEVVSVKIPVGKGCGFVQFANRQSAEEAIGNLNGTVIGKNTVRLSWGRSPNKQWRSDSGNQWNGGYSRGQGYNNGYANQDSNMYATAAAAVPGAS

SEQ ID NO: 46551 - DNA, 1281 bp, Arabidopsis thaliana
  CDS (1)..(1281)
atgcagaatcaaaggcttattaagcagcaacaacaacaacaacaacagcaacatcaacaagctatgattcaacaagctatgatgcaacaacatccttctctttatcatcctggtgttatggctcctcctcagatggagcctttaccaagtggaaaccttcctcctggttttgatccaactacttgccgtagtgtgtatgctggaaacattcatacgcaggtcacagagattcttcttcaagagatttttgcaagtactggtcctattgaaagctgtaaactcatcagaaaggataagtcatcatatggatttgttcactactttgatcgaagatgtgctagtatggctataatgactcttaacggaaggcatatatttggacagcctatgaaagttaattgggcgtatgcaactggtcaaagggaagatacatcaagtcatttcaacatttttgttggagatcttagtccagaggttactgatgcagcattgtttgatagcttttctgcttttaacagctgctcggacgcaagagtaatgtgggaccagaaaactggacgctcaagaggctttggttttgtttccttccgtaatcagcaggatgctcaaactgccataaatgagatgaatggtaaatgggtaagtagcagacagatcagatgcaactgggcgacaaaaggtgctacttttggcgaggacaaacatagctctgatggaaaaagtgttgtagaacttactaacggatcttcagaggatggtagagagctgtcaaatgaagatgcccctgaaaacaatcctcaatttacaactgtctatgtaggaaatctctctccagaagtaactcagcttgatctacaccgtctattctatacccttggtgctggagtgatcgaagaggtccgtgtccagcgagacaaagggtttggttttgtgagatataacactcatgacgaggctgctcttgctattcagatgggcaacgctcagcctttcctctttagcagacagataaggtgttcctggggaaacaaaccaactccatcaggcacagcctcaaacccacttcccccaccagccccggcatcagtcccttctctgtctgcaatggacctcttagcctacgagaggcaactggctctagccaagatgcatcctcaggctcaacattctctgaggcaagcaggtcttggagtcaatgttgctggaggaactgcagctatgtatgatggtggctatcagaatgtagctgcggcccatcagcagctcatgtactatcagtaa

SEQ ID NO: 46552 - protein, 426 aa, Arabidopsis thaliana
MQNQRLIKQQQQQQQQQHQQAMIQQAMMQQHPSLYHPGVMAPPQMEPLPSGNLPPGFDPTTCRSVYAGNIHTQVTEILLQEIFASTGPIESCKLIRKDKSSYGFVHYFDRRCASMAIMTLNGRHIFGQPMKVNWAYATGQREDTSSHFNIFVGDLSPEVTDAALFDSFSAFNSCSDARVMWDQKTGRSRGFGFVSFRNQQDAQTAINEMNGKWVSSRQIRCNWATKGATFGEDKHSSDGKSVVELTNGSSEDGRELSNEDAPENNPQFTTVYVGNLSPEVTQLDLHRLFYTLGAGVIEEVRVQRDKGFGFVRYNTHDEAALAIQMGNAQPFLFSRQIRCSWGNKPTPSGTASNPLPPPAPASVPSLSAMDLLAYERQLALAKMHPQAQHSLRQAGLGVNVAGGTAAMYDGGYQNVAAAHQQLMYYQ

SEQ ID NO: 46553 - DNA, 1284 bp, Arabidopsis thaliana
  CDS (1)..(1284)
atgcagaatccgagactgaagcaacatcagcagcaacaacaacaacaagctatgatgcagcaacaagctctgatgcagcaacactctctttaccatcctggtgttttggctcctcctcagttagagcctgttccaagtggaaaccttcctcctggttttgatcccagtacttgccgtagcgtgtatgttggaaacatccatacacaggtcacagagcctttgcttcaagagatttttacaagcactggccctgttgaaagcagtaaactcatcagaaaggataagtcatcatatggatttgttcactactttgatcgaagatccgctgctctggctatactgtctctgaacggaaggcatctgtttggacagcctatcaaagtcaattgggcgtatgccactggtcagagggaagatacatcaagtcatttcaacatttttgttggagatctcagtccagaggtcactgatgcaacattatatcaaagcttttctgtcttttccagttgttcggatgcgagagttatgtgggaccaaaaaactgggcgctcgagaggctttgggtttgtttccttccgcaatcaacaggatgctcaaactgccattaatgagatgaatggtaagtggttaagtagcagacaaatcagatgcaactgggccacgaagggcgctacttctggtgatgataagctcagttctgatggaaaaagtgttgtggaacttacaactggctcatcagaggatggtaaagagacattaaatgaggaaacacctgaaaataattctcagtttaccactgtttatgtgggaaaccttgctccagaggtaactcagcttgatctacaccgttacttccatgctcttggcgctggagttattgaggaggtccgtgtccaacgagacaaaggctttggtttcgtgagatataacactcatcccgaagctgctcttgctattcagatgggtaacactcagccttacctctttaacagacagataaagtgctcatggggaaacaagccaactccaccaggtacagcctcaaacccacttcccccacctgccccagctccagttcctggtctatctgcagctgatctcctaaactatgagaggcaattggcacttagcaagatggcaagtgtgaatgcgttaatgcatcaacagggtcaacaccctctaaggcaggctcatggaataaatgccgctggagcaactgcagccatgtatgatggtggctttcagaatgtagccgccgcacagcaactcatgtactatcagtaa

SEQ ID NO: 46554 - protein, 427 aa, Arabidopsis thaliana
MQNPRLKQHQQQQQQQAMMQQQALMQQHSLYHPGVLAPPQLEPVPSGNLPPGFDPSTCRSVYVGNIHTQVTEPLLQEIFTSTGPVESSKLIRKDKSSYGFVHYFDRRSAALAILSLNGRHLFGQPIKVNWAYATGQREDTSSHFNIFVGDLSPEVTDATLYQSFSVFSSCSDARVMWDQKTGRSRGFGFVSFRNQQDAQTAINEMNGKWLSSRQIRCNWATKGATSGDDKLSSDGKSVVELTTGSSEDGKETLNEETPENNSQFTTVYVGNLAPEVTQLDLHRYFHALGAGVIEEVRVQRDKGFGFVRYNTHPEAALAIQMGNTQPYLFNRQIKCSWGNKPTPPGTASNPLPPPAPAPVPGLSAADLLNYERQLALSKMASVNALMHQQGQHPLRQAHGINAAGATAAMYDGGFQNVAAAQQLMYYQ

SEQ ID NO: 46555 - DNA, 1308 bp, Arabidopsis thaliana
  CDS (1)..(1308)
atgcagacaaccaacggctcagattcgacgttggcaacttccggagccacaccgccgaatcaacaaacccctcctccacctcagcagtggcagcagcagcaacagcaacagcaacagtggatggctgccatgcaatatccaccagcggcggcgatgatgatgatgcagcagcaacagatgctgatgtatcctcatcaatatgttccgtataatcaaggtccttatcagcagcatcatcctcagcttcaccaatacgggtcttatcaacagcaccagcaccagcaacacaaggctattgaccgtggatctggagatgatgtcaagactctttgggttggtgatcttcttcattggatggatgagacttatctccattcttgcttttctcacaccggcgaggtttcttctgtgaaagttatacgtaacaagctcacttctcaatcagaagggtatgggtttgttgagtttctttcacgtgctgcagctgaagaagttcttcagaactatagtggttcagtgatgccaaactcggaccaacccttccgtataaactgggcatcttttagtactggtgaaaaaagagcagtggaaaatggtccagacctatctgtttttgtgggagacttgtctccagatgtcactgacgttttattgcatgagaccttttctgatagatatccttctgtcaaaagcgccaaagttgtgattgattccaacaccggccggtccaaaggttatggttttgtgaggttcggtgatgaaaatgagaggtcaagggctttgacagaaatgaatggagcttactgttcgaacaggcaaatgcgtgtaggtattgcaactcccaaaagagcgattgctaatcagcaacaacattcttcacaagctgtgattctggctggtggacatggatcaaatggttccatgggttatggctcgcagtctgatggcgaatcaactaacgcaacaatatttgttggcggcattgaccctgatgttattgatgaagacctcagacaacctttttcccagtttggagaggttgtttcagtgaagatcccagtagggaaaggatgtggatttgtccaatttgctgacaggaagagtgctgaagatgctatcgagagtttgaacgggacagtcatcggcaagaacactgtcagactctcctggggacgaagcccaaacaagcagtggagaggagactcagggcagcagtggaatggaggatactcacgaggacatggttacaacaatggaggaggatatgctaaccaccacgactccaacaactatcatggggagaattga

SEQ ID NO: 46556 - protein, 435 aa, Arabidopsis thaliana
MQTTNGSDSTLATSGATPPNQQTPPPPQQWQQQQQQQQQWMAAMQYPPAAAMMMMQQQQMLMYPHQYVPYNQGPYQQHHPQLHQYGSYQQHQHQQHKAIDRGSGDDVKTLWVGDLLHWMDETYLHSCFSHTGEVSSVKVIRNKLTSQSEGYGFVEFLSRAAAEEVLQNYSGSVMPNSDQPFRINWASFSTGEKRAVENGPDLSVFVGDLSPDVTDVLLHETFSDRYPSVKSAKVVIDSNTGRSKGYGFVRFGDENERSRALTEMNGAYCSNRQMRVGIATPKRAIANQQQHSSQAVILAGGHGSNGSMGYGSQSDGESTNATIFVGGIDPDVIDEDLRQPFSQFGEVVSVKIPVGKGCGFVQFADRKSAEDAIESLNGTVIGKNTVRLSWGRSPNKQWRGDSGQQWNGGYSRGHGYNNGGGYANHHDSNNYHGEN

SEQ ID NO: 46557 - DNA, 1278 bp, Arabidopsis thaliana
  CDS (1)..(1278)
atggcgatgatgcatcctccgcagccgccgcaaggctcctatcaccatcctcagacgctcgaagaagttcgaactctttggattggtgatttgcagtactgggtcgacgaaaattacctcacttcctgcttctcccaaaccggcgagctcgtttctgtcaaggtaatacgtaacaagatcacgggacagccagaggggtatggttttatagagtttatatctcatgcagcagcagagagaactctgcagacgtacaatgggacacagatgcctggaactgagttaacttttcggttaaattgggcttcttttggttcaggacagaaagttgatgctggacctgatcattctatctttgttggagatttagcacctgatgttacagattatcttcttcaagagacattccgtgttcattattcttctgttagaggtgccaaggttgttactgatccaagtactggacgatcaaagggttatggatttgtaaaatttgcagaggaaagtgaaaggaatcgggctatggctgaaatgaatggtttgtattgctcaacaaggcctatgcgtattagcgcagcaacacctaaaaaaaacgtcggtgtgcagcaacaatatgtcaccaaagctgtttacccagttacagtcccatctgcagttgctgcaccagtccaagcatacgttgctccacctgaaagtgatgtcacctgtacaacgatttcagttgccaatttggaccaaaatgttacagaggaagagctgaagaaagcattctcccaattaggagaggttatttatgtcaaaatacctgcaacaaagggatatggttatgttcaattcaaaaccaggccttctgcagaagaagctgttcaaagaatgcagggacaagtgattggtcaacaagcagttcgcatctcttggagtaaaaatccaggacaggatggttgggttacacaagcagatccgaatcagtggaatgggtattatggttatgggcaaggctatgatgcatatgcttatggggcaactcaagatccatccgtgtacgcatatggtggatatggctatccccagtatccgcaacagggagagggtacacaagacatttcgaactctgcggcgggtggagtagcaggtgcagagcaagagttgtatgatcctctggccactcctgatgtagacaagttaaatgctgcttacctttcggttcatgcaagtgccatattaggaaggccaatgtggcagcggacctcatcgctcacatcacaattgggcaaatga

SEQ ID NO: 46558 - protein, 425 aa, Arabidopsis thaliana
MAMMHPPQPPQGSYHHPQTLEEVRTLWIGDLQYWVDENYLTSCFSQTGELVSVKVIRNKITGQPEGYGFIEFISHAAAERTLQTYNGTQMPGTELTFRLNWASFGSGQKVDAGPDHSIFVGDLAPDVTDYLLQETFRVHYSSVRGAKVVTDPSTGRSKGYGFVKFAEESERNRAMAEMNGLYCSTRPMRISAATPKKNVGVQQQYVTKAVYPVTVPSAVAAPVQAYVAPPESDVTCTTISVANLDQNVTEEELKKAFSQLGEVIYVKIPATKGYGYVQFKTRPSAEEAVQRMQGQVIGQQAVRISWSKNPGQDGWVTQADPNQWNGYYGYGQGYDAYAYGATQDPSVYAYGGYGYPQYPQQGEGTQDISNSAAGGVAGAEQELYDPLATPDVDKLNAAYLSVHASAILGRPMWQRTSSLTSQLGK

SEQ ID NO: 46559 - DNA, 1260 bp, Arabidopsis thaliana
  CDS (1)..(1260)
atgcagaggttgaagcagcagcagcagcagcaacaagttatgatgcagcaagctcttatgcagcaacagtctctctaccatcctggtctccttgccccgccacagatagaaccaatcccaagtggaaatctcccccctggttttgatccaagtacttgccgcagtgtgtacgttggaaacatccatattcaggtgacggaacctctgcttcaagaggtttttgctggcactggtcctgtagaaagctgtaaactaattaggaaagaaaagtcttcttatgggtttgtgcactactttgatcgaagatcggctggtcttgcaatcctttctctcaatggaaggcatttgtttgggcaacctatcaaggttaactgggcttatgcgagtggccagagggaggatacatcaagtcacttcaatatatttgttggggatttgagtccggaggttactgatgcaatgctgtttacttgcttctctgtctacccgacttgctcggatgcaagagttatgtgggatcagaaaactgggcgttcaagaggatttggatttgtttccttccgtaaccaacaggatgcccagactgcaatagatgagataactgggaaatggcttggttccaggcagatacgttgcaactgggcgacaaagggagccacttctggtgaggacaaacagagctctgattccaaaagcgtcgtggaacttaccagtggtgtctcggaggatggtaaagatactactaatggtgaagctcctgagaacaatgctcagtacacaactgtttacgtcggtaatcttgctccagaggtgtcccaggttgatcttcaccgccacttccattcccttggtgctggggtcatagaggaagtccgtgttcaaagagacaaaggtttcggatttgtgagatactctactcatgtagaggcagccctcgctattcagatgggaaacacacattcctaccttagtggcaggcaaatgaagtgttcttggggaagcaagccaactccagcaggaacagcttcaaacccgcttcctccaccagctcctgcaccaatcccgggattctcagcgagtgatctcttggcttacgagaggcaactagcgatgagcaagatggcaggaatgaatccgatgatgcatcacccgcagggacaacatgcttttaaacaagctgcaatgggagccactggttcaaaccaggcaatatatgacggtggttaccagaacgcgcagcagctcatgtactaccagtaa

SEQ ID NO: 46560 - protein, 419 aa, Arabidopsis thaliana
MQRLKQQQQQQQVMMQQALMQQQSLYHPGLLAPPQIEPIPSGNLPPGFDPSTCRSVYVGNIHIQVTEPLLQEVFAGTGPVESCKLIRKEKSSYGFVHYFDRRSAGLAILSLNGRHLFGQPIKVNWAYASGQREDTSSHFNIFVGDLSPEVTDAMLFTCFSVYPTCSDARVMWDQKTGRSRGFGFVSFRNQQDAQTAIDEITGKWLGSRQIRCNWATKGATSGEDKQSSDSKSVVELTSGVSEDGKDTTNGEAPENNAQYTTVYVGNLAPEVSQVDLHRHFHSLGAGVIEEVRVQRDKGFGFVRYSTHVEAALAIQMGNTHSYLSGRQMKCSWGSKPTPAGTASNPLPPPAPAPIPGFSASDLLAYERQLAMSKMAGMNPMMHHPQGQHAFKQAAMGATGSNQAIYDGGYQNAQQLMYYQ

SEQ ID NO: 46561 - DNA, 1248 bp, Arabidopsis thaliana
  CDS (1)..(1248)
atgatgcagcagccacctccagcttccaacggtgctgcaacagggccagggcagattccttccgaccaacaagcttacctccagcagcagcagtcgtggatgatgcagcaccagcagcaacaacaaggtcagccgcctgcaggatggaatcagcagtctgcaccgtcttctggtcaaccacagcagcagcagtatggtggtggtggatctcagaatccaggatcagctggtgagatccggtccctgtggatcggtgacttgcagccatggatggatgagaactatctcatgaacgtctttggtcttactggcgaggctacagcagctaaagttattcgcaataaacagaacggatattcagaaggttatggctttattgagtttgtgaaccatgctacagctgagaggaatttacagacttacaatggtgctccgatgccgagcagtgagcaggccttcaggttgaactgggctcagcttggagctggagagagacgccaggctgaagggcctgagcacacagtttttgttggagacttggcacctgatgttaccgaccacatgcttactgaaacgtttaaagctgtgtattcctctgtcaagggagctaaagttgtgaatgataggactactggacggtccaagggttatggatttgtcaggtttgcggatgaaagtgagcagattcgtgccatgactgaaatgaatggtcaatactgctcatcaaggcctatgcgtactggtcctgctgccaacaagaagcctcttacaatgcaaccagcttcatatcagaacactcaaggaaattcaggagaaagtgatccaactaacacaacaatttttgttggagctgtggatcaaagtgtaacagaagatgatttgaagtcagtttttggtcaatttggtgaactagttcatgtgaaaatacccgcaggaaaacgttgcggatttgttcaatacgccaatagggcatgtgctgagcaagcactttctgtgttgaacggaacacaacttgggggacaaagcattcgtctttcatggggtcgcagtccttccaacaaacagactcaacctgatcaagcccagtatggtggtggtggaggatactatgggtatcctcctcaaggatatgaagcatacggatatgcacctcctcctcaggaccctaacgcctactacggtggttatgctgggggcggctatggaaactaccagcagcctggtggataccagcagcaacagcagtga

SEQ ID NO: 46562 - protein, 415 aa, Arabidopsis thaliana
MMQQPPPASNGAATGPGQIPSDQQAYLQQQQSWMMQHQQQQQGQPPAGWNQQSAPSSGQPQQQQYGGGGSQNPGSAGEIRSLWIGDLQPWMDENYLMNVFGLTGEATAAKVIRNKQNGYSEGYGFIEFVNHATAERNLQTYNGAPMPSSEQAFRLNWAQLGAGERRQAEGPEHTVFVGDLAPDVTDHMLTETFKAVYSSVKGAKVVNDRTTGRSKGYGFVRFADESEQIRAMTEMNGQYCSSRPMRTGPAANKKPLTMQPASYQNTQGNSGESDPTNTTIFVGAVDQSVTEDDLKSVFGQFGELVHVKIPAGKRCGFVQYANRACAEQALSVLNGTQLGGQSIRLSWGRSPSNKQTQPDQAQYGGGGGYYGYPPQGYEAYGYAPPPQDPNAYYGGYAGGGYGNYQQPGGYQQQQQ

SEQ ID NO: 46563 - DNA, 1164 bp, Arabidopsis thaliana
  CDS (1)..(1164)
atgcagcaaccaccgtcaaacgccgccggagctggacagataccatcaggacaacagcatttgtggatgatgatgcaacagcagcagcagcagcagcagatgcagttgtctgcggcgccactaggtcaacatcagtacggtattggatctcagaatccaggatccgctagcgatgttaagtcgttgtggatcggagacttgcagcaatggatggacgagaactacatcatgagcgtctttgctcagtctggcgaggctacatcagctaaagtcattcgtaataagctgacgggacaatctgaaggttatggattcattgagttcgtcagccactctgtagcagagcgggttttgcagacttacaatggtgctcccatgccgagcactgaacagacgtttaggctcaactgggctcaggctggggctggagagaaacgattccagactgaagggcctgaccataccattttcgtaggtgacttggcacctgaggtgactgactatatgctctcggacacattcaagaatgtgtatgggtctgtcaaaggggctaaagttgtgcttgacaggaccactggaaggtccaaggggtatgggtttgttaggtttgcggatgaaaatgagcagatgcgtgccatgactgaaatgaatggtcaatactgctcgacaaggcctatgcgtattggtccggctgccaataagaatgctcttccgatgcaaccagctatgtatcaaaacactcaaggagcaaatgctggagataatgatcctaataacacaacaatttttgttggaggtctggatgctaatgttacagacgatgaattaaagtcaatttttggtcaatttggtgaacttcttcatgtgaaaatacctccaggaaaacgttgtggattcgttcaatatgccaacaaggcgtctgcagagcatgcactttcggtgctgaatggaacacaattaggtggacaaagcatccgtctttcgtggggacgtagtccaaacaagcagtctgatcaagcgcaatggaacggtggtggatactatggataccctccacagccacagggcggctatggttatgcagctcaaccaccaactcaagaccctaatgcgtactatggtggttacactggctatggcaactatcagcagcaacgtcagtga

SEQ ID NO: 46564 - protein, 387 aa, Arabidopsis thaliana
MQQPPSNAAGAGQIPSGQQHLWMMMQQQQQQQQMQLSAAPLGQHQYGIGSQNPGSASDVKSLWIGDLQQWMDENYIMSVFAQSGEATSAKVIRNKLTGQSEGYGFIEFVSHSVAERVLQTYNGAPMPSTEQTFRLNWAQAGAGEKRFQTEGPDHTIFVGDLAPEVTDYMLSDTFKNVYGSVKGAKVVLDRTTGRSKGYGFVRFADENEQMRAMTEMNGQYCSTRPMRIGPAANKNALPMQPAMYQNTQGANAGDNDPNNTTIFVGGLDANVTDDELKSIFGQFGELLHVKIPPGKRCGFVQYANKASAEHALSVLNGTQLGGQSIRLSWGRSPNKQSDQAQWNGGGYYGYPPQPQGGYGYAAQPPTQDPNAYYGGYTGYGNYQQQRQ

SEQ ID NO: 46565 - DNA, 1293 bp, Arabidopsis thaliana
  CDS (1)..(1293)
atgcagaatcaaaggcttattaagcagcaacaacaacaacaacaacagcaacatcaacaagctatgattcaacaagctatgatgcaacaacatccttctctttatcatcctggtgttatggctcctcctcagatggagcctttaccaagtggaaaccttcctcctggttttgatccaactacttgccgtagtgtgtatgctggaaacattcatacgcaggtcacagagattcttcttcaagagatttttgcaagtactggtcctattgaaagctgtaaactcatcagaaaggataagtcatcatatggatttgttcactactttgatcgaagatgtgctagtatggctataatgactcttaacggaaggcatatatttggacagcctatgaaagttaattgggcgtatgcaactggtcaaagggaagatacatcaagtcatttcaacatttttgttggagatcttagtccagaggttactgatgcagcattgtttgatagcttttctgcttttaacagctgctcttcttattatagggacgcaagagtaatgtgggaccagaaaactggacgctcaagaggctttggttttgtttccttccgtaatcagcaggatgctcaaactgccataaatgagatgaatggtaaatgggtaagtagcagacagatcagatgcaactgggcgacaaaaggtgctacttttggcgaggacaaacatagctctgatggaaaaagtgttgtagaacttactaacggatcttcagaggatggtagagagctgtcaaatgaagatgcccctgaaaacaatcctcaatttacaactgtctatgtaggaaatctctctccagaagtaactcagcttgatctacaccgtctattctatacccttggtgctggagtgatcgaagaggtccgtgtccagcgagacaaagggtttggttttgtgagatataacactcatgacgaggctgctcttgctattcagatgggcaacgctcagcctttcctctttagcagacagataaggtgttcctggggaaacaaaccaactccatcaggcacagcctcaaacccacttcccccaccagccccggcatcagtcccttctctgtctgcaatggacctcttagcctacgagaggcaactggctctagccaagatgcatcctcaggctcaacattctctgaggcaagcaggtcttggagtcaatgttgctggaggaactgcagctatgtatgatggtggctatcagaatgtagctgcggcccatcagcagctcatgtactatcagtaa

SEQ ID NO: 46566 - protein, 430 aa, Arabidopsis thaliana
MQNQRLIKQQQQQQQQQHQQAMIQQAMMQQHPSLYHPGVMAPPQMEPLPSGNLPPGFDPTTCRSVYAGNIHTQVTEILLQEIFASTGPIESCKLIRKDKSSYGFVHYFDRRCASMAIMTLNGRHIFGQPMKVNWAYATGQREDTSSHFNIFVGDLSPEVTDAALFDSFSAFNSCSSYYRDARVMWDQKTGRSRGFGFVSFRNQQDAQTAINEMNGKWVSSRQIRCNWATKGATFGEDKHSSDGKSVVELTNGSSEDGRELSNEDAPENNPQFTTVYVGNLSPEVTQLDLHRLFYTLGAGVIEEVRVQRDKGFGFVRYNTHDEAALAIQMGNAQPFLFSRQIRCSWGNKPTPSGTASNPLPPPAPASVPSLSAMDLLAYERQLALAKMHPQAQHSLRQAGLGVNVAGGTAAMYDGGYQNVAAAHQQLMYYQ

SEQ ID NO: 46567 - DNA, 1227 bp, Magnaporthe grisea 70-15
  CDS (1)..(1227)
atgtcgacttttcctcctcccactccacagggaaacggccatgccggtgacaacggcaacgccatgaacggctccggtgctcaaatggaaggcaacttccagacccctcccgtcgtcccccagggtaacgacagtgccaagaccctctggatgggtgaattggagccatggatggacgagaactttatcaagcagatctggtcgaccgtctgcggtgagactgttaatgtcaaggtcatccgcgatcgccagtccggcaatgctggctactgctttgtcgagttcccctcctctgaagccgctactaaggctctgggacttaacgggtcaccagtgccgaactcacagcgcgtcttcaagctcaactgggctagcggtggtggtcttgtggaccgtcgtgacgagcgcggcccggagtactccattttcgtcggcgatctcggccctgaggtcaacgagtttgttctcgtttcgttgttccaggctcgattcccaagctgcaagtccgccaagatcatgacggacgctatgaccggccagtctcgtggttatggcttcgttcgctttacggatgagtcggaccagcaacgagctctcgttgagatgcaaggcgtctactgcggcaaccgccccatgcgtatctccactgccaccccgaagacacgttctcatcaacaatatggcaaccagggtcctcatggagccggaccgatgaacatgacgccgcccgctcagaacatgcagtggggcatgaacccctacggctaccagcaaccgcaggcgccacctcccaacacggccttcaacaaccccatgcagccaatgaaccagttcacagacccgaacaacacgacagtcttcgtcggtggccttagtggctatgtcaccgaggatgaactgcgctctttcttccagggctttggtgatatcacctatgtcaagattccccctggaaagggttgcggcttcgttcagttcgttcaccgccacgctgctgagatggccatcaaccagatgcagggataccccatcggtaactctcgcgttcgtttgtcttggggccgttcgcagaacaactccggcgtaggtactccctaccgtcctgctcctcctcctccgcactggggtggcggcatgccgcctcacggcggtccggccggccctggtgctcctttcggcggtcctttcggcggcaacccgcctcctcctcctggcggtcttcagtaa

SEQ ID NO: 46568 - protein, 408 aa, Magnaporthe grisea 70-15
MSTFPPPTPQGNGHAGDNGNAMNGSGAQMEGNFQTPPVVPQGNDSAKTLWMGELEPWMDENFIKQIWSTVCGETVNVKVIRDRQSGNAGYCFVEFPSSEAATKALGLNGSPVPNSQRVFKLNWASGGGLVDRRDERGPEYSIFVGDLGPEVNEFVLVSLFQARFPSCKSAKIMTDAMTGQSRGYGFVRFTDESDQQRALVEMQGVYCGNRPMRISTATPKTRSHQQYGNQGPHGAGPMNMTPPAQNMQWGMNPYGYQQPQAPPPNTAFNNPMQPMNQFTDPNNTTVFVGGLSGYVTEDELRSFFQGFGDITYVKIPPGKGCGFVQFVHRHAAEMAINQMQGYPIGNSRVRLSWGRSQNNSGVGTPYRPAPPPPHWGGGMPPHGGPAGPGAPFGGPFGGNPPPPPGGLQ

SEQ ID NO: 46569 - DNA, 1230 bp, Gibberella zeae PH-1
  CDS (1)..(1230)
atggatatgaaccctggtttctctggtgtgcccgccaacaacggtgccccttctggccctatggcctactccaacggcactcctcccgcccctgacatgggcggcgttgcccctccccctggatctggccccgactctcccaagaccaccctttggatgggtgagctcgaaccttggatggacgagaatttcatcaagggcgtcttcttgtcttcggctcatgaaaatgtaaacgttaaggtcatccgcgacaagaactctggcaacgccggctactgtttcgtcgagttccagagccccgaggctgccaccaaggccctcaacatgaacggttcacaagtccctaatagcagtcgctccttcaagctcaactgggcctctggtggtggtcttgttgaccgacgggatgatcgcggccccgagtacagcattttcgttggcgaccttggtcccgaggtcaacgagtacgtcctggtttctctcttccaggctcgtttcccctcttgcaagtctgccaagatcatgaccgatgctatgagcggtcagagccgcggctacggcttcgttcgcttctccgacgagaacgaccagcagcgcgccctcgttgagatgcagggagtctactgcggtaaccgacccatgcgaatctctactgctacccccaagaaccgtggcaaccacggcttcggtggccaaggacaccagcatggcggtcctatgatgcccggcatgccccagcagcagatgtggaacggtggtgggatgcagggcttcccttatggaggtttcaaccctgctacccagatgaaccagttcactgaccccaacaacaccaccgtctttgtcggtggtctttccggctacgtcaccgaggacgagcttcgatcattcttccagggctttggcgagatcacctatgttaagataccgcctggcaagggctgcggttttgtccagtttgtccaccgccacgccgccgagatggccatcaaccagatgcagggctaccctatcggtaactctcgtgtccgcctcagctggggtcgatctcagaacaactctggcgtcggcactccctaccgccctgccccccctcctcctcactacatgggcatgcccagccacggcggacctggcaactacggccctcagcactttggtggccctgctcccggtccccagggacctcctggacctcccggccccggccccaacggccctcctcagtaa

SEQ ID NO: 46570 - protein, 409 aa, Gibberella zeae PH-1
MDMNPGFSGVPANNGAPSGPMAYSNGTPPAPDMGGVAPPPGSGPDSPKTTLWMGELEPWMDENFIKGVFLSSAHENVNVKVIRDKNSGNAGYCFVEFQSPEAATKALNMNGSQVPNSSRSFKLNWASGGGLVDRRDDRGPEYSIFVGDLGPEVNEYVLVSLFQARFPSCKSAKIMTDAMSGQSRGYGFVRFSDENDQQRALVEMQGVYCGNRPMRISTATPKNRGNHGFGGQGHQHGGPMMPGMPQQQMWNGGGMQGFPYGGFNPATQMNQFTDPNNTTVFVGGLSGYVTEDELRSFFQGFGEITYVKIPPGKGCGFVQFVHRHAAEMAINQMQGYPIGNSRVRLSWGRSQNNSGVGTPYRPAPPPPHYMGMPSHGGPGNYGPQHFGGPAPGPQGPPGPPGPGPNGPPQ

SEQ ID NO: 46571 - DNA, 1182 bp, Aspergillus nidulans FGSC A4
  CDS (1)..(1182)
atgtcctttcagaacttcgattctttccaaaaccagcacccagcggctgacgcagccgctacggctccgggcgctccagctaccgctgacactaccatgactggacaggcagacccttcgaccgccccattccagggtccagccccgggtgagggtgctcctgctgttgctcagcagggaaacgagggcaaaaccactctttggatgggcgagcttgagccttggatcgacgagaacttcgtccgcaatctttggttccagatgggcgagcaggtcaatgtgaagatgatccgtgacaagttctctggtaggagcaatgccggttactgtttcgttgattttgccagccccgccgctgcagccaaggctctgtctctgaacggcaccccaatgccgaacactaaccgtctcttcaaactgaactgggccactggtggtggtcttgctgaccgtagccgtgatgaccgtggccctgagtactccatcttcgtcggtgacctgggccccgaggttaacgaatatgtcctcgtttctctcttccagagccgcttcccgtcctgcaagtccgccaaaatcatgactgacccaatcagcggcatgtcgcgcggttatggattcgttcgtttctctgatgagaacgatcagcagcgtgcgctaagcgagatgcaaggggtttactgcggcaaccgtccaatgcgcatctccactgctaccccgaagaacaagggtcccggcgttgttcctggcggtatgggcatgcccggtcctgctggcatgtatcctcccatgggtgctcccccaatgggcttttatggcgccccccagccaatgaatcagtttaccgaccccaacaacacgactgtcttcgttggcggtctctctggatacgtcaccgaggatgaactccgctcattcttccaaggtttcggcgaaatcacctacgtcaagattcctcctggaaagggatgcggtttcgtccaattcgttcagcgtcatgccgcagagatggccatcaatcagatgcagggctaccccatcggtaattcacgtgtgcgtttgagctggggccgctcgcagaacaactctggccctgctggcagtccttatcggcccgctcctcccccgcctcccatgtacctccctcctcaacatcagtacggcggcttcgcccctatgaagtga

SEQ ID NO: 46572 - protein, 393 aa, Aspergillus nidulans FGSC A4
MSFQNFDSFQNQHPAADAAATAPGAPATADTTMTGQADPSTAPFQGPAPGEGAPAVAQQGNEGKTTLWMGELEPWIDENFVRNLWFQMGEQVNVKMIRDKFSGRSNAGYCFVDFASPAAAAKALSLNGTPMPNTNRLFKLNWATGGGLADRSRDDRGPEYSIFVGDLGPEVNEYVLVSLFQSRFPSCKSAKIMTDPISGMSRGYGFVRFSDENDQQRALSEMQGVYCGNRPMRISTATPKNKGPGVVPGGMGMPGPAGMYPPMGAPPMGFYGAPQPMNQFTDPNNTTVFVGGLSGYVTEDELRSFFQGFGEITYVKIPPGKGCGFVQFVQRHAAEMAINQMQGYPIGNSRVRLSWGRSQNNSGPAGSPYRPAPPPPPMYLPPQHQYGGFAPMK

SEQ ID NO: 46573 - DNA, 1128 bp, Oryza sativa subsp
  CDS (1)..(1128)
atggcggcagcgccgtaccaccagccgaccagcctggaggaggtcaggacgctctggatcggcgacctccagtactgggccgacgagaactacctctacaactgcttcgcccacaccggcgagttacaatctgtaaaaataatacgtaacaagctaacaagccttccagaaggttatggattcatagagttcatttctcatgaagttgccgagaaagttctacagacttacaatggcacacaaatgcctggaactgagcatacattcagattgaactgggcctctttcagctctggtgagaggcgtcctgatgcaggacctgatcattcgatttttgtgggagacttggcgcctgatgtcacagattacttgctacaggagacattccgtgtgagctatccttctgtcaaaggggctaaggttgtcacggatccaaatactgggaggtccaaagggtatggatttgtaaagtttgcagatgaaaatgaaaagaatcgtgcaatgacagaaatgaatggtatgtattgctcaacaagacctatgcggataagtgctgcaatacctaaaaaaaccactggatctcagcttcagtatggagctgctaaagttgctctgttaatatgtactcctgcttatgaggcatttatgacagatcatgttcttccatgtatccagcagcaggttatgcagttccgcaagtccaaccagttctaccagatagtgatccgacaaacaccactggcatcagctgaagaggcagtacaacgtcttcatggcacaacgattggccaacaagtagtcaggctttcatggggcaggagccctgcgagcaagcaggatcaatcagctgtctggagtcaacaagctgatcctaatcaatgggcaagtgcttattatggctatggatatgatgcatatggatatgcccaggacccatcatatgcatacaattcttatgcaggatatacccagttgagggagcgaccgatatggcatcagcagctggaagccatgccccaggaatggaaaaggaggaggttgaatgcgtcgtacatcgctgttcatggtagagccatgcttgggcgacccctgtggttgagaacttcatcattgcctcagtcagcttga

SEQ ID NO: 46574 - protein, 375 aa, Oryza sativa subsp
MAAAPYHQPTSLEEVRTLWIGDLQYWADENYLYNCFAHTGELQSVKIIRNKLTSLPEGYGFIEFISHEVAEKVLQTYNGTQMPGTEHTFRLNWASFSSGERRPDAGPDHSIFVGDLAPDVTDYLLQETFRVSYPSVKGAKVVTDPNTGRSKGYGFVKFADENEKNRAMTEMNGMYCSTRPMRISAAIPKKTTGSQLQYGAAKVALLICTPAYEAFMTDHVLPCIQQQVMQFRKSNQFYQIVIRQTPLASAEEAVQRLHGTTIGQQVVRLSWGRSPASKQDQSAVWSQQADPNQWASAYYGYGYDAYGYAQDPSYAYNSYAGYTQLRERPIWHQQLEAMPQEWKRRRLNASYIAVHGRAMLGRPLWLRTSSLPQSA

SEQ ID NO: 46575 - DNA, 1281 bp, Oryza sativa subsp
  CDS (1)..(1281)
atgcagatggcggcgaccaccaccaccaccgactcctcccaggcggccgtgccgcctcaccaccctcaccctcacgcccacccgcacccgcacgcgcacccgcacccgcaccaccccatggcgcaggcgcggtgggtcgtcctgccttacccgcctccgccgccgcccatggtggccgctccgccgcccccgccgccgcagtacgccaagcacttcgcggcggggccgccccccgccgcggcggccgggcggcgcacgccgaccccgcccgcccccgccggatccggcgggaacgggtgcgaggagaacaagacgatctgggttggcgacctccagtattggatggacgagaactacctccacagctgtttcggacccagcggcgaggtagtgacgataaaagttatccgcaatagacaaactggacaatccgagggatatggttttgtagagttctactctcacggatcggcagagaaggctcttcagaattttactggtcatgtgatgcctaacactgatcgacctttcaagttaaactgggcttcatatagcatgggtgaaaagcgatctgaagttgcttctgactactcaattttcgttggtgatctagctgctgatgttactgatgaaatgttgatggagctttttgctaataagtaccgctctgtgaaaggagctaaagttattattgatgcaaacacaggccgttctaggggctatgggtttgttagatttggagatgacaatgacaaatcccatgcaatgactgaaatgaatggtgcgtattgctctactaggccaattcgtattggacctgcaactcccagaaggtcttcaggtgattctggctcctcaacacctgggcattcagatggcgattctactaacagaacggtatatgttggtgggctcgatccaaatgtcagcgaagatgagctgaggaaggcatttgccaaatatggtgatgttgcctctgtaaaaattcctctagggaagcaatgtggctttgttcaattcgtcagcagaactgatgcggaagaagcactgcaaggattgaatggatcagtcattggaaagcaggcagttcgcctttcatggggccgcagcccatcacataaacagtctagggctgattctggcagccgaagaaacaatatgtactatgggacgccattctacggtggatacggttatgcctcccccgtcccgcaccctaacatgtatgctgctgcatatggagcctaccctgtctatggcagtcagcagctagtgagctag

SEQ ID NO: 46576 - protein, 426 aa, Oryza sativa subsp
MQMAATTTTTDSSQAAVPPHHPHPHAHPHPHAHPHPHHPMAQARWVVLPYPPPPPPMVAAPPPPPPQYAKHFAAGPPPAAAAGRRTPTPPAPAGSGGNGCEENKTIWVGDLQYWMDENYLHSCFGPSGEVVTIKVIRNRQTGQSEGYGFVEFYSHGSAEKALQNFTGHVMPNTDRPFKLNWASYSMGEKRSEVASDYSIFVGDLAADVTDEMLMELFANKYRSVKGAKVIIDANTGRSRGYGFVRFGDDNDKSHAMTEMNGAYCSTRPIRIGPATPRRSSGDSGSSTPGHSDGDSTNRTVYVGGLDPNVSEDELRKAFAKYGDVASVKIPLGKQCGFVQFVSRTDAEEALQGLNGSVIGKQAVRLSWGRSPSHKQSRADSGSRRNNMYYGTPFYGGYGYASPVPHPNMYAAAYGAYPVYGSQQLVS

SEQ ID NO: 46577 - DNA, 1281 bp, Oryza sativa subsp
  CDS (1)..(1281)
atgatgcagcagccgccgtcgcagccgcagcccggcatgggcggcccgcctccgccgccgcagggcgcggcggggcagccgccgcagtggggcgcgatcccgccgccgatgccgccgcaccagtacggcgcgccgccgccccagcagccgccggcgatgtggggccagcccccgccgcaggcgcactacgggcaggtgccccagccccagccgtactacgccgcgccaccgccgcaggcgatgcccgcccccgcggccgcggacgaggtgaagacgctctggatcggcgacctgcagccctggatggacgagagctacatctacaactgcttcgcggccaccggggaggttcaatctgtgaagcttatccgggacaaacaaagtggacagcttcagggttatggctttgttgagtttacaagtcgtgcagctgctgatcgaattcttcagacttataatggacagatgatgccgaatgttgagatggtcttccgattgaattgggccagtgctggcgagaagcgtgatgatacccctgactacaccatttttgttggggatttggctgcagatgttacagactacctactacaagagacattccgggtccattacccttcggttaagggtgcaaaagttgtaactgacaaaatgacaatgcgttcaaagggttatgggtttgtgaaatttggtgatcctacagagcaagctcgtgcgatgactgaaatgaatggaatgctttgttcttccagaccgatgcgtattggtccagcggcaaataagaaaacaacaggggttcaggagagagtaccaaatgctcaaggagctcagtctgagaatgatcctaacaataccaccatattcgttggtggccttgaccccaacgtcactgaagatgtcttgaaacaagttttcgctccttatggagaagttgtccatgttaagattcctgttgggaaaagatgtggttttgttcaatatgttaacaggccttctgctgagcaagcactggcagtgctacaagggaccttgattggtgggcagaatgttagactttcgtggggtcgaagcctttcaaacaaacagcctcagcatgactcgaatcagtggggtgctggtgctggtgctggtggttactatggtggctatggacaaggttatgaggcttatggtgggtatgcacaacctcaggatcctaacatgtatggttatggagcctatgctggttatcccaattaccaacagcaacaagtagcacagcagcagccgccgcagcagtga

SEQ ID NO: 46578 - protein, 426 aa, Oryza sativa subsp
MMQQPPSQPQPGMGGPPPPPQGAAGQPPQWGAIPPPMPPHQYGAPPPQQPPAMWGQPPPQAHYGQVPQPQPYYAAPPPQAMPAPAAADEVKTLWIGDLQPWMDESYIYNCFAATGEVQSVKLIRDKQSGQLQGYGFVEFTSRAAADRILQTYNGQMMPNVEMVFRLNWASAGEKRDDTPDYTIFVGDLAADVTDYLLQETFRVHYPSVKGAKVVTDKMTMRSKGYGFVKFGDPTEQARAMTEMNGMLCSSRPMRIGPAANKKTTGVQERVPNAQGAQSENDPNNTTIFVGGLDPNVTEDVLKQVFAPYGEVVHVKIPVGKRCGFVQYVNRPSAEQALAVLQGTLIGGQNVRLSWGRSLSNKQPQHDSNQWGAGAGAGGYYGGYGQGYEAYGGYAQPQDPNMYGYGAYAGYPNYQQQQVAQQQPPQQ

SEQ ID NO: 46579 - DNA, 1233 bp, Vitis vinifera
  CDS (1)..(1233)
  misc_feature (271)..(271): m is a or c
  misc_feature (782)..(782): m is a or c
  misc_feature (936)..(936): y is t or c
atgatgcagccggctccaggcgttgtcccaccttcgatgcaaccggcacctatggatcagcagcagccgccgcagtaccagcagcctccgccacagcagcagtggatgatgatgccgcctccgcagcagcagcaacagacgcagcccccgccggcttgggcgcaacaggcgccacagcagcagtatgtggccgcgccgcaggcgagcaatcccgaagagattcggtcgctgtggatcggagatttgcagccgtggatggaagagaactatmtgtggggatgtttctctcagaccggagaggtggtttcagtgaaggttatccgaaataagcaaactggccaatgtgagggctatggctttattgaattggctactcgtgccgcagccgaaaggattctgcagacttacaatggcacattgatgccaaattctgaacagaacttccgactgaactgggccactcttggtgctggtgagagacgtgcagatgacactcctgactatactatctttgttggagatttggcttctgatgtgacagattacgtgttacaagaaacattcagaggccactatccatcggttaagggtgcaaaggtggtcactgataggaccactgggcgttctaagggttacgggtttgtgaggtttggagatgaaggtgaacaactgcgtgcgatgaatgaaatgaatggaatgttctgttcaaccagacccatgcgaattggccctgctgctaccaagaaacctgttggtgcttcttttcagaatactcaaggaamtcagggtgagagtgatccaaataacacaacaatatttgttggtggtttggactccaatgttactgatgactatttgagacaagtgtttagccaatatggtgaattggttcatgtgaaaataccagtaggcaagcgctgtgggtttgttcaattygctaatagagcttgtgctgagcaagctttagctgggttaaatggtactcaattaggagcacagagtattcgtctttcatgggggcgtagtccttcgaacaaacaggcccagccagatcaggcccagtggaatggtggatattatggatatgctcaaggatatgaggcatatgggtatgcgccacctcctcaagaccctaacatgtactatggagcctatcctggatatggaaattaccagcagccacagcaagtaagaccatgttatataagcttcagctccttgtttcttaagtag

SEQ ID NO: 46580 - protein, 410 aa, Vitis vinifera
  misc_feature (91)..(91): The Xaa at location 91 stands for Leu, or Met.
  misc_feature (261)..(261): The Xaa at location 261 stands for Asn, or Thr.
MMQPAPGVVPPSMQPAPMDQQQPPQYQQPPPQQQWMMMPPPQQQQQTQPPPAWAQQAPQQQYVAAPQASNPEEIRSLWIGDLQPWMEENYXWGCFSQTGEVVSVKVIRNKQTGQCEGYGFIELATRAAAERILQTYNGTLMPNSEQNFRLNWATLGAGERRADDTPDYTIFVGDLASDVTDYVLQETFRGHYPSVKGAKVVTDRTTGRSKGYGFVRFGDEGEQLRAMNEMNGMFCSTRPMRIGPAATKKPVGASFQNTQGXQGESDPNNTTIFVGGLDSNVTDDYLRQVFSQYGELVHVKIPVGKRCGFVQFANRACAEQALAGLNGTQLGAQSIRLSWGRSPSNKQAQPDQAQWNGGYYGYAQGYEAYGYAPPPQDPNMYYGAYPGYGNYQQPQQVRPCYISFSSLFLK

SEQ ID NO: 46581 - DNA, 1287 bp, Nicotiana tabacum
  CDS (1)..(1287)
atgaacggaggagatatgaatcagcaacagcaacagcagcagcaacaacaacagcagcaacaacaacaacagtggatggcgatgcagcagtatcaacagcaatggatggcgatgcagtatccagcagcagcaatggcgatgcgcaacgatagatgtatggtcagcaatacatgccttcagcaacatcaacaacagcagcagaagatgcagcagtcccctactcagattcagagctcatctgaagataataaaacgatctggattggtgatcttcagcagtggatggatgaaagttatcttcattcttgcttttctcaagctggcgaggttatttctgtgaaaattattcgaaacaagcagactggtcaatcagagcgttatggatttgttgagttcaatactcacgcagcagcggagaaagtgctacagagctacaatggcactatgatgccaaacgcagagcaacccttccgtttaaactgggcaggctttagtactggtgaaaagcgtgcagaaactggttctgatttctcgatttttgtaggagatttggcttctgatgttactgatacaatgttgcgtgacacatttgctagtagatatccatctcttaaaggtgcaaaagtagtagtagatgcaaacacaggccactcaaaaggctatggctttgtaaggtttggtgatgaaagcgagaggtctcgggccatgactgagatgaatggtgtatattgttccagcagggccatgcgtattggtgttgctaccccaaagaaaccatcagcacagcaacaatattcttcacaagctgtgatattatctggtggatatgcatcaaatggtgctgcaacccatggatcccagtctgatggtgatgcatcaaacactacaatttttgttggaggacttgattctgatgtcactgacgaggaacttaggcaatcctttaatcagtttggagaagtggtctctgtgaaaatacctgctggaaagggatgtggttttgtacaattttctgacaggagctctgcgcaggaagcgatacagaaattaagtggagcaataattggcaagcaggcagttcgtctttcctggggacgaacagcaaacaagcagatgagagctgattctggtagtcaatggaatgggggttataatggaaggcaaaattatggaggatatggatatggcgcatcgcaaaatcaggattctggcatgtatgctactggagcagcagcttatggagcatcctctaatggctacgggaatcaccagcagcctgttagctga

SEQ ID NO: 46582 - protein, 428 aa, Nicotiana tabacum
MNGGDMNQQQQQQQQQQQQQQQQQWMAMQQYQQQWMAMQYPAAAMAMRNDRCMVSNTCLQQHQQQQQKMQQSPTQIQSSSEDNKTIWIGDLQQWMDESYLHSCFSQAGEVISVKIIRNKQTGQSERYGFVEFNTHAAAEKVLQSYNGTMMPNAEQPFRLNWAGFSTGEKRAETGSDFSIFVGDLASDVTDTMLRDTFASRYPSLKGAKVVVDANTGHSKGYGFVRFGDESERSRAMTEMNGVYCSSRAMRIGVATPKKPSAQQQYSSQAVILSGGYASNGAATHGSQSDGDASNTTIFVGGLDSDVTDEELRQSFNQFGEVVSVKIPAGKGCGFVQFSDRSSAQEAIQKLSGAIIGKQAVRLSWGRTANKQMRADSGSQWNGGYNGRQNYGGYGYGASQNQDSGMYATGAAAYGASSNGYGNHQQPVS

SEQ ID NO: 46583 - DNA, 1281 bp, Oryza sativa
  CDS (1)..(1281)
atgcagatggcggcgaccaccaccaccaccgactcctcccaggcggccgtgccgcctcaccaccctcaccctcacgcccacccgcacccgcaccttcacccgcacccgcaccaccccatggcgcaggcgcggtgggtcgtcctgccttacccgcctccgccgccgcccatggtggccgctccgccgcccccgccgccgcagtacgccaagcacttcgcggcggggccgccccccgccgcggcggccgggcggcgcacgccgaccccgcccgcccccgccggatccggcgggaacgggtgcgaggagaacaagacgatctgggttggcgacctccagtattggatggacgagaactacctccacagctgtttcggacccagcggcgaggtagtgacgataaaagttatccgcaatagacaaactggacaatccgagggatatggttttgtagagttctactctcacggatcggcagagaaggctcttcagaattttactggtcatgtgatgcctaacactgatcgacctttcaagttaaactgggcttcatatagcatgggtgaaaagcgatctgaagttgcttctgactactcaattttcgttggtgatctagctgctgatgttactgatgaaatgttgatggagctttttgctaataagtaccgctctgtgaaaggagctaaagttattattgatgcaaacacaggccgttctaggggctatgggtttgttagatttggagatgacaatgacaaatcccatgcaatgactgaaatgaatggtgcgtattgctctactaggccaattcgtattggacctgcaactcccagaaggtcttcaggtgattctggctcctcaacacctgggcattcagatggcgattctactaacagaacggtatatgttggtgggctcgatccaaatgtcagcgaagatgagctgaggaaggcatttgccaaatatggtgatgttgcctctgtaaaaattcctctagggaagcaatgtggctttgttcaattcgtcagcagaactgatgcggaagaagcactgcaaggattgaatggatcagtcattggaaagcaggcagttcgcctttcatggggccgcagcccatcacataaacagtctagggctgattctggcagccgaagaaacaatatgtactatgggacgccattctacggtggatacggttatgcctcccccgtcccgcaccctaacatgtatgctgctgcatatggagcctaccctgtctatggcagtcagcagctagtgagctag

SEQ ID NO: 46584 - protein, 426 aa, Oryza sativa
MQMAATTTTTDSSQAAVPPHHPHPHAHPHPHLHPHPHHPMAQARWVVLPYPPPPPPMVAAPPPPPPQYAKHFAAGPPPAAAAGRRTPTPPAPAGSGGNGCEENKTIWVGDLQYWMDENYLHSCFGPSGEVVTIKVIRNRQTGQSEGYGFVEFYSHGSAEKALQNFTGHVMPNTDRPFKLNWASYSMGEKRSEVASDYSIFVGDLAADVTDEMLMELFANKYRSVKGAKVIIDANTGRSRGYGFVRFGDDNDKSHAMTEMNGAYCSTRPIRIGPATPRRSSGDSGSSTPGHSDGDSTNRTVYVGGLDPNVSEDELRKAFAKYGDVASVKIPLGKQCGFVQFVSRTDAEEALQGLNGSVIGKQAVRLSWGRSPSHKQSRADSGSRRNNMYYGTPFYGGYGYASPVPHPNMYAAAYGAYPVYGSQQLVS

SEQ ID NO: 46585 - DNA, 1227 bp, Phaeosphaeria nodorum
  CDS (1)..(1227)
atgagcttctctcagtacgaccagatgcagggcccgcctgctggcgagcagcccaaccagagcggctcgcagcctgaccttggccagcagatggacccctcaggcaacggcttcccaccccagggcaacatgggcccgccaggcagcgctggaggcgacggccagcccagcgccggcaagacaactctctggatgggcgagcttgagccctggatcgacgagaacttcgtgcgcagcatttggtacaacatgggcgagacggtcaacgttaagatgatccgcgacaagttctccggtaacgcgggatattgcttcgttgatttctctacccccgaggctgcagccaaagcgctctctctcaatggccaactcattcccaactccaaccgccccttcaagctgaactgggctagtggtggcggtctagctgacaggagccgcgacgagcgtggtcccgagtacagcatcttcgtgggcgacctgggccccgaggtcaccgaattcgtgctcgtccagctgttccagaacaagtaccgatcgaccaagtcagccaagatcatgtccgatcccatctccggaatgtcgcgcggctatggctttgtccgcttcgcagacgaggcggaccagcagaaggccctcaccgacatgcaaggcgtctactgcggcaacaggcccatgcgcatcagcaccgcaacccccaagaacaagagtggcggtcctggcggccccggtggcatgggcatgcagcaaggcggtcccggcggccctggcatgggcatgtactccatgggcgctcccccgatgggctactacggcgcgccccagcccatgaaccagttcaccgaccctaataatacgaccgttttcgtcggtggcctgtccggctacgtcaccgaggacgagctccgctctttcttccagggcttcggtgagatcacctatgtcaagatcccaccaggcaagggatgcggcttcgtccagttcgtgcagcgtcacgcagcggagatggccatcaaccagatgcaaggctaccccatcggtaactcgcgcgttcgtcttagctggggacgttcccagaacaactccggcccagccggtactccttaccgtcctgcaccccctccgccagtctacgggcctggcatgggcatgccaccgcagcactttggcggcggctacgctcccatgaaggtaggaaatatgcctctctacctcgaccaaagctaa

SEQ ID NO: 46586 - protein, 408 aa, Phaeosphaeria nodorum
MSFSQYDQMQGPPAGEQPNQSGSQPDLGQQMDPSGNGFPPQGNMGPPGSAGGDGQPSAGKTTLWMGELEPWIDENFVRSIWYNMGETVNVKMIRDKFSGNAGYCFVDFSTPEAAAKALSLNGQLIPNSNRPFKLNWASGGGLADRSRDERGPEYSIFVGDLGPEVTEFVLVQLFQNKYRSTKSAKIMSDPISGMSRGYGFVRFADEADQQKALTDMQGVYCGNRPMRISTATPKNKSGGPGGPGGMGMQQGGPGGPGMGMYSMGAPPMGYYGAPQPMNQFTDPNNTTVFVGGLSGYVTEDELRSFFQGFGEITYVKIPPGKGCGFVQFVQRHAAEMAINQMQGYPIGNSRVRLSWGRSQNNSGPAGTPYRPAPPPPVYGPGMGMPPQHFGGGYAPMKVGNMPLYLDQS

SEQ ID NO: 46587 - DNA, 1287 bp, Medicago truncatula
  CDS (1)..(1287)
atggcaacaacgtatcaccaaccagcatccctagaagaagttcgaaccctatggataggcgatttacaatactgggtagacgaaaactatctcacacactgtttctcccacaccggcgaagtcatctccatcaaaatcatccgcaacaaaatcaccggccaacccgaaggttacggtttcatcgaattcgtctcccactccgccgccgaacgcgttcttcaaacctacaacggcactcaaatgcctggcaccgaacaaaccttccgtttaaactgggcttcattcggtatcggtgaacgccgtcctgatgctggtcccgatcattcgatatttgtgggggatttggcgcctgatgttacggattatttactgcaagagacttttaggactcattatgggagtgttcgtggggcgaaggttgtgactgatccgaatactgggaggagtaaggggtatgggtttgttaaatttagtgatgagagtgagaggaatcgtgctatgtcggagatgaatggtgtttattgttctactagaccgatgaggattagtgctgctacccccaagaaaactacggggtatcagcagaatccttatgctgctgttgttgctgctgctcctgttcccaaagcaatatatccagtgccggcatacaccaccgccccagtgaatacagttccaccagaatacgatgtaaacaatactactatttatgttggtaatttggatcttaatgtctcagaagaggagctgaagcaaaactttttgcaatttggagagattgtttctgtcaaagttcatcccggcaaagcatgtggttttgttcaatttggtgctagagcatctgctgaagaagccattcagaagatgcagggaaagatattaggtcaacaagtgatccgagtttcttggggtaggccccaaacagctagacaggacgtacctggtggctggggacaacaggtggatcaaagtcaatggagtgcatactatgggtatggacagccgggttatgaagcttatgcatatggggctgctcaggatccttcaatgtatgcatatgctggatatgctagctatgcacaatacccgcaacaggttgaaggtgcccaagacgtatcagctatgtctgtgcctaccttggaacaaagggaagaattgtatgatcctctggcaatgcccgatgttgataagttaaatgctgcatatctctcagtacacggaaatgccattttagggcggtccctctggcacaaaacccattcctcatccttgcagcagcaagcttag

SEQ ID NO: 46588 - protein, 428 aa, Medicago truncatula
MATTYHQPASLEEVRTLWIGDLQYWVDENYLTHCFSHTGEVISIKIIRNKITGQPEGYGFIEFVSHSAAERVLQTYNGTQMPGTEQTFRLNWASFGIGERRPDAGPDHSIFVGDLAPDVTDYLLQETFRTHYGSVRGAKVVTDPNTGRSKGYGFVKFSDESERNRAMSEMNGVYCSTRPMRISAATPKKTTGYQQNPYAAVVAAAPVPKAIYPVPAYTTAPVNTVPPEYDVNNTTIYVGNLDLNVSEEELKQNFLQFGEIVSVKVHPGKACGFVQFGARASAEEAIQKMQGKILGQQVIRVSWGRPQTARQDVPGGWGQQVDQSQWSAYYGYGQPGYEAYAYGAAQDPSMYAYAGYASYAQYPQQVEGAQDVSAMSVPTLEQREELYDPLAMPDVDKLNAAYLSVHGNAILGRSLWHKTHSSSLQQQA

SEQ ID NO: 46589 - DNA, 1365 bp, Medicago truncatula
  CDS (1)..(1365)
atggctgcacaaaccaacggtggagatctgaatcagaaccaaaaccagaaccagaaccagcaccagcaacagcaacagcaacagtgggctcagcagcagccacatcagtatcaacaacaatggatgtctatgcagtatccagctactgctatggctatgatgcaacagcagatgatgatgtatcctcagcattatatgccgtatgtacatcctcatcattatcagcagcagccacctcatcaacaacaagtgtcgccgccgccatcggcgcatagtcatcatggcggccatcaacagcatcagtatcagcagcatcagcagaagcagctggcacctgaagagatcaggacgatctggcttggtgaccttcatcattggatggatgagacttttcttcataactgctttgctcatactggagaggttgcatcggccaaggtcatacgtaataagcaaactggtcaatcggagggatatggatttgtcgagttctatacgcgagcaatggctgagaaagtcttgcagaactttaatggtactatgatgccaaataccgatcaggcgtttcgtctgaattgggctacattcagcgctgctggtggtggtggtgaaaggcgttcttctgaggctacttctgatctctctgtttttgtcggagacttggccatagatgttactgatgctatgcttcaagagacgtttgctagcaaattctcatctattaagggagcaaaagttgtcattgactctaatactggtcgttcaaaaggctatggttttgttaggtttggtgatgaaagtgaaaggacaagagcaatgactgaaatgaatggtgtttattgttctagcaggcctatgcgagtaggtgttgcaacacccaaaaaaacttatggcaatccacaacaatattcttcacaagctgtagtgttggctggtggtggtggacactccaatggtgccatggcccaaggttcccaatctgaaggggattctaacaacacaacgatatttgttggaggacttgactctgacattagtgatgaggatctcagacaaccatttttgcaatttggtgatgttatctctgtgaaaatcccagtcggtaaaggatgtggttttgttcaacttgctgacagaaagaatgccgaggaagcaattcagggattgaatggaacagtgattggaaagcagacagtgcgcctttcttggggtcgtagtccaggaaataagcatgggaggaatgactctaatggttatggaggtcatggatatggtggccatggatatggaagtaatggatatgctgctagacaaaatcaggatatagctatgcaacccgctgctgcagttcaaggggcttcctaa

SEQ ID NO: 46590 - protein, 454 aa, Medicago truncatula
MAAQTNGGDLNQNQNQNQNQHQQQQQQQWAQQQPHQYQQQWMSMQYPATAMAMMQQQMMMYPQHYMPYVHPHHYQQQPPHQQQVSPPPSAHSHHGGHQQHQYQQHQQKQLAPEEIRTIWLGDLHHWMDETFLHNCFAHTGEVASAKVIRNKQTGQSEGYGFVEFYTRAMAEKVLQNFNGTMMPNTDQAFRLNWATFSAAGGGGERRSSEATSDLSVFVGDLAIDVTDAMLQETFASKFSSIKGAKVVIDSNTGRSKGYGFVRFGDESERTRAMTEMNGVYCSSRPMRVGVATPKKTYGNPQQYSSQAVVLAGGGGHSNGAMAQGSQSEGDSNNTTIFVGGLDSDISDEDLRQPFLQFGDVISVKIPVGKGCGFVQLADRKNAEEAIQGLNGTVIGKQTVRLSWGRSPGNKHGRNDSNGYGGHGYGGHGYGSNGYAARQNQDIAMQPAAAVQGAS

SEQ ID NO: 46591 - DNA, 1467 bp, Aspergillus oryzae
  CDS (1)..(1467)
atgtctttccagaacttcgaatcgttccagaaccagcacccagcggctgatgctgccgctgctgcccctggcgcacctgctaccgcggataccatggccggccaggccgaccctaccactgcccaattccagggccctgcccctggcgagccaacggccgctcccgttcagcccgctcaggaaggaaagaccactctctggatgggtgagcttgagccctggatcgacgagaacttcatccgcaacctctggttccagatgggcgagcaggtcaacgtgaagatgatccgcgacaagttttctgggagcaatgccggctactgcttcgtcgacttctcctctcccgctgctgccgctaaggctctgtcgttgaacggcactcccatgcccaacaccaaccgcctcttcaagctgaactgggccactggtggtggcctggctgaccgcagccgtgatgaccgtggccctgagtattccatcttcgttggtgatttgggccctgaggtcaacgagtatgtactcgtgtccctcttccagagccgcttcccatcctgcaagtctgccaagatcatgaccgaccctatcagcggcatgtctcgtggctacggcttcgttcgtttctccgacgagaacgaccagcagcgtgctctgagcgagatgcagggagtctactgtggcaaccgtcctatgcgtatctccaccgctactcccaagaacaagggtcctggtgtcgttcccggcggtatgggcatgcccggtcccgcgggtatgtaccctcccatgggtgctccccccatgggcttctacggtgctcctcagcccatgaaccagttcactgaccccaacaacacaactgtctttgttggtggactttccggctatgtcaccgaggatgagcttcggtctttcttccagggattcggtgagatcacctacgtcaagatcccccccggaaagggctgtggcttcgttcagttcgttcagcgccatgccgctgagatggccatcaaccagatgcagggttaccccatcggcaactcccgtgtgcgtctgagctggggccgctctcagaacaactccggtcctgccggaagcccttatcgccctgctcctcctccgcctcccatgtacccttctatgggcatgccccctgcccaccagtatggcggctttgcgcctatgaagctatccagactacacactaatattcggccggcaggatccccttatctacacagccctgctctcgtcaatcctacgtcgtattgcctccctcaaggaaacatgggtctgctacctgtgctcacaactttcatcccaagtgcatcgccaaatactccatttcgggtgtctgttcatagctgggaaaggcctcggcctagtcggctgatggagagtctgctgcaacccgatgatgctttactttttgaagttcggattttcatcgatggactttttgtctcgtga

SEQ ID NO: 46592 - protein, 488 aa, Aspergillus oryzae
MSFQNFESFQNQHPAADAAAAAPGAPATADTMAGQADPTTAQFQGPAPGEPTAAPVQPAQEGKTTLWMGELEPWIDENFIRNLWFQMGEQVNVKMIRDKFSGSNAGYCFVDFSSPAAAAKALSLNGTPMPNTNRLFKLNWATGGGLADRSRDDRGPEYSIFVGDLGPEVNEYVLVSLFQSRFPSCKSAKIMTDPISGMSRGYGFVRFSDENDQQRALSEMQGVYCGNRPMRISTATPKNKGPGVVPGGMGMPGPAGMYPPMGAPPMGFYGAPQPMNQFTDPNNTTVFVGGLSGYVTEDELRSFFQGFGEITYVKIPPGKGCGFVQFVQRHAAEMAINQMQGYPIGNSRVRLSWGRSQNNSGPAGSPYRPAPPPPPMYPSMGMPPAHQYGGFAPMKLSRLHTNIRPAGSPYLHSPALVNPTSYCLPQGNMGLLPVLTTFIPSASPNTPFRVSVHSWERPRPSRLMESLLQPDDALLFEVRIFIDGLFVS

SEQ ID NO: 46593 - DNA, 1272 bp, Solanum tuberosum
  CDS (1)..(1272)
atgaatggcggcgacatgaatcaacaacaacaacagcagttgcagcaacaacagcagcaacagtggatggcgatgcagcattatcagcagcaatggatggcgatgcagcagtatccaccagcggcggcaatggtaatgcagcaacagatgatgtatggtcaacagtacatgccctactatcatcaacaacagcagcatatgattcagattcagcagaacggaagcgaagataacaggacgatctggattggcgatcttcagcagtggatggatgaaggctatcttcatacatgcttcgctcaagctggagaggttatttctgtgaaggtcattcgaaataagcagactggtcaatcagagcgttatgggtttattgagttcaatacccatgaagctgcagaaaaagtcctacagagctacaatggcaccatgatgccaaatgcagagcaacctttccgcctaaattggtcagcctttagcactggtgaaaagcgtgcagatgttggtgctgctgctggttctgggtctgatttatcgatttttgtaggagatttggcctctgatgtcactgatacaatgttgcgtgacacattctccagtagatatccatctgtgaaaggtgcaaaagtagtaatagattcgaacacgggtcgttcaaaaggctacggctttgttaggtttgatgacgaaagtgagaggtctcgagccatgactgaaatgaatggcatatattgttctagcagggctatgcgtattggtgttgctactccaaagaaaccatcagccatgcaacaatattcttcacaaggtggacatgcatcaaatggtgctgcaacccagacttcccagactgatagtgatttatcaaacacaacagtttttgtgggtggacttgactctgatgttactgatgaagaactcaggcagtcatttagccagtttggcaatgtagtttctgtgaaaattccagctggaaaaggatgtggttttgtacaattttcagaaaggagtgcagcagaggatgcaatagaaaaattgaatggaacagttattggaactcagacagttcgtctttcctggggtcgaaatccagcaaacaagcagtttagaaccgactctggtagtcaatggaatgggggttattatggaaggcagaattatggtggttatgggtatggcgcatcgcaaagtcaagattccatgtatggtgctggagcagctcatggggcatcctccaatggctatgggaatcatgagcaatcagttagctga

SEQ ID NO: 46594 - protein, 423 aa, Solanum tuberosum
MNGGDMNQQQQQQLQQQQQQQWMAMQHYQQQWMAMQQYPPAAAMVMQQQMMYGQQYMPYYHQQQQHMIQIQQNGSEDNRTIWIGDLQQWMDEGYLHTCFAQAGEVISVKVIRNKQTGQSERYGFIEFNTHEAAEKVLQSYNGTMMPNAEQPFRLNWSAFSTGEKRADVGAAAGSGSDLSIFVGDLASDVTDTMLRDTFSSRYPSVKGAKVVIDSNTGRSKGYGFVRFDDESERSRAMTEMNGIYCSSRAMRIGVATPKKPSAMQQYSSQGGHASNGAATQTSQTDSDLSNTTVFVGGLDSDVTDEELRQSFSQFGNVVSVKIPAGKGCGFVQFSERSAAEDAIEKLNGTVIGTQTVRLSWGRNPANKQFRTDSGSQWNGGYYGRQNYGGYGYGASQSQDSMYGAGAAHGASSNGYGNHEQSVS

SEQ ID NO: 46595 - DNA, 1287 bp, Solanum lycopersicum
  CDS (1)..(1287)
atgaatggggacatgaatcaacaacaacaacaacagcagttgcagcagcaacaacagcaacagtggatggcgatgcagcagtatcagcagcaatggatggcgatgcagcagtatccaccagcggcggcaatggtaatgcagcaacagatgatgtatggtcagcagtacatgccctactatcatcaacaacaccagcagatgattcagattcagcaaaacgcaagcgaagataacaggacgatctggattggcgatcttcaacagtggatggatgaaggttatctccatacatgcttcgctcaagctggagaggttatttctgtgaaggtcattcgaaataagcagactggtcaatcagagcgttatgggtttattgagttcaatacccacgaagctgcagaaaaagtcctacagagctacaatggcactatgatgccaaatgcagagcaacctttccgcctaaattggtcagcctttagctctggtgaaaagcgtgcagatgttggtgctggtgctggctccgggtctgatttatcgatttttgtaggagatttggcctctgatgtcactgatacaatgttgcgtgacacattctccagtagatatccatctgtgaaaggtgcaaaagtagtaatagattcgaacacaggtcgttcaaaaggctatggctttgttaggtttgatgacgaaagtgagaggtcgcgagccatgactgaaatgaatggcatatattgttctagcagggctatgcgtattggtgttgctactccaaagaaaccatcaccaatgcaacaatattttccacaagctgtaatattagcaggtggacatgcatcaaatggtgctgcaacccagacttcccagactgatagtgatttatccaacacaacagtttttgtgggaggacttgactcggaagttactgatgaagagctcaggcagtcatttagccagtttggcaatgttgtttctgtgaaaattccagctggaaaaggatgtggttttgtacaattttcagaaaggagtgcagcagaggatgcaatagaaaaattgaatggaacagttattggagctcagacagttcgtctttcctggggtcgcaatccagcaaacaagcagtttagaaccgactctggtagtcaatggaatgggggttattatggaaggcagaattacggtggttatgggtatggtgcatcgcagagccaagattccatgtatggtgctggagcagctcatggtgcatcctccaatggatatgggaatcatgagcaatcagttagctga

SEQ ID NO: 46596 - protein, 428 aa, Solanum lycopersicum
MNGDMNQQQQQQQLQQQQQQQWMAMQQYQQQWMAMQQYPPAAAMVMQQQMMYGQQYMPYYHQQHQQMIQIQQNASEDNRTIWIGDLQQWMDEGYLHTCFAQAGEVISVKVIRNKQTGQSERYGFIEFNTHEAAEKVLQSYNGTMMPNAEQPFRLNWSAFSSGEKRADVGAGAGSGSDLSIFVGDLASDVTDTMLRDTFSSRYPSVKGAKVVIDSNTGRSKGYGFVRFDDESERSRAMTEMNGIYCSSRAMRIGVATPKKPSPMQQYFPQAVILAGGHASNGAATQTSQTDSDLSNTTVFVGGLDSEVTDEELRQSFSQFGNVVSVKIPAGKGCGFVQFSERSAAEDAIEKLNGTVIGAQTVRLSWGRNPANKQFRTDSGSQWNGGYYGRQNYGGYGYGASQSQDSMYGAGAAHGASSNGYGNHEQSVS

SEQ ID NO: 46597 - DNA, 1191 bp, Oryza sativa subsp
  CDS (1)..(1191)
atgcagatggctgcggcggcggcggcggcgagcaccgaggccccggcggtcgcggcggccgcgcctcaccaccaccacccgcacccccacgcgcacgggatgcacccgcacgcgcaccaccacatccaggcgcagccgaggtgggtggtcatcccgtacccgccgccgcacggcatggtggccgccgcgccgccgcctcccccgccgcagttcgtcaagcacttcgcgccgccggcgtcggtcaccccgccgccgccgcagcaggcgcagcaggcgcaggcggcggcggcggcggccgggggtggatccggcggagggaacggggacgagaaccggacgatttgggtcggggatctccagtactggatggacgagggctacctgcacaactgctttggccccagcggcgagcatgtaatgcctaataccgaccgagcttttaagttaaactgggcatcatatagcatgggagaaaagcgcgccgaacttgcttctgatcactcaatatttgttggtgatctggctgttgatgttacggatgaaatgttgatggatctttttgccaaaaaataccgatctgtgaaaggagctaaagttattattgatgcaaacaccggacgttctaggggctacggctttgttaggtttggagatgataacgacaaaactcatgcgatgactgaaatgaatggtgcatattgctctacccggccaattcgtataggacctgcaacacctagaagatcttcaggtgattctggctcctcgccaccaaggcagtcagatagtgactcaactaacaggacgatatatgttggcgggcttgatcccaacgctactgaagatgaactaaggaaagcatttgctaagtatggtgatcttgcctctgttaaaattcctgttggcaaacagtgtggttttgttcaatttgtcaacagacctgatgcagaagaagcactgcaagggttgaatggatcaacaattggaaagcaggcagtgcgtctttcctggggccgcagtccagcaagcaaacagtctaggggtgattccggccaccggcgcaatggcatgtactacggtacacctttctacggtggatatggctatgcgtcgccacttccacacccaaacatgtatgcagcagcatatggagcctacccttactacggtaaccagcagcttgtgagttga

SEQ ID NO: 46598 - protein, 396 aa, Oryza sativa subsp
MQMAAAAAAASTEAPAVAAAAPHHHHPHPHAHGMHPHAHHHIQAQPRWVVIPYPPPHGMVAAAPPPPPPQFVKHFAPPASVTPPPPQQAQQAQAAAAAAGGGSGGGNGDENRTIWVGDLQYWMDEGYLHNCFGPSGEHVMPNTDRAFKLNWASYSMGEKRAELASDHSIFVGDLAVDVTDEMLMDLFAKKYRSVKGAKVIIDANTGRSRGYGFVRFGDDNDKTHAMTEMNGAYCSTRPIRIGPATPRRSSGDSGSSPPRQSDSDSTNRTIYVGGLDPNATEDELRKAFAKYGDLASVKIPVGKQCGFVQFVNRPDAEEALQGLNGSTIGKQAVRLSWGRSPASKQSRGDSGHRRNGMYYGTPFYGGYGYASPLPHPNMYAAAYGAYPYYGNQQLVS

SEQ ID NO: 46599 - DNA, 1245 bp, Oryza sativa
  CDS (1)..(1245)
atgggcggcccgcctccgccgccacagggcgcggcggggcagccgccgcagtggggcgcgatcccgccgccgatgccgccgcaccagtacggcgcgccgccgccccagcagccgccggcgatgtggggccagcccccgccgcaggcgcactacgggcaggtgcccccgccccagccgtactacgccgcgccaccgccgcaggcgatgcccgcccccgcggccgcggacgaggtgaagacgctctggatcggcgacctgcagccctggatggacgagagctacatctacaactgcttcgcggccaccggggaggttcaatctgtgaagcttatccgggacaaacaaagtggacagcttcagggttatggctttgttgagtttacaagtcgtgcagctgctgatcgaattcttcagacttataatggacagatgatgccgaatgttgagatggtcttccgattgaattgggccagtgctggcgagaagcgtgatgatacccctgactacaccatttttgtcggggatttggctgcagatgttacagactacctactacaagagacattcagggtccattacccttcggttaagggtgcaaaagttgtaactgacaaaatgacaatgcgttcaaagggttatgggtttgtgaaatttggtgatcctacagagcaagctcgtgcaatgactgaaatgaatggaatgctttgctcttccagaccgatgcgtattggtccagcggcaaataagaaaacaacaggggttcaggagagagtaccaaatgctcaaggagctcagtctgagaatgatcctaacaataccaccatattcgttggtggtcttgaccccaacgtcactgaagatgtcttgaaacaagttttcgctccttatggagaagttgtccatgttaagattcctgttgggaaaagatgtggttttgttcaatatgttaacaggccttctgctgagcaagcactggcagtgctacaagggaccttgattggtgggcagaatgttagactttcgtggggtcgaagcctttcaaacaaacagcctcagcacgactcgaatcagtggggtgctggtgctggtgctggtggttactatggtggctatggacaaggttatgaggcttatggtgggtatgcacaacctcaggatcctaacatgtatggttatggagcctatgctggttatcccaattaccaacagcaacaagtagcacagcagcagccgccgcagcagtga

SEQ ID NO: 46600 - protein, 414 aa, Oryza sativa
MGGPPPPPQGAAGQPPQWGAIPPPMPPHQYGAPPPQQPPAMWGQPPPQAHYGQVPPPQPYYAAPPPQAMPAPAAADEVKTLWIGDLQPWMDESYIYNCFAATGEVQSVKLIRDKQSGQLQGYGFVEFTSRAAADRILQTYNGQMMPNVEMVFRLNWASAGEKRDDTPDYTIFVGDLAADVTDYLLQETFRVHYPSVKGAKVVTDKMTMRSKGYGFVKFGDPTEQARAMTEMNGMLCSSRPMRIGPAANKKTTGVQERVPNAQGAQSENDPNNTTIFVGGLDPNVTEDVLKQVFAPYGEVVHVKIPVGKRCGFVQYVNRPSAEQALAVLQGTLIGGQNVRLSWGRSLSNKQPQHDSNQWGAGAGAGGYYGGYGQGYEAYGGYAQPQDPNMYGYGAYAGYPNYQQQQVAQQQPPQQ

SEQ ID NO: 46601 - DNA, 1215 bp, Arabidopsis thaliana
  CDS (1)..(1215)
  misc_feature (412)..(412): m is a or c
atgcagcagccaccacccggaggtatccttccacatcacgctcctcctccttctgcgcaacaacagtacggttaccaacaaccttacgggattgctggagctgctccaccaccaccacagatgtggaatcctcaagcggcggcgccgccatcagttcagcctacgaccgctgacgagatccggactctttggatcggggacttacagtattggatggatgagaatttcctctacggttgctttgctcataccggagagatggtttctgctaaagtgattcgtaacaagcaaaccggtcaagttgaaggatacggtttcattgaattcgcatctcatgctgctgctgaaagagttctacaaacattcaacaacgctcctatcccgagctttcctgatcagctctttagactgmactgggcatcattgagttcaggagataaacgagacgattcaccggactacacgatatttgtcggtgatctggctgctgatgttacggattatatcttacttgagacgttcagagcctcttatccgtcagtgaagggtgcaaaggttgttattaacagagtcactggacgtacaaaaggatatgggtttgttaggttttctgatgaaagtgaacagatccgtgctatgacggagatgaatggcgttccttgttctactagacctatgagaattggtcccgctgctagcaagaaaggtgtaactggtcaaagagattcataccagagctctgctgcaggggtaacaactgataatgatccaaataacacaactgtttttgttggtggattagatgcatctgtcacggatgatcatctgaagaatgtctttagccaatatggtgagattgtgcatgtgaaaatacccgctggaaagcgctgtggattcgttcagttttccgagaagagctgtgcagaggaagctcttagaatgctgaatggagtgcaattaggcggaacaaccgtcaggctctcatggggccgaagtccttcgaacaaacagtcgggggatccgagccagttttactacggtgggtatggacaaggacaggagcagtatgggtacacgatgcctcaagaccctaatgcatattacggaggctactctggtggaggatacagcggtggttaccagcagacaccacaggcaggacagcaaccaccacaacagccaccacagcagcaacaagtcgggtttagctactaa

SEQ ID NO: 46602 - protein, 404 aa, Arabidopsis thaliana
  misc_feature (138)..(138): The Xaa at location 138 stands for Asn, or His.
MQQPPPGGILPHHAPPPSAQQQYGYQQPYGIAGAAPPPPQMWNPQAAAPPSVQPTTADEIRTLWIGDLQYWMDENFLYGCFAHTGEMVSAKVIRNKQTGQVEGYGFIEFASHAAAERVLQTFNNAPIPSFPDQLFRLXWASLSSGDKRDDSPDYTIFVGDLAADVTDYILLETFRASYPSVKGAKVVINRVTGRTKGYGFVRFSDESEQIRAMTEMNGVPCSTRPMRIGPAASKKGVTGQRDSYQSSAAGVTTDNDPNNTTVFVGGLDASVTDDHLKNVFSQYGEIVHVKIPAGKRCGFVQFSEKSCAEEALRMLNGVQLGGTTVRLSWGRSPSNKQSGDPSQFYYGGYGQGQEQYGYTMPQDPNAYYGGYSGGGYSGGYQQTPQAGQQPPQQPPQQQQVGFSY

SEQ ID NO: 46603 - DNA, 1179 bp, Arabidopsis thaliana
  CDS (1)..(1179)
atgcaatatccaccagcggcggcgatgatgatgatgcagcagcaacagatgctgatgtatcctcatcaatatgttccgtataatcaaggtccttatcagcagcatcatcctcagcttcaccaatacgggtcttatcaacagcaccagcaccagcaacacaaggctattgaccgtggatctggagatgatgtcaagactctttgggttggtgatcttcttcattggatggatgagacttatctccattcttgcttttctcacaccggcgaggtttcttctgtgaaagttatacgtaacaagctcacttctcaatcagaagggtatgggtttgttgagtttctttcacgtgctgcagctgaagaagttcttcagaactatagtggttcagtgatgccaaactcggaccaacccttccgtataaactgggcatcttttagtactggtgaaaaaagagcagtggaaaatggtccagacctatctgtttttgtgggagacttgtctccagatgtcactgacgttttattgcatgagaccttttctgatagatatccttctgtcaaaagcgccaaagttgtgattgattccaacaccggccggtccaaaggttatggttttgtgaggttcggtgatgaaaatgagaggtcaagggctttgacagaaatgaatggagcttactgttcgaacaggcaaatgcgtgtaggtattgcaactcccaaaagagcgattgctaatcagcaacaacattcttcacaagctgtgattctggctggtggacatggatcaaatggttccatgggttatggttcgcagtctgatggcgaatcaactaacgcaacaatatttgttggcggcattgaccctgatgttattgatgaagacctcagacaacctttttcccagtttggagaggttgtttcagtgaagatcccagtagggaaaggatgtggatttgtccaatttgctgacaggaagagtgctgaagatgctatcgagagtttgaacgggacagtcatcggcaagaacactgtcagactctcctggggaagaagcccaaacaagcagtggagaggagactcagggcagcagtggaatggaggatactcacgaggacatggttacaacaatggaggaggatatgctaaccaccacgactccaacaactatcatggggagaattga

SEQ ID NO: 46604 - protein, 392 aa, Arabidopsis thaliana
MQYPPAAAMMMMQQQQMLMYPHQYVPYNQGPYQQHHPQLHQYGSYQQHQHQQHKAIDRGSGDDVKTLWVGDLLHWMDETYLHSCFSHTGEVSSVKVIRNKLTSQSEGYGFVEFLSRAAAEEVLQNYSGSVMPNSDQPFRINWASFSTGEKRAVENGPDLSVFVGDLSPDVTDVLLHETFSDRYPSVKSAKVVIDSNTGRSKGYGFVRFGDENERSRALTEMNGAYCSNRQMRVGIATPKRAIANQQQHSSQAVILAGGHGSNGSMGYGSQSDGESTNATIFVGGIDPDVIDEDLRQPFSQFGEVVSVKIPVGKGCGFVQFADRKSAEDAIESLNGTVIGKNTVRLSWGRSPNKQWRGDSGQQWNGGYSRGHGYNNGGGYANHHDSNNYHGEN

SEQ ID NO: 46605 - DNA, 1371 bp, Nicotiana tabacum
  CDS (1)..(1371)
atgcagaagaataacggtactgaatctcaagaaaataaacaacaaccgccgccgcagccgtcacaacctacggcttcacagccacaacagcagggggtgagtgggggaacggttgtaccagtggtggcggcgcaacagcagccttgggtagcgatgcagtacccggcggcggcgatggtaatgcagcatccaatgatgccggccccacattatccgccacactacatgccgtatcatccacaccaccaccaccatctcctccaccatcacccgccgccgcctcactcgccgtcgccacaccagcagcaaggtggaggaggatctaataataataacaacaatgagaaccgaacgatctgggtcggtgaccttcttaattggatggatgaggattatctacgtaactgctttgcttccactaacgaggttgcctctatcaaggtaattcgcaataaacagactggtttctccgaaggatatggttttgtggaattcttcacacacgcagctgcagagaaagttctgcagacatattcttgcatgacaatgcctaatgtggatcaacctttccgtctgaattgggctacattcagcatgggtgacaagcgagctaacaacggttctgatctttccatctttgtaggagatttagctgcagatgttactgataccttactgcatgaaacttttgcgacaaaatatccttctgttaaagctgctaaagttgtctttgatgccaacactggtcgctcaaaaggatatggctttgtaaggtttggagatgataatgagaggtctcaagctatgactgaaatgaatggtgtgtattgttcaagcaggcccatgcgaattggtgcagccacaccacggaaatcatcaggataccaacaacaatattcttctcaaggtggatactccaacggtggaccagctcaaggatcacaacctgatgcagattctacaaatacaacaatttttgttggaggtctagaccccaatgtcagtgatgaagatcttagacagcctttcgtgcagtacggtgaaatagtttctgtaaaaataccagttgaggaaagggtgtgggtttggcaattcgcgaacaggaatgatgcagaggaagccttacagaagctgaacggaacttttattggcaagcaaacagtgcgtcttttttggggaagaaaccccgcaaataaacagtcgagaggtgattttggaaaccagtggactgggccatactatgggggacatttttatgatggttatgggtatgcattcccaccacagcatgacccagggatgtacgctgcagctgctgctgcctatggggcttatccaatatacgggactcaccagcaacaagtaagctga

SEQ ID NO: 46606 - protein, 456 aa, Nicotiana tabacum
MQKNNGTESQENKQQPPPQPSQPTASQPQQQGVSGGTVVPVVAAQQQPWVAMQYPAAAMVMQHPMMPAPHYPPHYMPYHPHHHHHLLHHHPPPPHSPSPHQQQGGGGSNNNNNNENRTIWVGDLLNWMDEDYLRNCFASTNEVASIKVIRNKQTGFSEGYGFVEFFTHAAAEKVLQTYSCMTMPNVDQPFRLNWATFSMGDKRANNGSDLSIFVGDLAADVTDTLLHETFATKYPSVKAAKVVFDANTGRSKGYGFVRFGDDNERSQAMTEMNGVYCSSRPMRIGAATPRKSSGYQQQYSSQGGYSNGGPAQGSQPDADSTNTTIFVGGLDPNVSDEDLRQPFVQYGEIVSVKIPVEERVWVWQFANRNDAEEALQKLNGTFIGKQTVRLFWGRNPANKQSRGDFGNQWTGPYYGGHFYDGYGYAFPPQHDPGMYAAAAAAYGAYPIYGTHQQQVS

SEQ ID NO: 46607 - DNA, 1173 bp, Arabidopsis thaliana
  CDS (1)..(1173)
atgcagcaaccaccgtcaaacgccgccggagctggacagataccatcaggacaacagcatttgtggatgatgatgcaacagcagcagcagcagcagcagatgcagttgtctgcggcgccactaggtcaacatcagtacggtattggatctcagaatccaggatccgctagcgatgttaagtcgttgtggatcggagacttgcagcaatggatggacgagaactacatcatgagcgtctttgctcagtctggcgaggctacatcagctaaagtcattcgtaataagctgacgggacaatctgaaggttatggattcattgagttcgtcagccactctgtagcagagcgggttttgcagacttacaatggtgctcccatgccgagcactgaacagacgtttaggctcaactgggctcaggctggggctggagagaaacgattccagactgaagggcctgaccataccattttcgtaggtgacttggcacctgaggtgactgactatatgctctcggacacattcaagaatgtgtatgggtctgtcaaaggggctaaagttgtgcttgacaggaccactggaaggtccaaggggtatgggtttgttaggtttgcggatgaaaatgagcagatgcgtgccatgactgaaatgaatggtcaatactgctcgacaaggcctatgcgtattggtccggctgccaataagaatgctcttccgatgcaaccagctatgtatcaaaacactcaaggagcaaatgctggagataatgatcctaataacacaacaatttttgttggaggtctggatgctaatgttacagacgatgaattaaagtcaatttttggtcaatttggtgaacttcttcatgtgaaaatacctccaggaaaacgttgtggattcgttcaatatgccaacaaggcgtctgcagagcatgcactttcggtgctgaatggaacacaattaggtggacaaagcatccgtctttcgtggggacgtagtccaaacaagcagtctgatcaagcgcaatggaacggtggtggatactatggataccctccacagccacagggcggctatggttatgcagctcaaccaccaactcaagaccctaatgcgtactatggtggttacactggctatggcaactatcagcagcaacgtcaggtaactcaataa

SEQ ID NO: 46608 - protein, 390 aa, Arabidopsis thaliana
MQQPPSNAAGAGQIPSGQQHLWMMMQQQQQQQQMQLSAAPLGQHQYGIGSQNPGSASDVKSLWIGDLQQWMDENYIMSVFAQSGEATSAKVIRNKLTGQSEGYGFIEFVSHSVAERVLQTYNGAPMPSTEQTFRLNWAQAGAGEKRFQTEGPDHTIFVGDLAPEVTDYMLSDTFKNVYGSVKGAKVVLDRTTGRSKGYGFVRFADENEQMRAMTEMNGQYCSTRPMRIGPAANKNALPMQPAMYQNTQGANAGDNDPNNTTIFVGGLDANVTDDELKSIFGQFGELLHVKIPPGKRCGFVQYANKASAEHALSVLNGTQLGGQSIRLSWGRSPNKQSDQAQWNGGGYYGYPPQPQGGYGYAAQPPTQDPNAYYGGYTGYGNYQQQRQVTQ

SEQ ID NO: 46609 - DNA, 1407 bp, Arabidopsis thaliana
  CDS (1)..(1407)
atgcagacaccaaacaacaacggttcaacagattcagtgttaccaccaacatcagccggaacaacaccaccaccaccgttgcagcaatcaacaccaccaccgcagcagcaacaacaacaacagtggcaacaacaacaacaatggatggctgcgatgcagcaataccctgcagctgctatggctatgatgcaacaacaacagatgatgatgtatcctcaccctcaatacgctccttacaatcaagctgcttatcaacagcatcctcagtttcaatacgctgcttatcaacagcagcagcagcaacatcaccagagtcagcagcagccacgcggtggatctggtggtgatgatgtcaagactctttgggttggtgatcttcttcattggatggatgagacttatctccatacctgtttctctcacaccaatgaggtttcttctgtgaaagttatacgcaacaagcaaacttgtcaatctgaaggatatgggtttgttgagtttctttcacgttcagcagctgaggaagctcttcagagctttagcggtgttacaatgccgaacgcggaacagcctttccgtttaaactgggcatctttcagtactggtgagaaaagagcatcagagaatggtcctgacctatccatatttgttggagatttggctccagatgtgagtgatgctgtcttgcttgagacttttgctggtagatatccatctgtcaaaggtgctaaagttgtgattgattccaacactgggcgttccaaaggttacgggtttgttaggtttggtgatgagaatgagcgatcaagagctatgacagaaatgaatggtgctttctgttcaagcaggcaaatgcgtgttggtatcgcaaccccgaaaagggctgctgcttacggccaacaaaatggttcacaaggtttaataacttgtcttgatgcgttaaacatagcatctgaagtgaattgtaatgttttcattggattagctcttacacttgctggtggacatggagggaatggttcaatgtctgatggagaatcaaataactcaacaatatttgttggcggtcttgatgctgatgttactgaagaagacctcatgcaacctttttccgattttggggaggttgtttcagtgaagatcccagtagggaaaggatgtggctttgtccaatttgctaacaggcaaagtgctgaggaagccatcgggaacttgaacgggacagtcattgggaagaacactgtccgcctttcatggggaagaagccccaacaaacagtggagaagtgactctggcaaccaatggaatggaggatattcaagaggtcaaggatacaacaatggatatgccaatcaggactcaaacatgtacgctactgcagcggctgcagtcccgggagcttcttga

SEQ ID NO: 46610 - protein, 468 aa, Arabidopsis thaliana
MQTPNNNGSTDSVLPPTSAGTTPPPPLQQSTPPPQQQQQQQWQQQQQWMAAMQQYPAAAMAMMQQQQMMMYPHPQYAPYNQAAYQQHPQFQYAAYQQQQQQHHQSQQQPRGGSGGDDVKTLWVGDLLHWMDETYLHTCFSHTNEVSSVKVIRNKQTCQSEGYGFVEFLSRSAAEEALQSFSGVTMPNAEQPFRLNWASFSTGEKRASENGPDLSIFVGDLAPDVSDAVLLETFAGRYPSVKGAKVVIDSNTGRSKGYGFVRFGDENERSRAMTEMNGAFCSSRQMRVGIATPKRAAAYGQQNGSQGLITCLDALNIASEVNCNVFIGLALTLAGGHGGNGSMSDGESNNSTIFVGGLDADVTEEDLMQPFSDFGEVVSVKIPVGKGCGFVQFANRQSAEEAIGNLNGTVIGKNTVRLSWGRSPNKQWRSDSGNQWNGGYSRGQGYNNGYANQDSNMYATAAAAVPGAS

SEQ ID NO: 46611 - DNA, 1287 bp, Nicotiana plumbaginifolia
  CDS (1)..(1287)
atgaacggaggagatatgaatcagcaacagcaacagcagcaacaacaacaccagcaacaacaacaacagtggttggcgatgcagcagtatcagcagcaatggatggcgatgcagtatccagcagcagcaatggcgatgcagcaacagatgatgtatggtcagcaatacatgccttactatcagcaacatcaacagcagcagaagatgcagcagtctcctactcagattcagagctcatctgaagataataaaacgatctggattggtgatcttcagcagtggatggatgaaagttatcttcattcttgcttttctcaagctggcgaggttatttctgtgaaaattattcgaaacaagcagactggtcaatcagagcgttatggatttgttgagttcaatactcacgcagcagcggagaaagtgctacagagctacaatggcactatgatgcctaacacagagcaacccttccgtttaaactgggcaggctttagcactggtgaaaagcgtgcagaaactggttctgatttctcgatttttgtaggagatttggcttctgatgttactgacacaatgttgcgtgacacattcgctagtagatatccatctcttaaaggtgcaaaagtagtagtagatgcgaacacaggccactcaaaaggctatggctttgtaaggtttggtgatgaaagcgagaggtctcgggccatgactgaaatgaatggtgtatattgttccagcagggccatgcgtattggtgttgctaccccaaagaaaccatcagcgcacgaacaatattcttcccaagctgtgatattatctggtggatatgcatcaaatggtgctgcaacacatggatcccagtccgatggtgattcatcaaacactacaatttttgttggcggacttgattctgaagtcactgatgaggaacttaggcaatcctttaatcagtttggagaagtggtctctgtgaaaatacctgctggaaaaggatgtggttttgtacaattttctgacaggagctctgcacaggaagcgatacagaaattaagtggagcaataattggcaagcaggcagttcgtctttcctgggggcgaagtccagcaaacaagcagatgagaactgattctggtagtcaatggaacgggggttataatggaaggcaaaattatggaggatatggatatggcgcatcgcaaaatcaggattctggtatgtatgctaccggagcagcttatggagcatcctctaatcgatacgggaatcaccagcagcctgttagctga

SEQ ID NO: 46612 - protein, 428 aa, Nicotiana plumbaginifolia
MNGGDMNQQQQQQQQQHQQQQQQWLAMQQYQQQWMAMQYPAAAMAMQQQMMYGQQYMPYYQQHQQQQKMQQSPTQIQSSSEDNKTIWIGDLQQWMDESYLHSCFSQAGEVISVKIIRNKQTGQSERYGFVEFNTHAAAEKVLQSYNGTMMPNTEQPFRLNWAGFSTGEKRAETGSDFSIFVGDLASDVTDTMLRDTFASRYPSLKGAKVVVDANTGHSKGYGFVRFGDESERSRAMTEMNGVYCSSRAMRIGVATPKKPSAHEQYSSQAVILSGGYASNGAATHGSQSDGDSSNTTIFVGGLDSEVTDEELRQSFNQFGEVVSVKIPAGKGCGFVQFSDRSSAQEAIQKLSGAIIGKQAVRLSWGRSPANKQMRTDSGSQWNGGYNGRQNYGGYGYGASQNQDSGMYATGAAYGASSNRYGNHQQPVS

SEQ ID NO: 46613 - DNA, 1230 bp, Nicotiana plumbaginifolia
  CDS (1)..(1230)
atgatgccacaaagtggagttgctcaaccacctatggctcctatgtcgatggatcagcatcagtaccagcagcaggctcctccgcccacacaacaacaacaatggatgatgccacctcaacagccacaacagccgcaatttcaacctcaatctcaacctgcttgggctcagcagccatcgcaacaacagtacggtgctatggcgacgacaaatcctaaccctagccctaccggtaatcctaacgaggttcggtctctttggattggggatttgcagtattggatggatgagaattatctctccacttgtttctatcataccggcgagcttgtttctgctaaggtcattaggaacaagcaaactggtcagtctgaaggttatggattccttgagttcaggagtcatgcagctgcagaaactattttacagacgtataatggcacattgatgccaaatgtggaacagaatttccgtatgaattgggcctctcttggtgccggtgagaggcgagatgattcagctgagcatacaatatttgttggtgatttggctgctgatgtgacggattatatactacaagagacattcaaatctgtgtattcgtcggtaagaggtgcaaaagttgtaacagatagaatcactggacgttccaagggctatggatttgtcaagtttgccgatgagagtgaacaattgcgtgctatgaccgaaatgaatggcgtactctgttcaactaggcccatgaggattggccccgctgcgaacaagaaaccggtgggtacaccgcagaaagctacctatcaaaatcctcaagcaactcaaggcgaaagtgaccccaataatacaactatatttgttggtggtttggatccgactgttgcagaagagcatttgcggcaggtattctccccttatggtgaattggttcatgtgaagatagttgctggaaaacgctgtggttttgttcagttcggtactagagcttctgctgagcaggcgttgtcaagcttgaatggcacacaattgggaggacaaagcattcggctttcttgggggcgtagcccctctagcaaacagactgaccagactcaatggggtggtagtggtggcgcgtattatgggtatggccaaggatatgaggcttatggatatgctccacctgctcaggaccctaatatgtattatgggaattatccaggatatgcgaattatcagcaaccacagcagtga

SEQ ID NO: 46614 - protein, 409 aa, Nicotiana plumbaginifolia
MMPQSGVAQPPMAPMSMDQHQYQQQAPPPTQQQQWMMPPQQPQQPQFQPQSQPAWAQQPSQQQYGAMATTNPNPSPTGNPNEVRSLWIGDLQYWMDENYLSTCFYHTGELVSAKVIRNKQTGQSEGYGFLEFRSHAAAETILQTYNGTLMPNVEQNFRMNWASLGAGERRDDSAEHTIFVGDLAADVTDYILQETFKSVYSSVRGAKVVTDRITGRSKGYGFVKFADESEQLRAMTEMNGVLCSTRPMRIGPAANKKPVGTPQKATYQNPQATQGESDPNNTTIFVGGLDPTVAEEHLRQVFSPYGELVHVKIVAGKRCGFVQFGTRASAEQALSSLNGTQLGGQSIRLSWGRSPSSKQTDQTQWGGSGGAYYGYGQGYEAYGYAPPAQDPNMYYGNYPGYANYQQPQQ

SEQ ID NO: 46615 - DNA, 1470 bp, Arabidopsis thaliana
  CDS (1)..(1470)
atgcagacaaccaacggctcagattcgacgttggcaacttccggagccacaccgccgaatcaacaaacccctcctccacctcagcagtggcagcagcagcaacagcaacagcaacagtggatggctgccatgcaatatccaccagcggcggcgatgatgatgatgcagcagcaacagatgctgatgtatcctcatcaatatgttccgtataatcaaggtccttatcagcagcatcatcctcagcttcaccaatacgggtcttatcaacagcaccagcaccagcaacacaaggctattgaccgtggatctggagatgatgtcaagactctttgggttggtgatcttcttcattggatggatgagacttatctccattcttgcttttctcacaccggcgaggtttcttctgtgaaagttatacgtaacaagctcacttctcaatcagaagggtatgggtttgttgagtttctttcacgtgctgcagctgaagaagttcttcagaactatagtggttcagtgatgccaaactcggaccaacccttccgtataaactgggcatcttttagtactggtgaaaaaagagcagtggaaaatggtccagacctatctgtttttgtgggagacttgtctccagatgtcactgacgttttattgcatgagaccttttctgatagatatccttctgtcaaaagcgccaaagttgtgattgattccaacaccggccggtccaaaggttatggttttgtgaggttcggtgatgaaaatgagaggtcaagggctttgacagaaatgaatggagcttactgttcgaacaggcaaatgcgtgtaggtattgcaactcccaaaagagcgattgctaatcagcaacaacattcttcacaagctgtgattctggctggtggacatggatcaaatggttccatgggttatggctcgcagtctgatggcgaatcaactaacgcaacaatatttgttggcggcattgaccctgatgttattgatgaagacctcagacaacctttttcccagtttggagaggttgtttcagtgaagatcccagtagggaaaggatgtggatttgtccaatttgctgacaggaagagtgctgaagatgctatcgagagtttgaacgggacagtcatcggcaagaacactgtcagactctcctggggacgaagcccaaacaagcaggacttaaccaaattggttctgctggcaatagatttctttttagttctcataatgtgttcaacttgtggcagtggagaggagactcagggcagcagtggaatggaggatactcacgaggacatggttacaacaatggaggaggatatgctaaccaccacgactccaacaactatcatggggagaattgaagagactcatcaagtgatcatcttcatcatggtttcacatatcaaagctaaaacctgtagtcgaaagaagaattttgttagatggatttga

SEQ ID NO: 46616 - protein, 489 aa, Arabidopsis thaliana
MQTTNGSDSTLATSGATPPNQQTPPPPQQWQQQQQQQQQWMAAMQYPPAAAMMMMQQQQMLMYPHQYVPYNQGPYQQHHPQLHQYGSYQQHQHQQHKAIDRGSGDDVKTLWVGDLLHWMDETYLHSCFSHTGEVSSVKVIRNKLTSQSEGYGFVEFLSRAAAEEVLQNYSGSVMPNSDQPFRINWASFSTGEKRAVENGPDLSVFVGDLSPDVTDVLLHETFSDRYPSVKSAKVVIDSNTGRSKGYGFVRFGDENERSRALTEMNGAYCSNRQMRVGIATPKRAIANQQQHSSQAVILAGGHGSNGSMGYGSQSDGESTNATIFVGGIDPDVIDEDLRQPFSQFGEVVSVKIPVGKGCGFVQFADRKSAEDAIESLNGTVIGKNTVRLSWGRSPNKQDLTKLVLLAIDFFLVLIMCSTCGSGEETQGSSGMEDTHEDMVTTMEEDMLTTTTPTTIMGRIEETHQVIIFIMVSHIKAKTCSRKKNFVRWI

SEQ ID NO: 46617 - DNA, 1284 bp, Arabidopsis thaliana
  CDS (1)..(1284)
atgatgcagcagccacctccagcttccaacggtgctgcaacagggccagggcagattccttccgaccaacaagcttacctccagcagcagcagtcgtggatgatgcagcaccagcagcaacaacaaggtcagccgcctgcaggatggaatcagcagtctgcaccgtcttctggtcaaccacagcagcagcagtatggtggtggtggatctcagaatccaggatcagctggtgagatccggtccctgtggatcggtgacttgcagccatggatggatgagaactatctcatgaacgtctttggtcttactggcgaggctacagcagctaaagttattcgcaataaacagaacggatattcagaaggttatggctttattgagtttgtgaaccatgctacagctgagaggaatttacagacttacaatggtgctccgatgccgagcagtgagcaggccttcaggttgaactgggctcagcttggagctggagagagacgccaggctgaagggcctgagcacacagtttttgttggagacttggcacctgatgttaccgaccacatgcttactgaaacgtttaaagctgtgtattcctctgtcaagggagctaaagttgtgaatgataggactactggacggtccaagggttatggatttgtcaggtttgcggatgaaagtgagcagattcgtgccatgactgaaatgaatggtcaatactgctcatcaaggcctatgcgtactggtcctgctgccaacaagaagcctcttacaatgcaaccagcttcatatcagaacactcaaggaaattcaggagaaagtgatccaactaacacaacaatttttgttggagctgtggatcaaagtgtaacagaagatgatttgaagtcagtttttggtcaatttggtgaactagttcatgtgaaaatacccgcaggaaaacgttgcggatttgttcaatacgccaatagggcatgtgctgagcaagcactttctgtgttgaacggaacacaacttgggggacaaagcattcgtctttcatggggtcgcagtccttccaacaaacagactcaacctgatcaagcccagtatggtggtggtggaggatactatgggtatcctcctcaaggatatgaagcatacggatatgcacctcctcctcaggaccctaacgcctactacggtggttatgctgggggcggctatggaaactaccagcagcctggtggataccagcagcaacagcaggtaacattctttggtttttatctgaatatcttcgaatga

SEQ ID NO: 46618 - protein, 427 aa, Arabidopsis thaliana
MMQQPPPASNGAATGPGQIPSDQQAYLQQQQSWMMQHQQQQQGQPPAGWNQQSAPSSGQPQQQQYGGGGSQNPGSAGEIRSLWIGDLQPWMDENYLMNVFGLTGEATAAKVIRNKQNGYSEGYGFIEFVNHATAERNLQTYNGAPMPSSEQAFRLNWAQLGAGERRQAEGPEHTVFVGDLAPDVTDHMLTETFKAVYSSVKGAKVVNDRTTGRSKGYGFVRFADESEQIRAMTEMNGQYCSSRPMRTGPAANKKPLTMQPASYQNTQGNSGESDPTNTTIFVGAVDQSVTEDDLKSVFGQFGELVHVKIPAGKRCGFVQYANRACAEQALSVLNGTQLGGQSIRLSWGRSPSNKQTQPDQAQYGGGGGYYGYPPQGYEAYGYAPPPQDPNAYYGGYAGGGYGNYQQPGGYQQQQQVTFFGFYLNIFE

SEQ ID NO: 46619 - DNA, 1251 bp, Oryza sativa
  CDS (1)..(1251)
atggcggcagcgccgtaccaccagccgaccagcctggaggaggtcaggacgctctggatcggcgacctccagtactgggccgacgagaactacctctacaactgcttcgcccacaccggcgagttacaatctgtaaaaataatacgtaacaagctaacaagccttccagaaggttatggattcatagagttcatttctcatgaagttgccgagaaagttctacagacttacaatggcacacaaatgcctggaactgagcatacattcagattgaactgggcctctttcagctctggtgagaggcgtcctgatgcaggacctgatcattcgatttttgtgggagacttggcgcctgatgtcacagattacttgctacaggagacattccgtgtgagctatccttctgtcaaaggggctaaggttgtcacggatccaaatactgggaggtccaaagggtatggatttgtaaagtttgcagatgaaaatgaaaagaatcgtgcaatgacagaaatgaatggtatgtattgctcaacaagacctatgcggataagtgctgcaatacctaaaaaaaccactggatctcagcttcagtatggagctgctaaagccatgtatccagcagcaggttatgcagttccgcaagtccaaccagttctaccagatagtgatccgacaaacaccactatatttataggtaacttggatcagaatgtgacagaagatgaactcaggcagatctgtgtccaatttggggagcttatatatgtaaaaattccagccaataaagcttgtggatttgtacaatatgcatctcgggcatcagctgaagaggcagtacaacgtcttcatggcacaacgatcggccaacaagtagtcaggctttcatggggcaggagtcctgcgagcaagcaggatcaatcagctgtctggagtcaacaagctgatcctaatcaatgggcaagtgcttattatggctatggatatgatgcatatggatatgcccaggacccatcatatgcatacaattcttatgcaggatatacccagtacccccagcaggttgagggagcgaccgatatggcatcagcagctggaagccatgccccaggaatggaaaaggaggaggtgtatgatccaatgaacttacctgatgttgacaagttgaatgcgtcgtacatcgctgttcatggtagagccatgcttgggcgatccctgtggttgagaacttcatcattgcctcagtcagcttga

SEQ ID NO: 46620 - protein, 416 aa, Oryza sativa
MAAAPYHQPTSLEEVRTLWIGDLQYWADENYLYNCFAHTGELQSVKIIRNKLTSLPEGYGFIEFISHEVAEKVLQTYNGTQMPGTEHTFRLNWASFSSGERRPDAGPDHSIFVGDLAPDVTDYLLQETFRVSYPSVKGAKVVTDPNTGRSKGYGFVKFADENEKNRAMTEMNGMYCSTRPMRISAAIPKKTTGSQLQYGAAKAMYPAAGYAVPQVQPVLPDSDPTNTTIFIGNLDQNVTEDELRQICVQFGELIYVKIPANKACGFVQYASRASAEEAVQRLHGTTIGQQVVRLSWGRSPASKQDQSAVWSQQADPNQWASAYYGYGYDAYGYAQDPSYAYNSYAGYTQYPQQVEGATDMASAAGSHAPGMEKEEVYDPMNLPDVDKLNASYIAVHGRAMLGRSLWLRTSSLPQSA

SEQ ID NO: 46621 - DNA, 1221 bp, Oryza sativa
  CDS (1)..(1221)
atgatgcagccgccgccgccgccgcagtgggcaatggggccgccgcctcctccgcagtacttccaggctggccctccgccgccgccgccacagtacttccagggggcgcatccacccgctgccatgtggggccagcccccgccgccgcaggctgcccctccgccggcgccggctggtggcgcagcaggggacgaggtgaggaccctgtggatcggcgacctccagttctggatggaagagaactacctgtacaactgcttctcccaggccggcgagcttatctcagcaaagataattcggaacaagcaaactgggcaacctgagggttatggtttcattgaatttggcagccatgctatagccgaacaagttctgcaaggctataatggtcaaatgatgcctaatggtaatcaggttttcaaattaaattgggcgacaagtggtgctggcgagaagcgtggagatgatggctcagattatactatatttgttggggatctcgcctcggatgttacagatttaattcttcaagatacattcaaggcccattaccaatcagttaagggtgcaaaagttgtctttgacagaagtactggtcgttcaaaaggctatggatttgttaagtttggagatttggatgaacagacacgtgcaatgactgaaatgaatggacaatattgttctagcaggcctatgcgtattggaccagcatccaacaagaaaaatataggtggccaacaacaaccaagtgctacataccagaatacacaaggaacagattctgatagcgatccaaacaatactactgtatttgttggtggtcttgatccaagtgtgactgatgaggttctgaaacaagccttcagtccatatggagaacttgtctacgtcaaaatacctgtaggaaagcgttgtggatttgttcaatattccaatagggcttcagctgaggaggccataaggatgctaaatggaagccaattaggaggtcagagcataaggctttcatggggtcgtagccctggaaacaagcagcctcagcaagaccagaaccaatggaatgctggctattatggatatcccccccaaggatatgatccatatggttatgttcggccgcctcaagatcctgccatgtacgcttatgcagcatatcctggatacgggaattatcaacaaccagcgccacagcagccccctcaacaggttaaggcactctag

SEQ ID NO: 46622 - protein, 406 aa, Oryza sativa
MMQPPPPPQWAMGPPPPPQYFQAGPPPPPPQYFQGAHPPAAMWGQPPPPQAAPPPAPAGGAAGDEVRTLWIGDLQFWMEENYLYNCFSQAGELISAKIIRNKQTGQPEGYGFIEFGSHAIAEQVLQGYNGQMMPNGNQVFKLNWATSGAGEKRGDDGSDYTIFVGDLASDVTDLILQDTFKAHYQSVKGAKVVFDRSTGRSKGYGFVKFGDLDEQTRAMTEMNGQYCSSRPMRIGPASNKKNIGGQQQPSATYQNTQGTDSDSDPNNTTVFVGGLDPSVTDEVLKQAFSPYGELVYVKIPVGKRCGFVQYSNRASAEEAIRMLNGSQLGGQSIRLSWGRSPGNKQPQQDQNQWNAGYYGYPPQGYDPYGYVRPPQDPAMYAYAAYPGYGNYQQPAPQQPPQQVKAL

SEQ ID NO: 46623 - DNA, 1209 bp, Oryza sativa
  CDS (1)..(1209)
atgatgcagccgccgccgccgccgcagtgggcaatggggccgccgcctcctccgcagtacttccaggctggccctccgccgccgccgccacagtacttccagggggcgcatccacccgctgccatgtggggccagcccccgccgccgcaggctgcccctccgccggcgccggctggtggcgcagcaggggacgaggtgaggaccctgtggatcggcgacctccagttctggatggaagagaactacctgtacaactgcttctcccaggccggcgagcttatctcagcaaagataattcggaacaagcaaactgggcaacctgagggttatggtttcattgaatttggcagccatgctatagccgaacaagttctgcaaggctataatggtcaaatgatgcctaatggtaatcaggttttcaaattaaattgggcgacaagtggtgctggcgagaagcgtggagatgatggctcagattatactatatttgttggggatctcgcctcggatgttacagatttaattcttcaagatacattcaaggcccattaccaatcagttaagggtgcaaaagttgtctttgacagaagtactggtcgttcaaaaggctatggatttgttaagtttggagatttggatgaacagacacgtgcaatgactgaaatgaatggacaatattgttctagcaggcctatgcgtattggaccagcatccaacaagaaaaatataggtggccaacaacaaccaagtgctacataccagaatacacaaggaacagattctgatagcgatccaaacaatactactgtatttgttggtggtcttgatccaagtgtgactgatgaggttctgaaacaagccttcagtccatatggagaacttgtctacgtcaaaatacctgtaggaaagcgttgtggatttgttcaatattccaatagggcttcagctgaggaggccataaggatgctaaatggaagccaattaggaggtcagagcataaggctttcatggggtcgtagccctggaaacaagcagcctcagcaagaccagaaccaatggaatgctggctattatggatatcccccccaaggatatgatccatatggttatgttcggccgcctcaagatcctgccatgtacgcttatgcagcatatcctggatacgggaattatcaacaaccagcgccacagcagccccctcaacagtaa

SEQ ID NO: 46624 - protein, 402 aa, Oryza sativa
MMQPPPPPQWAMGPPPPPQYFQAGPPPPPPQYFQGAHPPAAMWGQPPPPQAAPPPAPAGGAAGDEVRTLWIGDLQFWMEENYLYNCFSQAGELISAKIIRNKQTGQPEGYGFIEFGSHAIAEQVLQGYNGQMMPNGNQVFKLNWATSGAGEKRGDDGSDYTIFVGDLASDVTDLILQDTFKAHYQSVKGAKVVFDRSTGRSKGYGFVKFGDLDEQTRAMTEMNGQYCSSRPMRIGPASNKKNIGGQQQPSATYQNTQGTDSDSDPNNTTVFVGGLDPSVTDEVLKQAFSPYGELVYVKIPVGKRCGFVQYSNRASAEEAIRMLNGSQLGGQSIRLSWGRSPGNKQPQQDQNQWNAGYYGYPPQGYDPYGYVRPPQDPAMYAYAAYPGYGNYQQPAPQQPPQQ

SEQ ID NO: 46625 - DNA, 1164 bp, Oryza sativa
  CDS (1)..(1164)
atggcgcaggcgcggtgggtcgtcctgccttacccgcctccgccgccgcccatggtggccgctccgccgcccccgccgccgcagtacgccaagcacttcgcggcggggccgccccccgccgcggcggccgggcggcgcacgccgaccccgcccgcccccgccggatccggcgggaacgggtgcgaggagaacaagacgatctgggttggcgacctccagtattggatggacgagaactacctccacagctgtttcggacccagcggcgaggtagtgacgataaaagttatccgcaatagacaaactggacaatccgagggatatggttttgtagagttctactctcacggatcggcagagaaggctcttcagaattttactggtcatgtgatgcctaacactgatcgacctttcaagttaaactgggcttcatatagcatgggtgaaaagcgatctgaagttgcttctgactactcaattttcgttggtgatctagctgctgatgttactgatgaaatgttgatggagctttttgctaataagtaccgctctgtgaaaggagctaaagttattattgatgcaaacacaggccgttctaggggctatgggtttgttagatttggagatgacaatgacaaatcccatgcaatgactgaaatgaatggtgcgtattgctctactaggccaattcgtattggacctgcaactcccagaaggtcttcaggtgattctggctcctcaacacctgggcattcagatggcgattctactaacagaacggtatatgttggtgggctcgatccaaatgtcagcgaagatgagctgaggaaggcatttgccaaatatggtgatgttgcctctgtaaaaattcctctagggaagcaatgtggctttgttcaattcgtcagcagaactgatgcggaagaagcactgcaaggattgaatggatcagtcattggaaagcaggcagttcgcctttcatggggccgcagcccatcacataaacagtctagggctgattctggcagccgaagaaacaatatgtactatgggacgccattctacggtggatacggttatgcctcccccgtcccgcaccctaacatgtatgctgctgcatatggagcctaccctgtctatggcagtcagcagctagtgagctag

SEQ ID NO: 46626 - protein, 387 aa, Oryza sativa
MAQARWVVLPYPPPPPPMVAAPPPPPPQYAKHFAAGPPPAAAAGRRTPTPPAPAGSGGNGCEENKTIWVGDLQYWMDENYLHSCFGPSGEVVTIKVIRNRQTGQSEGYGFVEFYSHGSAEKALQNFTGHVMPNTDRPFKLNWASYSMGEKRSEVASDYSIFVGDLAADVTDEMLMELFANKYRSVKGAKVIIDANTGRSRGYGFVRFGDDNDKSHAMTEMNGAYCSTRPIRIGPATPRRSSGDSGSSTPGHSDGDSTNRTVYVGGLDPNVSEDELRKAFAKYGDVASVKIPLGKQCGFVQFVSRTDAEEALQGLNGSVIGKQAVRLSWGRSPSHKQSRADSGSRRNNMYYGTPFYGGYGYASPVPHPNMYAAAYGAYPVYGSQQLVS

SEQ ID NO: 46627 - DNA, 1014 bp, Oryza sativa
  CDS (1)..(1014)
atggcgcaggcgcggtgggtcgtcctgccttacccgcctccgccgccgcccatggtggccgctccgccgcccccgccgccgcagtacgccaagcacttcgcggcggggccgccccccgccgcggcggccgggcggcgcacgccgaccccgcccgcccccgccggatccggcgggaacgggtgcgaggagaacaagacgatctgggttggcgacctccagtattggatggacgagaactacctccacagctgtttcggacccagcggcgaggtagtgacgataaaagttatccgcaatagacaaactggacaatccgagggatatggttttgtagagttctactctcacggatcggcagagaaggctcttcagaattttactggtcatgtgatgcctaacactgatcgacctttcaagttaaactgggcttcatatagcatgggtgaaaagcgatctgaagttgcttctgactactcaattttcgttggtgatctagctgctgatgttactgatgaaatgttgatggagctttttgctaataagtaccgctctgtgaaaggagctaaagttattattgatgcaaacacaggccgttctaggggctatgggtttgttagatttggagatgacaatgacaaatcccatgcaatgactgaaatgaatggtgcgtattgctctactaggccaattcgtattggacctgcaactcccagaaggtcttcaggtgattctggctcctcaacacctgggcattcagatggcgattctactaacagaacggtatatgttggtgggctcgatccaaatgtcagcgaagatgagctgaggaaggcatttgccaaatatggtgatgttgcctctgtaaaaattcctctagggaagcaatgtggctttgttcaattcgtcagcagaactgatgcggaagaagcactgcaaggattgaatggatcagtcattggaaagcaggcagttcgcctttcatggggccgcagcccatcacataaacagggctga

SEQ ID NO: 46628 - protein, 337 aa, Oryza sativa
MAQARWVVLPYPPPPPPMVAAPPPPPPQYAKHFAAGPPPAAAAGRRTPTPPAPAGSGGNGCEENKTIWVGDLQYWMDENYLHSCFGPSGEVVTIKVIRNRQTGQSEGYGFVEFYSHGSAEKALQNFTGHVMPNTDRPFKLNWASYSMGEKRSEVASDYSIFVGDLAADVTDEMLMELFANKYRSVKGAKVIIDANTGRSRGYGFVRFGDDNDKSHAMTEMNGAYCSTRPIRIGPATPRRSSGDSGSSTPGHSDGDSTNRTVYVGGLDPNVSEDELRKAFAKYGDVASVKIPLGKQCGFVQFVSRTDAEEALQGLNGSVIGKQAVRLSWGRSPSHKQG

SEQ ID NO: 46629 - DNA, 1278 bp, Oryza sativa
  CDS (1)..(1278)
atgcagcagccgccgtcgcagccgcagcccggcatgggcggcccgcctccgccgccacagggcgcggcggggcagccgccgcagtggggcgcgatcccgccgccgatgccgccgcaccagtacggcgcgccgccgccccagcagccgccggcgatgtggggccagcccccgccgcaggcgcactacgggcaggtgcccccgccccagccgtactacgccgcgccaccgccgcaggcgatgcccgcccccgcggccgcggacgaggtgaagacgctctggatcggcgacctgcagccctggatggacgagagctacatctacaactgcttcgcggccaccggggaggttcaatctgtgaagcttatccgggacaaacaaagtggacagcttcagggttatggctttgttgagtttacaagtcgtgcagctgctgatcgaattcttcagacttataatggacagatgatgccgaatgttgagatggtcttccgattgaattgggccagtgctggcgagaagcgtgatgatacccctgactacaccatttttgtcggggatttggctgcagatgttacagactacctactacaagagacattcagggtccattacccttcggttaagggtgcaaaagttgtaactgacaaaatgacaatgcgttcaaagggttatgggtttgtgaaatttggtgatcctacagagcaagctcgtgcaatgactgaaatgaatggaatgctttgctcttccagaccgatgcgtattggtccagcggcaaataagaaaacaacaggggttcaggagagagtaccaaatgctcaaggagctcagtctgagaatgatcctaacaataccaccatattcgttggtggtcttgaccccaacgtcactgaagatgtcttgaaacaagttttcgctccttatggagaagttgtccatgttaagattcctgttgggaaaagatgtggttttgttcaatatgttaacaggccttctgctgagcaagcactggcagtgctacaagggaccttgattggtgggcagaatgttagactttcgtggggtcgaagcctttcaaacaaacagcctcagcacgactcgaatcagtggggtgctggtgctggtgctggtggttactatggtggctatggacaaggttatgaggcttatggtgggtatgcacaacctcaggatcctaacatgtatggttatggagcctatgctggttatcccaattaccaacagcaacaagtagcacagcagcagccgccgcagcagtga

SEQ ID NO: 46630 - protein, 425 aa, Oryza sativa
MQQPPSQPQPGMGGPPPPPQGAAGQPPQWGAIPPPMPPHQYGAPPPQQPPAMWGQPPPQAHYGQVPPPQPYYAAPPPQAMPAPAAADEVKTLWIGDLQPWMDESYIYNCFAATGEVQSVKLIRDKQSGQLQGYGFVEFTSRAAADRILQTYNGQMMPNVEMVFRLNWASAGEKRDDTPDYTIFVGDLAADVTDYLLQETFRVHYPSVKGAKVVTDKMTMRSKGYGFVKFGDPTEQARAMTEMNGMLCSSRPMRIGPAANKKTTGVQERVPNAQGAQSENDPNNTTIFVGGLDPNVTEDVLKQVFAPYGEVVHVKIPVGKRCGFVQYVNRPSAEQALAVLQGTLIGGQNVRLSWGRSLSNKQPQHDSNQWGAGAGAGGYYGGYGQGYEAYGGYAQPQDPNMYGYGAYAGYPNYQQQQVAQQQPPQQ

SEQ ID NO: 46631 - DNA, 1470 bp, Oryza sativa
  CDS (1)..(1470)
atgcagcagcctcccccgccgacgatgaacggcggccaccacgcggcccctcctccgccgcaggtctccggggcgcccccgccgccgcatggccactaccagcagcagccgccgcctcagccgtactgccagcagcagcagccgctgccgccgcactactaccaggcggggcccccgcacgcgcctccgccgcagcagccgccggcgatgtggggccagccgccgccgccgccgccgcagtacgcgccacctccgccccagcagttccagctcccgcaccagcagtacgcacctccccctcagcattacgcgccgccgccgccgcagcagcagtacggggcgcagatggctggcgggcccgctccgggaggcgacgagatcaggtcgctgtggatcggggatctccagtactggatggatgagagctacctctccaacgcttttgcccccatgggacagcaggttacctctgtgaaagtcatccgcaacaagcagagtgggcactctgagggttatggttttattgaatttcagtctcacgctgctgcagaatatgctctggctaactttaatgggaggatgatgcttaatgttgaccaacttttcaagctaaactgggcttctagtggtgctggtgaaaggcgtgctgctgatgatggtcctgagcacacaatatttgttggtgatttagcttctgatgttacagactccatgttggaagaagcattcaaaaccagttatccttcagttagaggagccaaagttgtttttgacaaagtcactgggcgatccaagggatatggttttgtacgttttggagatgaaaatgagcaaacacgtgctatgactgagatgaatggagcgaccttgtctacaaggcaaatgaggcttgggccggcagctaacaagaagaatatgggtacccagcagacatattcaacaaatggttaccagagctcccaaggaaacagtttggagaatgatcccaataatacaacaatctttgtgggcgggttagattccaatgtaaatgaggaccatctaaagcaagtatttactccatatggggaaattggttatgtgaagattcctctaggcaagcgttgtggatttgtccaatttactagcaggtcatctgctgaagaagccatccgtgtgctgaatgggtctcagattggtgggcagcaagttcggctttcatggggccgtactcctcagaacaagcaggctccccagcaggatgccaaccagtggaatggcaactactatggataccaacagggctatgattcttcttactatggtgcacccaatgcacaggatcctagtgcgcaaaactactatggatattctggctatggcaattacgaacagcagcaggagcccccacagcagcagcagcaacccccacaacagcccccacagcagccacaagataacaagttcagtacatcatttatcacacgatga

SEQ ID NO: 46632 - protein, 489 aa, Oryza sativa
MQQPPPPTMNGGHHAAPPPPQVSGAPPPPHGHYQQQPPPQPYCQQQQPLPPHYYQAGPPHAPPPQQPPAMWGQPPPPPPQYAPPPPQQFQLPHQQYAPPPQHYAPPPPQQQYGAQMAGGPAPGGDEIRSLWIGDLQYWMDESYLSNAFAPMGQQVTSVKVIRNKQSGHSEGYGFIEFQSHAAAEYALANFNGRMMLNVDQLFKLNWASSGAGERRAADDGPEHTIFVGDLASDVTDSMLEEAFKTSYPSVRGAKVVFDKVTGRSKGYGFVRFGDENEQTRAMTEMNGATLSTRQMRLGPAANKKNMGTQQTYSTNGYQSSQGNSLENDPNNTTIFVGGLDSNVNEDHLKQVFTPYGEIGYVKIPLGKRCGFVQFTSRSSAEEAIRVLNGSQIGGQQVRLSWGRTPQNKQAPQQDANQWNGNYYGYQQGYDSSYYGAPNAQDPSAQNYYGYSGYGNYEQQQEPPQQQQQPPQQPPQQPQDNKFSTSFITR

SEQ ID NO: 46633 - DNA, 1284 bp, Oryza sativa
  CDS (1)..(1284)
atgctgccgcagcagcagcagcagcagaagcagcaggcggcggcgctgatgccgccgtccatgtacgcgatgccgccaccgccgccgctccaccaccaccaccacccgctcctcgccgccgcgccgccccagcagcagatagagccaatccttactggaaatctgcctcctggctttgatacgagtacatgccgcagtgtatatgttggcaatgttcatgttcaagtcacagaggcacttctccgagaggtttttcagagtactggtttagttgaaggatgcaagcttatacgaaaagagaagtcatcttatggctttgttgactactatgaccgcagatcagctgcattatcaattttgacacttaatggaaagcaaatttttgggcagcttatcagagttaattgggcatatgctagtgggcagagggaggacacaacagaccatttcaatatttttgttggtgatcttagcccagaggttactgattccgcattatttgcattcttctctggatattccagttgctctgatgcccgagttatgtgggatcaaaagactggaagatctagaggttatggctttgtttccttcaggaatcaacaggatgcacaaagtgccataaatgacctaaatggacaatggcttggaagtcggcagatacgctgcaactgggcaacaaagggtgccagcaatggcgagcagcagacttcagattcaaaaaacgtagctgatctgactaacaatttgacagaagacgggaaggagaaagcaaatgaagatgccccagagaacaatccacagtacagaactgtttatgttggaaaccttgctcacgaggttactcaagatgtgctccatcgtcttttccacgcacttggagctggggccattgaggaggtccggatccagcttggcaaaggatttggcttcgtcagatacagcaaccacgcagaagccgccctcgcaatccagatgggaaacggtcgcattctaggtggtaaaccaatcaagtgttcctggggcaacaagccgacgccacccggcaccacgtcggcgcctctgccccctcccgccgctcccagcgtgacggcggccgatctcctcgagtaccagcgcagcctcgccttgagcaagatggtgtcaagccaggcgctgatgcaggctcaggcacagcagcatctgaagcaggcaatggggatgggtgcaggcgtgagccaggccatgtatgatgccagcttccccaacgttggcccctcgcagcagcagctcatgtactactga

SEQ ID NO: 46634 - protein, 427 aa, Oryza sativa
MLPQQQQQQKQQAAALMPPSMYAMPPPPPLHHHHHPLLAAAPPQQQIEPILTGNLPPGFDTSTCRSVYVGNVHVQVTEALLREVFQSTGLVEGCKLIRKEKSSYGFVDYYDRRSAALSILTLNGKQIFGQLIRVNWAYASGQREDTTDHFNIFVGDLSPEVTDSALFAFFSGYSSCSDARVMWDQKTGRSRGYGFVSFRNQQDAQSAINDLNGQWLGSRQIRCNWATKGASNGEQQTSDSKNVADLTNNLTEDGKEKANEDAPENNPQYRTVYVGNLAHEVTQDVLHRLFHALGAGAIEEVRIQLGKGFGFVRYSNHAEAALAIQMGNGRILGGKPIKCSWGNKPTPPGTTSAPLPPPAAPSVTAADLLEYQRSLALSKMVSSQALMQAQAQQHLKQAMGMGAGVSQAMYDASFPNVGPSQQQLMYY

SEQ ID NO: 46635 - DNA, 1284 bp, Oryza sativa
  CDS (1)..(1284)
atggccccgccgccgccgcccccgcaggcgggggtcgccgggggcggcggcgcgccgccgcagtggggcgccatccctcccccggtgccgcaccaacagcagcagtacgcgccgccgccgccgcagatgtggggccaggctcccccgccgccgccgcagatgtggggccaggctcccccgccgccgcagcccgcgtacggccagccgccgccggcccaggcggggtactacggggcgccgccgcaggcggccccggccgtccccgcggggcccaacgaggtcaggacgctctggatcggggatctccagtactggatggatgagaactacatctccgcctgctttgcgcccaccggcgagctacaatctgtgaagctaattcgtgacaagcagactggacaacttcagggttatggctttattgaattcacatcccatgctggtgctgaaagagttcttcaaacatacaatggggcaatgatgccaaatgttgagcagacataccggttgaattgggcctctgctggtgaaaaacgtgatgatacccctgattacacaatttttgttggtgatttggctgctgatgttacagactacatattgcaagagacgttcagggtacattacccatctgtgaagggtgcaaaggttgtgacagataaaatgacaatgcgttcaaagggctatggcttcgtcaaatttggtgatccttccgagcaagcccgtgcaatgacagaaatgaatgggatggtttgttcttcaagacctatgcgtatcggcccagctgcaaataagaaagcaactggagttcaagagaaagtaccgagtgctcaaggagttcagtctgacagtgatcctagcaataccactatatttgttggtggccttgatcccagtgtcactgacgatatgttgaaacaagttttcactccctatggagatgtggtccatgttaagatcccagttggaaaaagatgtggttttgttcaatttgctaacagagcttctgcagatgaagctttggtacttctacaaggtaccttgattggaggacagaatgtgaggctttcatggggccgcagcccttcaaatagacaagctcagcctcaacaggattccaaccagtggggtggtgctaatgctggatactacggttatgggcaaggatatgagggttatgggtatgctcaacctcaggaccctaatatgtacgggtatggagcttatgctggttatcccaactaccaacaacccctagctcagcagccgcagcagcaacagtga

SEQ ID NO: 46636 - protein, 427 aa, Oryza sativa
MAPPPPPPQAGVAGGGGAPPQWGAIPPPVPHQQQQYAPPPPQMWGQAPPPPPQMWGQAPPPPQPAYGQPPPAQAGYYGAPPQAAPAVPAGPNEVRTLWIGDLQYWMDENYISACFAPTGELQSVKLIRDKQTGQLQGYGFIEFTSHAGAERVLQTYNGAMMPNVEQTYRLNWASAGEKRDDTPDYTIFVGDLAADVTDYILQETFRVHYPSVKGAKVVTDKMTMRSKGYGFVKFGDPSEQARAMTEMNGMVCSSRPMRIGPAANKKATGVQEKVPSAQGVQSDSDPSNTTIFVGGLDPSVTDDMLKQVFTPYGDVVHVKIPVGKRCGFVQFANRASADEALVLLQGTLIGGQNVRLSWGRSPSNRQAQPQQDSNQWGGANAGYYGYGQGYEGYGYAQPQDPNMYGYGAYAGYPNYQQPLAQQPQQQQ

SEQ ID NO: 46637 - DNA, 1344 bp, Oryza sativa
  CDS (1)..(1344)
atgaacggcgccggcgggaaccaccagcagcagcagcagcagcagcagcggctcaggcagcagcagcagcagcaggccctcctgatgcagcaggcgctgcagcagcagcagcagtaccagtccggcgtcctcgccgccgccgccgcggcggccatgacccagatggagcctatttcaaatggcaatcttccaccagggtttgatccatccacatgtcgcagtgtgtatgttgggaatgtgcaccctaatgttactgagagccttctaatcgaagttttccagagttctggccttgtggaaagatgcaagctcatccggaaggagaagtcttcctttggttttgttgactattatgatcggaggtcagcggctcttgcaataatgacccttcatggtcgtcacatatgtggccaagcaatcaaggtgaactgggcttatgcaagtacacagagggaggatacatctgggcatttccatatttttgttggtgatttaagttctgaagtgaatgatgcaactctttatgcctgtttctcagcatatccttcttgttctgatgctcgagtcatgtgggataacaaaaccggacgctccagaggttatggttttgtctccttccgtaatcaacaggaagctgagactgctataactgaaatgactgggaaatggcttggaagcagacaaataaggtgtaattgggcaacaaagaacaatgcagaagagaaacaagaaactgacaaccataatgcagttgtactaacaaatggtagttctagtaatccaggaatggaggcaagtcaggacaccggaagtaaagagaatccagagaacaaccctgattgtactacggtgtatgttggcaaccttggacatgaggttaaccgagatgagcttcaccgccacttctataatttaggtgttggggctattgaggaagttcgcgttcaacaggataaaggatttgggtttgtgagatacagtaaccatggcgaagcagcattggctattcagatggccaatggattggtagtgcgtgggaagccgatcaagtgctcatggggcaacaaacctaccccacctggtacatcctccaagccattgccaccgccacttccttcatatcaacccgtaccaatggcaggtgtgccacaaggtttctcggcagctgatatcgtagcatatcagaggcaacttaccttaagccaggtcgcagctgggcagattgctggccagcatggccttgcaggtcaggtatccgcagggcttcttgctgctggctcccaggccctctacgacgggtacccgaaccagtcatcagcgcaacagcttatgtactacaactag

SEQ ID NO: 46638 - protein, 447 aa, Oryza sativa
MNGAGGNHQQQQQQQQRLRQQQQQQALLMQQALQQQQQYQSGVLAAAAAAAMTQMEPISNGNLPPGFDPSTCRSVYVGNVHPNVTESLLIEVFQSSGLVERCKLIRKEKSSFGFVDYYDRRSAALAIMTLHGRHICGQAIKVNWAYASTQREDTSGHFHIFVGDLSSEVNDATLYACFSAYPSCSDARVMWDNKTGRSRGYGFVSFRNQQEAETAITEMTGKWLGSRQIRCNWATKNNAEEKQETDNHNAVVLTNGSSSNPGMEASQDTGSKENPENNPDCTTVYVGNLGHEVNRDELHRHFYNLGVGAIEEVRVQQDKGFGFVRYSNHGEAALAIQMANGLVVRGKPIKCSWGNKPTPPGTSSKPLPPPLPSYQPVPMAGVPQGFSAADIVAYQRQLTLSQVAAGQIAGQHGLAGQVSAGLLAAGSQALYDGYPNQSSAQQLMYYN

SEQ ID NO: 46639 - DNA, 1038 bp, Oryza sativa
  CDS (1)..(1038)
atgggctccccggcgccgcacgcgcagggcggcggcggcgggcaggaggagaacaagaccatctgggtcggcgacctccactactggatggacgagaactacctccacagctgcttcggctacaccggcgaggttgtagcaataaaggttattcgtaataagcaaactggacaatcggagggttatggatttgtagagttctacagtcatgctgctgctgagaaagtacttgaaggatttgctggtcatataatgccaaacactgaccaaccttttaggataaattgggcatcatttagcatgggggacagacgttcagatattgcttcagatcattccatatttgtaggcgaccttgcttctgatgtcaatgataccacattactagagactttctccaaaaggtactcctctgtcaaaggtgcgaaagttgttattgatgctaatactggtagatcaaagggctatggttttgtgagatttggagatgataacgagaagacacatgccatgactgagatgaatggtgtgtattgctctaccaggccaatgagaattggccctgcaactcccagaaaaacctcaggtacttctggacctactggttcagctgctcgatcagatggagatttgacaaacacaactgtatttgtcggtgggcttgatccaaatgttagtgaagatgaccttaggcaaacattttcgcaatacggtgaaatttcatcggtaaagatcccagttgggaaacagtgcggctttgtgcagtttgttcagaggaagaatgcggaagatgcattgcaaggactgaacggaagcaccattgggaaacagaccgtgcgtctttcgtggggacgcaatccagcaaacaagcagttgaggagtgacaatggcagtcagtggaacaacgggatgtactacgcagcctcgccgttttacagtggatacggctaccctgcaccgttccctgctgatccgggcatgtacgctgctgcttatggcgcctacccgttctacggaaaccaacaacaagtgagctaa

SEQ ID NO: 46640 - protein, 345 aa, Oryza sativa
MGSPAPHAQGGGGGQEENKTIWVGDLHYWMDENYLHSCFGYTGEVVAIKVIRNKQTGQSEGYGFVEFYSHAAAEKVLEGFAGHIMPNTDQPFRINWASFSMGDRRSDIASDHSIFVGDLASDVNDTTLLETFSKRYSSVKGAKVVIDANTGRSKGYGFVRFGDDNEKTHAMTEMNGVYCSTRPMRIGPATPRKTSGTSGPTGSAARSDGDLTNTTVFVGGLDPNVSEDDLRQTFSQYGEISSVKIPVGKQCGFVQFVQRKNAEDALQGLNGSTIGKQTVRLSWGRNPANKQLRSDNGSQWNNGMYYAASPFYSGYGYPAPFPADPGMYAAAYGAYPFYGNQQQVS

SEQ ID NO: 46641 - DNA, 1326 bp, Oryza sativa
  CDS (1)..(1326)
atgcagcatcagcagcggatgaagcaggcggcggcggcggcgcagcagcagcagatgatgcagcaggcgctgctcatgcagcagcagcaggctgcggcggtggcggcggcggcgcagcagcagcaggcgcccttgttccccccgcaccacccgcacccgggcctcctcgcggcgccgcagatagagcccattgttagtggcaacctgcctcctggatttgattcaagtacatgccggagtgtgtatgttggcaatatccatcttcaagtgacggattcactgctacatgaggtcttccaaagtattggtccagtagaaggatgcaagctcatcaggaaggaaaagtcatcctttggttttgttgactattatgaccgtagatctgctgcaattgcaattgtatcactcaacggtagacaattgtttggccagccaataaaagtcaattgggcatatgcaagtactcaaagagaggatacatcaggccattttaatatttttgttggcgatctttgcccggaagtaacagatgctgctttgtttgcttttttcgctggatttaccagttgctcagatgctagggtaatgtgggatcagaaaactggacgatccagaggttttggttttgtttctttcagaaatcagcaggacgcacaaaatgccataaatgaactgaatgggaagtggctcggcaaccgtcaagttcgttgcaattgggcaacaaagggtgctaatgctggtgaagagaaacaaaatacagactccaagggtatgatagagttgacaaatggttcatcagaaggtggaaaggataatgcaaatgaagatggtcctgaaaacaacccacagtacacgactgtttatgttggcaatcttcctcatgatgtcaacagcaatgatgtgcacagatttttccattcacttggggttggttcaattgaggaggtgcgtgtaacgcgtgataaaggttttggctttgtgcgttacagcacccatgaagaagctgctctagcaattcagactggtaatggacaacttattggcggtaggcagatcaagtgttcctggggaagcaagccaactccaccagggacagcatccgcgcccctaccccctccagcaccagcaccattcaatcctggcatgtcggcgaccgacctcctagcctacgagcgcaccctggcgctgagcaagatggcagcgaacccggccctgatgagtcagcacgccgccctaaagcaggctgccgccatggggatgggcgccggagccagccaggccatctacgacggcggctaccagagtgccaacgccgtcttctactag

SEQ ID NO: 46642 - protein, 441 aa, Oryza sativa
MQHQQRMKQAAAAAQQQQMMQQALLMQQQQAAAVAAAAQQQQAPLFPPHHPHPGLLAAPQIEPIVSGNLPPGFDSSTCRSVYVGNIHLQVTDSLLHEVFQSIGPVEGCKLIRKEKSSFGFVDYYDRRSAAIAIVSLNGRQLFGQPIKVNWAYASTQREDTSGHFNIFVGDLCPEVTDAALFAFFAGFTSCSDARVMWDQKTGRSRGFGFVSFRNQQDAQNAINELNGKWLGNRQVRCNWATKGANAGEEKQNTDSKGMIELTNGSSEGGKDNANEDGPENNPQYTTVYVGNLPHDVNSNDVHRFFHSLGVGSIEEVRVTRDKGFGFVRYSTHEEAALAIQTGNGQLIGGRQIKCSWGSKPTPPGTASAPLPPPAPAPFNPGMSATDLLAYERTLALSKMAANPALMSQHAALKQAAAMGMGAGASQAIYDGGYQSANAVFY

SEQ ID NO: 46643 - DNA, 1197 bp, Brassica napus
  CDS (1)..(1197)
atgatgcagcacccaccacccggaggtctccttccgcaccacgttcctcctccgtctgctcaacagcactacggttaccagcaaccgcctccttacgccatgccaggagctgctccaccacagatgtggaatccacaagcggccccaccaagccagcctatgaccgccgacgagatccgtactctttggatcggtgacttacagttctggatggatgagagtttcctctacagttgttttgctcacaccggagaggttgtttctgttaaagtaatccggaacaagcaaacctctcaagttgaaggctacggtttcatcgagtttgtatctcacgctgctgctgaacgagctttacaaacatacaacaacactcccatccctggccttcctgaccacctcttcagattaaactgggcctcgttgggctcaggagataaacgtgacgactcgcctgattacactatcttcgtcggtgatctcgccgctgatgttacggactacgtcttgctagagacttttaaagcctcttatccttcggttaagggtgcaaaggttgttatcgacagagccactgggcgtacgaagggatacggtttcgttaggttttctgatgagagtgagcagatacgtgccatgagcgagatgaacggtgttccttgttcgagtaggcctatgaggattgggccagctgctagcaaaaaaggtgtatctggtcaaagagattcataccagagtgctgcttcaggggttccaactgataatgatccaaataacaccactgtttttgttggtggattagatcccactatcacggatgatcatctgaagaatgtctttagccaatatggcgagatagttcatgtgaaaatacctgctggaaagcgctgtggattcgttcagttttctgagaaaagctgcgcagaggaagcaattcgaatgttgaatggaacgcagttgggaggaacaaccgttaggctatcatggggacgtagtccttcttctaaacaggcggctgatccgagtcagtactattacggtggctatggacaaggtcaggagcattatgggtactccatgccgcaagatcctaatgcgtactacggaggctaccctggtgggtatcagcagccaccacaggtggggcagcaaccacctcagcaaccgccacagcagcaacaagtggggttcagctactag

SEQ ID NO: 46644 - protein, 398 aa, Brassica napus
MMQHPPPGGLLPHHVPPPSAQQHYGYQQPPPYAMPGAAPPQMWNPQAAPPSQPMTADEIRTLWIGDLQFWMDESFLYSCFAHTGEVVSVKVIRNKQTSQVEGYGFIEFVSHAAAERALQTYNNTPIPGLPDHLFRLNWASLGSGDKRDDSPDYTIFVGDLAADVTDYVLLETFKASYPSVKGAKVVIDRATGRTKGYGFVRFSDESEQIRAMSEMNGVPCSSRPMRIGPAASKKGVSGQRDSYQSAASGVPTDNDPNNTTVFVGGLDPTITDDHLKNVFSQYGEIVHVKIPAGKRCGFVQFSEKSCAEEAIRMLNGTQLGGTTVRLSWGRSPSSKQAADPSQYYYGGYGQGQEHYGYSMPQDPNAYYGGYPGGYQQPPQVGQQPPQQPPQQQQVGFSY

SEQ ID NO: 46645 - DNA, 1260 bp, Brassica napus
  CDS (1)..(1260)
atggctgacacgaaggtccaatccccggaaacaacggcggttgaggataaccaccaacgaataacatcatcatctccaacgccgccgccgccgccatctcactggatggggatgagatacccttcgccgatgatgatgcctcaccatatgatgtacccgccgcctccttactctccttaccaccaccataatcatatgtatcatcataatcatcatcaccagtctcgtggtaacaaacaccaaaacgcttcgaacgctgagaataagacgatttggatcggtgatttgcttcactggatggatgagaattaccttaattcttgctttgctcccgctggagagatggcgtcagttaaggttatcaggaacaagcacactggtttgtctgagggctatggattcgtggaattcgattcccacgatgtcgccgagaaggttttgcaggattttaacggagtaactatgttacagtccgaccagccttaccgtttaaactgggccagtttcagcaccggcgaaaaacgcttagagaatggtcctgaccactctatattcgtgggcgacttggcgccagaagtcactgatgaactgttgcataaactgttctttcataaatacccatctgtcaagactgcgaaagtcgtcatagatggcagtactggtcggtcaaaggggtatggctttgtgagattcggagatgatggtgagaggagcaaagctttggtggagatgaatggtgtgaaatgctgtagcagggctatgagagtcggtgctgccactcctaggaagcctaatggttacaatcaccaaggtggtggagctgctccacgtgatggggactcattgaacacaacaatatttgttggaggacttgacgctgatgtcactgacgaagttcttagacagccttttgctggttttggtgaaatagtctctgtcaagataccgattgggaaaggatgtggattcattcagtttgtgaacagagaaaacgcagaggaggctttggagaaactaaatggttctgtgattggaaaacaaaccgttcgcctttcttggggtcgtaatcaaggcaacaaacagcctcgaggtgggtatggagaccaatgggttgaaccgttctatagaggacaatactacaatggttatggatacatgccattaccaccacctattgacccgagaatgtatggtgctgcaccttatggaggttatcctatgtacggtggtcatcagcagcagcagcaacaagtaagctga

SEQ ID NO: 46646 - protein, 419 aa, Brassica napus
MADTKVQSPETTAVEDNHQRITSSSPTPPPPPSHWMGMRYPSPMMMPHHMMYPPPPYSPYHHHNHMYHHNHHHQSRGNKHQNASNAENKTIWIGDLLHWMDENYLNSCFAPAGEMASVKVIRNKHTGLSEGYGFVEFDSHDVAEKVLQDFNGVTMLQSDQPYRLNWASFSTGEKRLENGPDHSIFVGDLAPEVTDELLHKLFFHKYPSVKTAKVVIDGSTGRSKGYGFVRFGDDGERSKALVEMNGVKCCSRAMRVGAATPRKPNGYNHQGGGAAPRDGDSLNTTIFVGGLDADVTDEVLRQPFAGFGEIVSVKIPIGKGCGFIQFVNRENAEEALEKLNGSVIGKQTVRLSWGRNQGNKQPRGGYGDQWVEPFYRGQYYNGYGYMPLPPPIDPRMYGAAPYGGYPMYGGHQQQQQQVS

SEQ ID NO: 46647 - DNA, 1293 bp, Brassica napus
  CDS (1)..(1293)
atgcagacgacaaacaacggtccagattcgtcatcagccgcaacaaccccaccgttgcagcaatccactccaccacctcagcagcagcaccaacaacagtggcaacaacagcaacaatggatggcgatgatgcagcaccctgcggctatggcgatgatgcagcagcaacagatgatgatgtaccctcaccagtacgctccctacggccaaggtcactaccagcatcctcagtttcaatacgctgcgtatcagcagcagcagcagcagaatcaacagcagcgtggtggatctgggggagatgatgtgaagactctctgggttggtgatcttcttcactggatggacgagacttatctccatacctgtttctctcacaccaacgaggtttcatctgtgaaagttatacgaaacaagcaaacttctcagtcagaaggatacggttttgtcgagttcctttcacgttcagcagctgaagaagttcttcagagctacagcggcgtaaccatgcccaacgcagagcagcccttccgtttgaactgggcgtctttcagcaccggtgagaagagagcatcagagaacggtggtcctgacctgtcgatattcgtaggagatttggctccagatgtcactgatgctacactgctcgagactttcgctggttatcagtctgttaaaggtgcgaaagttgtgattgattccaacactggtcggtccaaaggctatgggtttgtgaggtttggtgatgagagcgagaggtcaagggcgttgactgagatgaatggtgctttctgctcgagcaggcagatgcgtgtgggtattgcaacgcctaagagagctgctgcttatggtcaacaaaatggttcacaagctctgacacttgctggtggacatggaggaaatggttcgatgtctgatggggactcaaataactcaacaatatttgttggtggacttgatgctgacgttactgaagaagacctcatgcaacctttctcccagtttggggaggttgtttcggtgaagatcccagtaggaaaaggatgtggttttgtccaatttggtaacaggcagagtgctgaggaagccattggaaacttgaacgggacagtcattgggaaaaacactgtgcggctatcttggggaagaagcccaaacagacagtggagaggagactcgggccaccaatggaacggaggatactcaagaggacaaggttacaacaacaacggatatgctaaccaggagtcaaacatgtatgctactgaagctgctgctgtccctggagcttcttaa

SEQ ID NO: 46648 - protein, 430 aa, Brassica napus
MQTTNNGPDSSSAATTPPLQQSTPPPQQQHQQQWQQQQQWMAMMQHPAAMAMMQQQQMMMYPHQYAPYGQGHYQHPQFQYAAYQQQQQQNQQQRGGSGGDDVKTLWVGDLLHWMDETYLHTCFSHTNEVSSVKVIRNKQTSQSEGYGFVEFLSRSAAEEVLQSYSGVTMPNAEQPFRLNWASFSTGEKRASENGGPDLSIFVGDLAPDVTDATLLETFAGYQSVKGAKVVIDSNTGRSKGYGFVRFGDESERSRALTEMNGAFCSSRQMRVGIATPKRAAAYGQQNGSQALTLAGGHGGNGSMSDGDSNNSTIFVGGLDADVTEEDLMQPFSQFGEVVSVKIPVGKGCGFVQFGNRQSAEEAIGNLNGTVIGKNTVRLSWGRSPNRQWRGDSGHQWNGGYSRGQGYNNNGYANQESNMYATEAAAVPGAS

SEQ ID NO: 46649 - DNA, 1305 bp, Brassica napus
  CDS (1)..(1305)
atgcagacgaccaactgctcagattcgtcgttatcaactcccggagccacgcctcctatccaacaactaactcctccgccgcctcagcagtggcagcagccgcaacagcattggatgacgacggcggcggctatgcagtatccaggtgcggcggccatgaacatgatgatgatgcagcagcaacagatgatgatgtatcctcaccaatacgttccttacaatcaaggtccttatcaccatcctcacttccaatacgcaccgtatcaccagcaccagcaacatcaacacaagcctccacacgagcgtggatctggagaagacgtcaagactctatgggttggtgatcttcttcattggatggatgaggcttatctccatacctgcttttctcacaccggcgaggtttcttctgtgaaagtgattcgtaacaagctaacatgtcaatcagaagggtacgttttttttgagtttcttacacgtgccgcagctgaagaggttcttcagaacttcagtggttcaataatgcctaactctgagcagctctttcgtctaaactgggcatctttcagtactggtgagaagagagctgttgagaatggtccagagctgtcggtattcgttggagatttatctccggacgtgactgatgctatgttgcaagagttgtttgctgagagatatccatctgtcaaaagcgccaaagttgtgatcgattccaacaccggccggtccaaaggctacggttttgttaggtttggcgatgaaagtgaaaggtcaagggctttgactgagatgaatggagctttgtgttccaacaggcaaatgagagttggtattgcgattcctaaaagagctgttgctaatcatcaacaacattcttcacaagctgtgatagtggctggtggacatggagcaaatggttctatggctaatggttcacaagctgatggtgaatcaaacaactcaacaatattcgttggtggccttgaccctgacgttactgatgaagacctcagacaaccttttacagagtttggtgaggttgtttcagtgaagatcccagtaggcaaaggatgtggatttgtccaatttgctaacaggaaaagtgctgatgatgccatccagagtttgaacgggacagtcattggcaagaacactgtcaggctctcatggggaagaaccccaaacaagtggagaggagactcagggcagcaatggaatggaggatactcacgagggcaaggttacaacaacggaggatatgctaaccaccaggactccaacacctatcctgccgagacttga

SEQ ID NO: 46650 - protein, 434 aa, Brassica napus
MQTTNCSDSSLSTPGATPPIQQLTPPPPQQWQQPQQHWMTTAAAMQYPGAAAMNMMMMQQQQMMMYPHQYVPYNQGPYHHPHFQYAPYHQHQQHQHKPPHERGSGEDVKTLWVGDLLHWMDEAYLHTCFSHTGEVSSVKVIRNKLTCQSEGYVFFEFLTRAAAEEVLQNFSGSIMPNSEQLFRLNWASFSTGEKRAVENGPELSVFVGDLSPDVTDAMLQELFAERYPSVKSAKVVIDSNTGRSKGYGFVRFGDESERSRALTEMNGALCSNRQMRVGIAIPKRAVANHQQHSSQAVIVAGGHGANGSMANGSQADGESNNSTIFVGGLDPDVTDEDLRQPFTEFGEVVSVKIPVGKGCGFVQFANRKSADDAIQSLNGTVIGKNTVRLSWGRTPNKWRGDSGQQWNGGYSRGQGYNNGGYANHQDSNTYPAET

SEQ ID NO: 46651 - DNA, 1230 bp, Brassica napus
  CDS (1)..(1230)
atgatgcagcagccacctcccgccgctaacggtgccgccgcaggatcaggtcagatcccttcggaccagcaagcttaccaccaccaccagtcgtggatgatgcagcagcagcaaggtcagccgccggcagcatggaatcctcagtcggcgccgtctccggttcaacagtacggcggtggatctcagactccaggatcagctggagagatcaaatccttgtggatcggagacttgcagccatggatggacgaaggctacctcatgagcatcttctctatcaccggcgaggttcaacaagctaaagtcatacgcaataaactgaccgggttaaccgaaggctacgggtttattgagtttgtgtcccatgctgcagctgagaggattctccagacgtacaacggagctcagatgcctaactgtgagcagacctttaggctgaactgggctcagcttggagctggagagagacgccagtctgatgggcccgagcacactgtttttgttggagatctggcgcctgatgttactgactacgtgcttacggaaacgttcaaggctgtgtattcctctgtgaagggagcaaaagttgtgactgatagggccactggacggtccaagggatacgggtttgtgaagtttggggatgaaagtgagcagataagggcaatgactgagatgaatggtcagtactgctcgtctaggcctatgcgtattggtccagctgctaacaagaagcctcttacaatgcaacaacaaccaggtgcatatcagaacactcaaggaaaccccggagaaggtgatccaactaacacaacgatttttgttggagctttggatgaaagtgtgacagaagatgttttgaagtcagtttttggtcaatttggtgaacttgttcatgtgaaaataccagcaggaaaacgttgcggatttgttcaatatgctattaggggatgtgcagagcaagcactcaactcgttgaatggaacacaacttggcggacaaagcattcgtctttcatggggtcgcactccttccaacaagcagactcaacctgaacaagctcagtatggtggcggtggtggtggatactatgggtatcctcctcagggatatgaaggttacggatatgcgccacctcctcaggaccctaacacctactatggtggctaccctggtgccggctatggaaactaccagcagcctggtggctaccagcagcatcagcagtga

SEQ ID NO: 46652 - protein, 409 aa, Brassica napus
MMQQPPPAANGAAAGSGQIPSDQQAYHHHQSWMMQQQQGQPPAAWNPQSAPSPVQQYGGGSQTPGSAGEIKSLWIGDLQPWMDEGYLMSIFSITGEVQQAKVIRNKLTGLTEGYGFIEFVSHAAAERILQTYNGAQMPNCEQTFRLNWAQLGAGERRQSDGPEHTVFVGDLAPDVTDYVLTETFKAVYSSVKGAKVVTDRATGRSKGYGFVKFGDESEQIRAMTEMNGQYCSSRPMRIGPAANKKPLTMQQQPGAYQNTQGNPGEGDPTNTTIFVGALDESVTEDVLKSVFGQFGELVHVKIPAGKRCGFVQYAIRGCAEQALNSLNGTQLGGQSIRLSWGRTPSNKQTQPEQAQYGGGGGGYYGYPPQGYEGYGYAPPPQDPNTYYGGYPGAGYGNYQQPGGYQQHQQ

SEQ ID NO: 46653 - DNA, 1293 bp, Brassica napus
  CDS (1)..(1293)
atgcagacgacaaacaacggtccagattcgtcatcagccgcaacaaccccaccgttgcagcaatccactccaccacctcagcagcagcaccaacaacagtggcaacaacagcaacaatggatggcgatgatgcagcaccctgcggctatggcgatgatgcagcagcaacagatgatgatgtaccctcaccagtacgctccctacggccaaggtcactaccagcatcctcagtttcaatacgctgcgtatcagcagcagcagcagcagaatcaacagcagcgtggtggatctgggggagatgatgtgaagactctctgggttggtgatcttcttcactggatggacgagacttatctccatacctgtttctctcacaccaacgaggtttcatctgtgaaagttatacgaaacaagcaaacttctcagccagaaggatacggttttgtcgagttcctttcacgttcagcagctgaagaagttcttcagagctacagcggcgtaaccatgcccaacgcagagcagcccttccgtttgaactgggcgtctttcagcaccggtgagaagagagcatcagagaacggtggtcctgacctgtcaatattcgtaggagatttggctccagatgtcactgatgctacactgctcgagactttcgctggttatcagtctgttaaaggtgcgaaagttgtgattgattccaacactggtcggtccaaaggctatgggtttgtgaggtttggtgatgagagcgagaggtcaagggcgttgactgagatgaatggtgctttctgctcgagcaggcagatgcgtgtgggtattgcaacgcctaagagagctgctgcttatggtcaacaaaatggttcacaagctctgacacttgctggtggacatggaggaaatggttcgatgtctgatggggactcaaataactcaacaatatttgttggtggacttgatgctgacgttactgaagaagacctcatgcaacctttctcccagtttggggaggttgtttcggtgaagatcccagtaggaaaaggatgtggttttgtccaatttggtaacaggcagagtgctgaggaagccattggaaacttgaacgggacagtcattgggaaaaacactgtgcggctatcttggggaagaagcccaaacagacagtggagaggagactcgggccaccaatggaacggaggatactcaagaggacaaggttacaacaacaacggatatgctaaccaggagtcaaacatgtatgctactgaagctgctgctgtccctggagcttcttaa

SEQ ID NO: 46654 - protein, 430 aa, Brassica napus
MQTTNNGPDSSSAATTPPLQQSTPPPQQQHQQQWQQQQQWMAMMQHPAAMAMMQQQQMMMYPHQYAPYGQGHYQHPQFQYAAYQQQQQQNQQQRGGSGGDDVKTLWVGDLLHWMDETYLHTCFSHTNEVSSVKVIRNKQTSQPEGYGFVEFLSRSAAEEVLQSYSGVTMPNAEQPFRLNWASFSTGEKRASENGGPDLSIFVGDLAPDVTDATLLETFAGYQSVKGAKVVIDSNTGRSKGYGFVRFGDESERSRALTEMNGAFCSSRQMRVGIATPKRAAAYGQQNGSQALTLAGGHGGNGSMSDGDSNNSTIFVGGLDADVTEEDLMQPFSQFGEVVSVKIPVGKGCGFVQFGNRQSAEEAIGNLNGTVIGKNTVRLSWGRSPNRQWRGDSGHQWNGGYSRGQGYNNNGYANQESNMYATEAAAVPGAS

SEQ ID NO: 46655 - DNA, 1302 bp, Zea mays
  CDS (1)..(1302)
atgcaggcggcggcggcggcggcgaatggcgcgggcgacgtgcagaagcctcagcagcagccgctggtggcgggggcgccgcccccaccgccgccggcggccgtggtgccgccccattgggtcgccatgccgttcgcgccgcctcccggggccgcggccatggtgatgcagccgcaccatatggcgcctccgccgccgcagttcgcgccgactcacttcgtgccgttccacgccgtcgcgccgccgcgggcagcagcggtcgcactgggttccccggcgccgcatcagccggggcaggaggagaacaagagcgtctgggtcggcgacctccattactggatggacgagaactacctacacagctgcttcggctacaccggcgaggttgtggcgatcaaagttatccgcaacaagcagactgggcagtccgaaggatacgggttcgtcgagttctacagccacgctgcggctgaaaaagttctcgaagggttttctggccatatcatgccgaacaccgaccagcctttcaggctaaactgggcatcgtttagcatgggagacaggcgctcggattctgcctcggaccattccatattcgtaggcgaccttgcctctgacgtcaatgacgccacgctgctggaggccttctccagcaggtactcctctgtcaaaggtgccaaggttgttatcgatgctaacactggtagatccaagggctatggcttcgtgaggtttggagatgacagcgagaagacacaggccatgactgagatgaacggcgtgtattgctcgtctaggcccatgagaattggcccggcaactccgaggaaatcatcaggtacttctggatccaatggttcagctgctcgatcagacggaggagatttgacaaacacaacggtatttgtgggtgggctcgacccaaatgttagcgaagaggaccttaggcaaaccttctcccagtacggagagatttcttctgtaaagattccaattgggaaacagtgcggcttcgtgcagtttgctcagaggaagaacgcagaggacgcattgcaaggattaaatggcagcactattggcaaacaaaacgtgcgtctttcatggggccgcaacccagcaaacaagcagttcagaggcgacaacggcaaccagtggaacaacgggggcatgtactacgcggcgcccccgttctacaacggctacggttaccctgcggcggccccgttccctgatccaggcatgtacgctgctccagcctacggtgcctacccgttctatggcaatcagcagcaagtgagctga

SEQ ID NO: 46656 - protein, 433 aa, Zea mays
MQAAAAAANGAGDVQKPQQQPLVAGAPPPPPPAAVVPPHWVAMPFAPPPGAAAMVMQPHHMAPPPPQFAPTHFVPFHAVAPPRAAAVALGSPAPHQPGQEENKSVWVGDLHYWMDENYLHSCFGYTGEVVAIKVIRNKQTGQSEGYGFVEFYSHAAAEKVLEGFSGHIMPNTDQPFRLNWASFSMGDRRSDSASDHSIFVGDLASDVNDATLLEAFSSRYSSVKGAKVVIDANTGRSKGYGFVRFGDDSEKTQAMTEMNGVYCSSRPMRIGPATPRKSSGTSGSNGSAARSDGGDLTNTTVFVGGLDPNVSEEDLRQTFSQYGEISSVKIPIGKQCGFVQFAQRKNAEDALQGLNGSTIGKQNVRLSWGRNPANKQFRGDNGNQWNNGGMYYAAPPFYNGYGYPAAAPFPDPGMYAAPAYGAYPFYGNQQQVS

SEQ ID NO: 46657 - DNA, 1269 bp, Linum usitatissimum
  CDS (1)..(1269)
atgcagcaccagcggctgaaacagcagcagcagcaggctttgatgcagcaagctctcctccagcagcaacagtctctttaccaccccggcctcctcgctccacctcagattgagccaattcccagcggaaatctgccacctggttttgatcctagcacttgccgcagtgtgtatgttggaaacatccatacacaggttaccgaaccccttctccaagaagtttttgcgagtaccgggcctgtcgagggttgcaagcttataaggaaggaaaagtcatcctatgggtttattcactactttgatcgtaggtcagctgctcttgccatattatctcttaatggaagacacttatttggtcaaccaatcaaagttaactgggcatacgctagtggtcagagggaggatacatcaagtcactttaacatatttgttggagatttaagtccggaagtcactgatgcaacgctgtttgcatgtttttctgtttatcccagttgctctgatgctagagtgatgtgggatcagaagactgggcgctcaagagggtttggtttcgtatctttccgtaaccagcaggatgcccaaagtgccataaatgacctaacagggaagtggcttggtagtaggcagataaggtgcaactgggcagccaagggagctggatccaatgatgacaaacaaagctcagatggcaagagcgtcgtcgaactaactaatggctcgtcagaagacggtaaagagagtattaacaatgatgctcctgagaataatcctcagtacacaactgtctatgttggaaatctcgctccggaggttagccagctcgatctccatcgccacttccattctcttaacgctggagtcatcgaggaggttcgtgttcagcgcgacaagggattcggtttcgtcaggtacagcacccattccgaggctgctttcgctattcaaatggggaacactcagtctcttctttgcgggaaaccaatcaagtgctcatggggaagcaagccgactcctctgggaacgagttcaaacccactcccgcctcccgcagcagcaatgccgatgcacggaggagtctctgcagccgagctgctggcttacgagcgccagctagcgatgagcaagatgggaggggtccacgctttgatgcgtccacaggggcagcatccgatgaaacaaatgggggctgccggagcaagccaggcgatctatgatggtggctaccagaacgtcactgctgcccagcaattcatgtactaccagtaa

SEQ ID NO: 46658 - protein, 422 aa, Linum usitatissimum
MQHQRLKQQQQQALMQQALLQQQQSLYHPGLLAPPQIEPIPSGNLPPGFDPSTCRSVYVGNIHTQVTEPLLQEVFASTGPVEGCKLIRKEKSSYGFIHYFDRRSAALAILSLNGRHLFGQPIKVNWAYASGQREDTSSHFNIFVGDLSPEVTDATLFACFSVYPSCSDARVMWDQKTGRSRGFGFVSFRNQQDAQSAINDLTGKWLGSRQIRCNWAAKGAGSNDDKQSSDGKSVVELTNGSSEDGKESINNDAPENNPQYTTVYVGNLAPEVSQLDLHRHFHSLNAGVIEEVRVQRDKGFGFVRYSTHSEAAFAIQMGNTQSLLCGKPIKCSWGSKPTPLGTSSNPLPPPAAAMPMHGGVSAAELLAYERQLAMSKMGGVHALMRPQGQHPMKQMGAAGASQAIYDGGYQNVTAAQQFMYYQ

SEQ ID NO: 46659 - DNA, 1302 bp, Linum usitatissimum
  CDS (1)..(1302)
atgatgcagcagccaggttccggcggaatcactaatcagccaccgatggccggacagcaattacctcccaacatggctgtcccgccgcaggctcacccacagcagtatcagcagtctccttatatgatgatgatgcctcaggctcctcagtctcagcatcctcctgccgctatgtggaacaaccagcagcctcaggcgatgcctccacagcagcagcagcagcaagctcagcaaggactttccggcggcagtggtgacgagattcgaacgttgtggatcggcgacttgcagtactggatggacgagaactatttggctagctgcttttctcagactggcgaggttgcttctgtgaaagtgattcgcaataagcagagcggacagatggaagggtacgggtttatggagtttaccagccacgctgccgcagagaggatactgcagacatacaatggcaaccctatgcctaatggcgagcagaacttcaggttgaactgggcttcttatggagctggtgagaagcgtgatgatggtcctgagttcaccatatttgtgggggacttagctgcagatgttacggactacattctccaggagacgttcagagtccactatccatctgtgaaaggagctaaagttgtgatcgacaggctaactggacggacaaagggttatgggtttgtgcggttcaatgatgaaggtgaacaaatgcgtgcaatgactgagatgaacggggctttctgttcatctagacctatgcggattggagtagcatcaaacaagaaaacaatggctccaagagcttcgtatcagaattccccaactccaatggataacgagaatgatccaaataatacaactatatttgttggtaatttggattcaaatgttactgataaccatttgagagaactttttagccaatatggccaattggtacatgtgaagataccagccggcaaaagatgtggcttcattcagtatgccaacaggagctgtgctgaggaagcattgaataggttgaatggagccgaggttagcggacaaagtattcggctatcgtggggacgcaattcttcaaacaaacagtcacagtctgaaggtggaaaccagtggaatggtgaagctgccggtggtgccgggtactatgggtatccacaaggttacgagaactacgggtatgtgcaagctccacctgcgcaggacccaaacatgtactatggaggctatcctgctggctacgccaattatcaacaacagccaccccagcaacagcaacagcaactgggttatagaacctga

SEQ ID NO: 46660 - protein, 433 aa, Linum usitatissimum
MMQQPGSGGITNQPPMAGQQLPPNMAVPPQAHPQQYQQSPYMMMMPQAPQSQHPPAAMWNNQQPQAMPPQQQQQQAQQGLSGGSGDEIRTLWIGDLQYWMDENYLASCFSQTGEVASVKVIRNKQSGQMEGYGFMEFTSHAAAERILQTYNGNPMPNGEQNFRLNWASYGAGEKRDDGPEFTIFVGDLAADVTDYILQETFRVHYPSVKGAKVVIDRLTGRTKGYGFVRFNDEGEQMRAMTEMNGAFCSSRPMRIGVASNKKTMAPRASYQNSPTPMDNENDPNNTTIFVGNLDSNVTDNHLRELFSQYGQLVHVKIPAGKRCGFIQYANRSCAEEALNRLNGAEVSGQSIRLSWGRNSSNKQSQSEGGNQWNGEAAGGAGYYGYPQGYENYGYVQAPPAQDPNMYYGGYPAGYANYQQQPPQQQQQQLGYRT

SEQ ID NO: 46661 - DNA, 1260 bp, Zea mays
  CDS (1)..(1260)
atggcgccgcccccgcctccgcaggctgctggcgggcagccaccgcagtggggtgggatcccgccgccgatggcgcagcagtacggcgcaccgcctccgcagcagcctccggcgatgtggggccagcctccgccgcaggcgcactacgggcaggcaccaacccctcagcagtactacgccgcgccgccggtgccggtgcaggcgccagccgcccccgctgcggcggacgaggtcaggacgctctggatcggggacctgcaatactggatggacgagaactacgtcttcgggtgcttttcgaacactggggaggttcaaaatgtgaagctcatccgtgacaagaattcagggcagcttcagggttatggttttgttgagtttacaagccgtgcagctgcagaacgagttcttcagacatacaatggacaaatgatgccaaatgttgacttgacatttcggctgaattgggccagtgctggtgaaaagcgcgatgatactcctgaatatactatttttgttggggatttggctgcagatgttacagattacttgttacaagagacattcagggttcattatccctctgtcaagagtgcaaaagttgtgactgataaattgacaatgcgcacaaagggttatggatttgtgaaatttggtgatcctacagagcaagctcgtgcaatgactgaaatgaatggaatgccttgttcttccaggcctatgcgtattggtcctgcagcaagtaggaaaaatacaggaggtgttgttcaagagagagtaccaaattctcaaggagctcagtctgagaatgatcctaacaataccactatatttgttggtgggcttgaccccaatgtcactgaagataccctaaaacaagttttttctccttacggtgaagtcgtccatgttaagatccctgttgggaagagatgtggttttgttcagttcgttaccagaccttctgctgaacaagcgctgctaatgctgcaaggggccttgattggtgcacagaatgttcgactttcatggggtagaagcctgtcgaacaagcaggctcagcctcagcaggaatccaatcaatggggtgcggctgctggtgctggtggctactatgggggctatggacaaggttatgaggcttatggcagtgggtatgcacaaccccaggatcctaacatgtatggttatggcgcttatggcggttatcccaattaccaacagcaaccagctgcacagcagcaacagcaacaacagtga

SEQ ID NO: 46662 - protein, 419 aa, Zea mays
MAPPPPPQAAGGQPPQWGGIPPPMAQQYGAPPPQQPPAMWGQPPPQAHYGQAPTPQQYYAAPPVPVQAPAAPAAADEVRTLWIGDLQYWMDENYVFGCFSNTGEVQNVKLIRDKNSGQLQGYGFVEFTSRAAAERVLQTYNGQMMPNVDLTFRLNWASAGEKRDDTPEYTIFVGDLAADVTDYLLQETFRVHYPSVKSAKVVTDKLTMRTKGYGFVKFGDPTEQARAMTEMNGMPCSSRPMRIGPAASRKNTGGVVQERVPNSQGAQSENDPNNTTIFVGGLDPNVTEDTLKQVFSPYGEVVHVKIPVGKRCGFVQFVTRPSAEQALLMLQGALIGAQNVRLSWGRSLSNKQAQPQQESNQWGAAAGAGGYYGGYGQGYEAYGSGYAQPQDPNMYGYGAYGGYPNYQQQPAAQQQQQQQ

SEQ ID NO: 46663 - DNA, 1254 bp, Hordeum vulgare
  CDS (1)..(1254)
atgcagatgactgctgctaaaaccgatgtcccggcggcagctgctccgcacccacatccccacgcccatggcccgcaagtaccgcacggtcacgggcacccgcatcctcaccaccacatgccgcagccgcggtgggtggtacttccctacccgccgccgccgcctatggtggccgcgccgccccctcctacgccgcagtatgtgaagcatttcgcgccgcaggcatcggtgactccgcctccgccaccggctggatccggcgggaacggaggtgacgagaaccggacgatctgggtcggcgacctccagtactggatggacgagaactacctccacagctgcttcggccccagcggcgaggtcgtgacgattaaagttatccgcaatagacattctggagtttctgagggttatggttttgtagagttctattcccatgcatcagcagagaaagcacttcagaatttcgctggtcatgtaatgcctaatactgaccgagcttttaagttaaattgggcatcatatagtgttggagaaaaacgctctgaacttgcttctgatcactcaatttttgttggtgatctagctgttgatgttactgatgacatgttgatggaactttttgctaacaaatatcgttctgtgaaaggagctaaagttattattgatgcaaacacgggccgttctaggggatatggatttgttaggtttggagatgatattgacagaactcatgctatgactgaaatgaatggcatgtattgctctactcgaccaattcgcattggacctgcaactcctagaagaacttcaggtgattctggcacctctccaacaacacaatcagatggtgactcaactaacaggacagtatatgttggcgggcttgaccccaatgttagtgaagatgaactaagaaaaacatttgcaaaatatggtgatgttgcttctgtcaaaattcctgttgggaaacaatgcggttttgttcagtttatcaacagagctgatgcggaagaagcattacaagggttgagtggatcaacaattgggaagcaggctgttcgtctttcttggggccgcagtccagcaagcaaacagtctaggggtgattctggccatcgacggaatggcatgtactatggcatgcctttctacggtggatatggctatgcgtcgccagttccacacccaaacgtgtatgctgcggcttatggagcctaccctttctacggtaaccagcaactagtgagctga

SEQ ID NO: 46664 - protein, 417 aa, Hordeum vulgare
MQMTAAKTDVPAAAAPHPHPHAHGPQVPHGHGHPHPHHHMPQPRWVVLPYPPPPPMVAAPPPPTPQYVKHFAPQASVTPPPPPAGSGGNGGDENRTIWVGDLQYWMDENYLHSCFGPSGEVVTIKVIRNRHSGVSEGYGFVEFYSHASAEKALQNFAGHVMPNTDRAFKLNWASYSVGEKRSELASDHSIFVGDLAVDVTDDMLMELFANKYRSVKGAKVIIDANTGRSRGYGFVRFGDDIDRTHAMTEMNGMYCSTRPIRIGPATPRRTSGDSGTSPTTQSDGDSTNRTVYVGGLDPNVSEDELRKTFAKYGDVASVKIPVGKQCGFVQFINRADAEEALQGLSGSTIGKQAVRLSWGRSPASKQSRGDSGHRRNGMYYGMPFYGGYGYASPVPHPNVYAAAYGAYPFYGNQQLVS

SEQ ID NO: 46665 - DNA, 1350 bp, Zea mays
  CDS (1)..(1350)
atgaacggcaccgggggcagccaccaccagcagcagcacaggctccggcagcagcagcagcagcaggcgctcctgatgcagcaggcgctgcagcagcagcagcagcaacatcagtaccagtccggcgtcctcgccgccgcggcagccgcggccatgacccagatggaacctatttccaatggcaatcttccacctggctttgatccttccacttgtcgcagtgtgtatgttggaaacgtgaaccctaatgtcacggagagccttttgattgaagttttccagagtgctggccttgtggaaagatgcaagctcatacggaaagagaagtcatcctttgggtttgtggactactatgatagaaggtctgctgctctagcaatcatgacccttcatggccgtcacatatatggacaagcaatcaaggtgaactgggcatacgcaagtacacagagggaggatacgtcggggcatttccatatttttgttggtgatttaagttctgaagtgaatgatgcaactctttatgcctgtttctcagcatatccttcttgttctgatgctcgagtcatgtgggacaacaaaactggacgttccaggggttatggttttgtctccttccgtaatcaacaggaagctgaaactgctataactgaaatgactggaaaatggcttggaagcagacaaataaggtgcaattgggcaacaaagaccaattcagaagagaaaccagaaactgacaatcataatgcagttgtactaacaaatggtagctccaccaattcagcaacagatgcaagccaggatgcaggaagtaaagagaacccagagaacaatcctgattgtactactgtatatgttggcaaccttggacatgaggttaatcgggatgagcttcaccgccacttctataacttgggggtcggggcaatcgaggaaatccgtgttcaacaggataaggggtttggatttgtgagatatagcacccatggggaagcagcattagctattcagatggccaatggattggtagtccgtgggaaatcaattaagtgctcatggggaaacaagccaactccacctggcaccacctccaagcccctaccccctccagttgcttcataccagcctgctgtagcaatgtcaggtgtcccacaaggtttcacagcagccgaacttcttgcttaccagaggcagcttgccttaagccaggctgcagcagggcagattgctggccagcatggtctcgcgggtcaggtttctgcaggtcttcttgctgctgctggttctcaggccctctacgatggctacccgaaccagtcatcagcccagcagcttatgtactacaactag

SEQ ID NO: 46666 - protein, 449 aa, Zea mays
MNGTGGSHHQQQHRLRQQQQQQALLMQQALQQQQQQHQYQSGVLAAAAAAAMTQMEPISNGNLPPGFDPSTCRSVYVGNVNPNVTESLLIEVFQSAGLVERCKLIRKEKSSFGFVDYYDRRSAALAIMTLHGRHIYGQAIKVNWAYASTQREDTSGHFHIFVGDLSSEVNDATLYACFSAYPSCSDARVMWDNKTGRSRGYGFVSFRNQQEAETAITEMTGKWLGSRQIRCNWATKTNSEEKPETDNHNAVVLTNGSSTNSATDASQDAGSKENPENNPDCTTVYVGNLGHEVNRDELHRHFYNLGVGAIEEIRVQQDKGFGFVRYSTHGEAALAIQMANGLVVRGKSIKCSWGNKPTPPGTTSKPLPPPVASYQPAVAMSGVPQGFTAAELLAYQRQLALSQAAAGQIAGQHGLAGQVSAGLLAAAGSQALYDGYPNQSSAQQLMYYN

SEQ ID NO: 46667 - DNA, 1305 bp, Zea mays
  CDS (1)..(1305)
atgcaggcggcggcggcggcgaatggcgcgggcgacgtgcagaagcctcagcagcagccgctggtggcgggggcgccgcccccaccgccggcggcggccgtggtgccgccccattgggtcgccatgccgttcgcgccgcctcccggggccacggccatggtgatgcagccgcaccatatggcgcctccgccgccgcagttcgcgccgactcacttcgtgccgttccacgccgtcgcgcgggcaccgtcggtgccagcagcggtcgcactgggttccccagcgccgcatcagcccgggcaggaggagaacaagagcgtgtgggtcggcgacctccattactggatggacgagaactatctgcacagctgcttcggctacaccggcgaggttgtggcgatcaaagtaatccgcaacaagcagactgggcagtccgaaggatacgggttcgtcgagttctacagccacgctgcggctgaaaaagttctcgaagggttttctggccatatcatgccgaacaccgaccagcctttcaggctaaactgggcatcgtttagcatgggagacaggcgctcggattctgcctcggaccattccatattcgtaggcgaccttgcctctgacgtcaatgacgccacgctgctggaggccttctccagcaggtactcctctgtcaaaggtgccaaggttgttatcgatgctaacactggtagatccaagggctatggcttcgtgaggtttggagatgacagcgagaagacacaggccatgactgagatgaacggcgtgtattgctcgtctaggcccatgagaattggcccggcaactccgaggaaatcatcaggtacttctggatcgaatggttcagctgctcgatcagacggaggagatttgacaaacacaacggtatttgtgggtgggctcgacccaaatgttagcgaagaggaccttaggcaaaccttctcccagtacggagagatttcttctgtaaagattccaattgggaaacagtgcggcttcgtgcagtttgctcagaggaagaacgcagaggacgcattgcaaggattaaatggcagcactattggcaaacaaaacgtgcgtctttcatggggccgcaacccagcaaacaagcagttcagaggcgacaacggcaaccagtggaacaacgggggcatgtattacgcggcgcccccgttttacaacggctacggttaccctgcggcggccccgttccctgatccaggcatgtacgctgctccagcctacggtgcctacccgttttatggcaatcagcagcaagtgagctga

SEQ ID NO: 46668 - protein, 434 aa, Zea mays
MQAAAAANGAGDVQKPQQQPLVAGAPPPPPAAAVVPPHWVAMPFAPPPGATAMVMQPHHMAPPPPQFAPTHFVPFHAVARAPSVPAAVALGSPAPHQPGQEENKSVWVGDLHYWMDENYLHSCFGYTGEVVAIKVIRNKQTGQSEGYGFVEFYSHAAAEKVLEGFSGHIMPNTDQPFRLNWASFSMGDRRSDSASDHSIFVGDLASDVNDATLLEAFSSRYSSVKGAKVVIDANTGRSKGYGFVRFGDDSEKTQAMTEMNGVYCSSRPMRIGPATPRKSSGTSGSNGSAARSDGGDLTNTTVFVGGLDPNVSEEDLRQTFSQYGEISSVKIPIGKQCGFVQFAQRKNAEDALQGLNGSTIGKQNVRLSWGRNPANKQFRGDNGNQWNNGGMYYAAPPFYNGYGYPAAAPFPDPGMYAAPAYGAYPFYGNQQQVS

SEQ ID NO: 46669 - DNA, 1212 bp, Brassica napus
  CDS (1)..(1212)
atgcagcagccaccacaaaacgccatcggagcagggcagcagatcccatctgaccagcaagcctatcaccagcagcaactctcgtggatgatgcaacagcaacagcaacagggccagcaatggaacctgcagcagcagcagtcagcgccgtcacagggtcaacagccctacggagtcggatctcagaatccaggatccgataacgagattcgctccttgtggatcggcgccctgcagccgtggatggacgaaaactacatcatgaccgtcttcgctcagaccggcgaggttcaatcggctaaagtgattcgcaacaaactgactggtatgtgcgagggttacggattcgttgagttcgccaaccacgctgcagctgagcgtgtgttgcagacctacaacggtactcagatgcccaactctgaccagaccttcaggctgaactgggctcaggccggggctggtgagagacgccaagctgaagggcctgagtacactatctttgtgggcgacctggctccggaagtcactgacttcatgctcgcggagacgttttcgagcgtgtacgcgtctgtcaagggggcgaaagttatgatggacaggagcactggacggacgaagggttatgggtttgttaggtttggggatgaaagtgagcagatgcgtgcgatgggggaaatgaatggtcagtactgctcgagtaggcctatgcgtcttggtcccgctgccaacaagaagccgcttgcaatgcagccaggcatgtatcaggacacccaaggaggaggaaatcctggagaaagcgatccaagtaacacaactatatttgttggtgctctggatgctagcgttacagacgaagaattgagggcagtttttggtcaatttggagaacttactcacgtgaaaatacctccggggaagcgttgtggattcgttcagtatgccaccagggcgtctgcggagcatgcacttttaaatctgaatggaacacaattaggtggacaaagcatccgtctttcatggggacgtagtccgaacaaccaggcacagcctcatcaagctcaatggaatggtggtggtggatactatggataccctccacagccgcagggctttgaaccatatggtcatggagctcctcgtcctcaggatcctagtgcgtactatggtggcggttacggtggctatggcaactatcagcagcaacggcagtga

SEQ ID NO: 46670 - protein, 403 aa, Brassica napus
MQQPPQNAIGAGQQIPSDQQAYHQQQLSWMMQQQQQQGQQWNLQQQQSAPSQGQQPYGVGSQNPGSDNEIRSLWIGALQPWMDENYIMTVFAQTGEVQSAKVIRNKLTGMCEGYGFVEFANHAAAERVLQTYNGTQMPNSDQTFRLNWAQAGAGERRQAEGPEYTIFVGDLAPEVTDFMLAETFSSVYASVKGAKVMMDRSTGRTKGYGFVRFGDESEQMRAMGEMNGQYCSSRPMRLGPAANKKPLAMQPGMYQDTQGGGNPGESDPSNTTIFVGALDASVTDEELRAVFGQFGELTHVKIPPGKRCGFVQYATRASAEHALLNLNGTQLGGQSIRLSWGRSPNNQAQPHQAQWNGGGGYYGYPPQPQGFEPYGHGAPRPQDPSAYYGGGYGGYGNYQQQRQ

SEQ ID NO: 46671 - DNA, 1191 bp, Brassica napus
  CDS (1)..(1191)
atgcagcagccaccacaaaacgccgccggagcagggcagcagatcccttctgaccagcaagcctatcaccagcagaaactctcgtggatgatgcaacagcaacagggccagcaatggaaccagcagtcagcgccgtcacagggtcaacagccctacggatctcagaatccaggatccgataacgagattcgctccttgtggatcggcgccttgcagccgtggatggacgaaagctacatcatgaccgtcttcgctcaggccggcgaggttcaatcggctaaagtgattcgcaataaactgactggtatgtgcgagggttacggattcgttgagtttgctaaccacgctgcagctgagcgtgtgttgcagacctacaacggtactcagatgcctaactctgaccagaccttcaggctgaactgggctcaggccggggctggtgagagacgccaagctgaagggcctgagtacactatctttgtgggcgacctggctccggaagtcactgacttcatgctcgcggagacgttttcgagcgtgtacgcgtctgtcaagggggcgaaagttatgatggacaggagcactggacggacgaagggttatgggtttgttaggtttggggatgaaagtgagcagatgcgtgcgatgggggaaatgaatggtcagtactgctcgagtaggcctatgcgtcttggtcccgctgccaacaagaagccgcttgcaatgcagccaggcatgtatcaggacacccaaggaggaggaaatcctggagaaagcgatccaagtaacacaactatatttgttggtgctctggatgctagcgttacagacgaagaattgagggcagtttttggtcaatttggagaacttactcacgtgaaaatacctccggggaagcgttgtggattcgttcagtatgccaccagggcgtctgcggagcatgcacttttaaatctgaatggaacacaattaggtggacaaagcatccgtctttcatggggacgtagtccgaacaaccaggcacagcctcatcaagctcaatggaatggtggtggtggatactatggataccctccacagccgcagggctttgaaccatatggtcatggagctcctcgtcctcaggatcctagtgcgtactatggtggcggttacggtggctatggcaactatcagcagcaacggcagtga

SEQ ID NO: 46672 - protein, 396 aa, Brassica napus
MQQPPQNAAGAGQQIPSDQQAYHQQKLSWMMQQQQGQQWNQQSAPSQGQQPYGSQNPGSDNEIRSLWIGALQPWMDESYIMTVFAQAGEVQSAKVIRNKLTGMCEGYGFVEFANHAAAERVLQTYNGTQMPNSDQTFRLNWAQAGAGERRQAEGPEYTIFVGDLAPEVTDFMLAETFSSVYASVKGAKVMMDRSTGRTKGYGFVRFGDESEQMRAMGEMNGQYCSSRPMRLGPAANKKPLAMQPGMYQDTQGGGNPGESDPSNTTIFVGALDASVTDEELRAVFGQFGELTHVKIPPGKRCGFVQYATRASAEHALLNLNGTQLGGQSIRLSWGRSPNNQAQPHQAQWNGGGGYYGYPPQPQGFEPYGHGAPRPQDPSAYYGGGYGGYGNYQQQRQ

SEQ ID NO: 46673 - DNA, 1278 bp, Brassica napus
  CDS (1)..(1278)
atgcagaatccgaggctcaaacaacagcaacaacaacaacaacaacaacaacaagctatgatgcagcaagctttgatgcaacaacaccactctctctatcatcctagccttatggctcctcctccccctcctcctcagatggagcctctaccaagtggaaaccttcctcctggtttcgatcccactacttgccgcagtgtgtatgctggcaacattcacacgcaggtcactgaggttcttcttcaagaaatttttgctagcaccggccctgttgagagctgtaagctcatcagaaaggataagtcatcatatggatttgttcactactttgatcgaagatctgctggtttggctatcatgtctcttaacggcaggcatctgtttggacagcctatcaaagttaattgggcttatgctactggtcaaagggaagacacatcaagccacttcaacatatttgtcggagacctcagtccagatgttactgatgcagctttgtttgagagcttctctgccttcaatacttgctcggatgcaagagtaatgtgggaccagaaaactggacgctcgagaggctttgggtttgtttccttccgcaatcagcaggatgctcaaaatgccataaatgaaatgaatggtaaatggttaagtagcagacaaatcagatgcaactgggcgacaaaaggtgctacttttggcgacgacaaacatagctctgatggcaaaagtgtcgttgaactcacaaacggctcagaggatggtagagagatctcaatcacaaacgaagaagctcctgaaaacaatcctcagtataccactgtgtatgtaggaaaccttgctcctgaagtaactcagcttgatctacaccgcctgttccatacacttggcgctggagtgattgaagaggtccgtgtccagcgagacaaaggctttggttttgtgagatacaatactcatgacgaggctgctcttgctattcagatgggcaactctcagcctttcctcttcaacagacagataaagtgttcatggggaaacaaaccaactccaataggcacagcctcaaacccgcttccaccaccagcgccagtggcagtccctggtctgtccccaatggacctcttagcctatgagaggcaactggctctagccaagatgcatcctcaggctcagcattctcttaggcatgccaatgcagccggagcaagtgctgctatgtacgatggtggttttcagaatgtagctgcggctcatcagcagctcatgtactatcagtaa

SEQ ID NO: 46674 - protein, 425 aa, Brassica napus
MQNPRLKQQQQQQQQQQQAMMQQALMQQHHSLYHPSLMAPPPPPPQMEPLPSGNLPPGFDPTTCRSVYAGNIHTQVTEVLLQEIFASTGPVESCKLIRKDKSSYGFVHYFDRRSAGLAIMSLNGRHLFGQPIKVNWAYATGQREDTSSHFNIFVGDLSPDVTDAALFESFSAFNTCSDARVMWDQKTGRSRGFGFVSFRNQQDAQNAINEMNGKWLSSRQIRCNWATKGATFGDDKHSSDGKSVVELTNGSEDGREISITNEEAPENNPQYTTVYVGNLAPEVTQLDLHRLFHTLGAGVIEEVRVQRDKGFGFVRYNTHDEAALAIQMGNSQPFLFNRQIKCSWGNKPTPIGTASNPLPPPAPVAVPGLSPMDLLAYERQLALAKMHPQAQHSLRHANAAGASAAMYDGGFQNVAAAHQQLMYYQ

SEQ ID NO: 46675 - DNA, 1263 bp, Brassica napus
  CDS (1)..(1263)
atgcagaatccgaggctcaaacaacagcagcaacagcaacaagctatgatgcagcaagcgttgatgcaacaacaccactctctctatcatcctagccttatggctcctcctccccctcctcagatggagcctctaccaagtggaaaccttcctcctggttttgatcccactacttgccgcagtgtgtatgctggcaacattcacacgcaggtcactgaggttcttcttcaagagatttttgctagcaccggtcctgttgagagctgtaagctcatcagaaaggataagtcatcatatggatttgttcactactttgatcgaagatctgctggtttggctatcatgtctcttaacggaaggcatctgtttggacagcctatcaaagttaactgggcgtatgctactggtcaaagggaagacacatcaagccatttcaacatttttgttggagatctcagtccagatgttactgatgcagctttgtttgagagcttctctgccttcaacacttgctcggatgcaagagtaatgtgggaccagaaaactggacgctcgagaggctttgggtttgtttccttccgcaatcagcaggatgctcaaaatgccataaatgaaatgaatggtaaatggttaagtagcagacaaatcagatgcaactgggcgacaaaaggtgctacttttggggaggacaaacatagctctgatggcaaaagtgtcgttgaactcacaaacggctcagaggatggtagagagatctcaatcacaaacgaagaagctcctgaaaacaatcctcagtataccactgtgtatgtaggaaacctcgctcctgaagtaactcagcttgatctacaccgcctgttccatacacttggcgctggagtgattgaagaggtccgtgtccagcgagacaaaggctttggttttgtgagatacaacactcatgacgaggctgctcttgctattcagatgggcaactctcagcctttcctcttcaacagacagataaagtgttcatggggaaacaaaccaactccaataggcacagcctcaaacccgcttccaccaccagcgccagtggcagtccctggtctgtccccaatggacctcttagcctatgagaggcaactggctttagctaagatgcatcctcaggctcagcattctctaaggcatgtcaatgcagctggagcaagtgctgctatgtatgatggtggttttcagaatgtagctgcggcgcatcagcagctcatgtactatcagtaa

SEQ ID NO: 46676 - protein, 420 aa, Brassica napus
MQNPRLKQQQQQQQAMMQQALMQQHHSLYHPSLMAPPPPPQMEPLPSGNLPPGFDPTTCRSVYAGNIHTQVTEVLLQEIFASTGPVESCKLIRKDKSSYGFVHYFDRRSAGLAIMSLNGRHLFGQPIKVNWAYATGQREDTSSHFNIFVGDLSPDVTDAALFESFSAFNTCSDARVMWDQKTGRSRGFGFVSFRNQQDAQNAINEMNGKWLSSRQIRCNWATKGATFGEDKHSSDGKSVVELTNGSEDGREISITNEEAPENNPQYTTVYVGNLAPEVTQLDLHRLFHTLGAGVIEEVRVQRDKGFGFVRYNTHDEAALAIQMGNSQPFLFNRQIKCSWGNKPTPIGTASNPLPPPAPVAVPGLSPMDLLAYERQLALAKMHPQAQHSLRHVNAAGASAAMYDGGFQNVAAAHQQLMYYQ

SEQ ID NO: 46677 - DNA, 1260 bp, Brassica napus
  CDS (1)..(1260)
atgcagaaccagaggctgaaacagcaacaacaacaagcaatgatgcagcaagcgatgatgcaacagcagcatcactctctctatcatcctagtcttatggctcctcctcctcctcctcagatggagcctctgccaagtggaaaccttcctcctggttttgatcccagcacttgccgtagtgtgtatgcaggcaacatccatacgcaggtcactgaggttcttcttcaagagatttttgctagcaccggccctgttgaaagctgtaagctcatcagaaaggataagtcatcatatggatttgttcactactttgatcggagatctgctggtttggctatcatgtctcttaacggaaggcatctgtttggacagcctatcaaagttaattgggcgtatgccactggtcaaagggaagacacatcaagccatttcaacatttttgttggagatctcagtccagaggttactgatgcagcactgtttgagagcttctctgccttcaacacttgctcggatgcaagagtgatgtgggatcagaaaactggacgctcaagaggctttgggtttgtttccttccgcaatcagcaggatgctcaaactgccataaatgaaatgaatggtaaatggttaagtagcagacaaatcagatgcaactgggcgacaaaaggtgctacttttggcgacgacaaacatagctctgatggcaaaagtgtcgttgaactcacaaacggctcagaggatggtagagagatctcaatcacaaacgaagaagcgcctgaaaacaatcctcagtataccactgtctatgtaggaaacctcgctcctgaagtaactcagcttgatctacaccgcctgttccatacacttggcgctggagtgattgaagaggtccgtgtccagcgagacaagggctttggttttgtgagatataacactcatgacgaggctgctcttgctattcaaatgggcaactctcagcctttcctctttagcagacccataaagtgctcatggggaaacaaaccaactccaacaggaacaccctcaaacccacttcccccaccagcgccggttccagtccctggtctatccccaatggacctcttagcctatgagaggcaactggctctagccaagatgcatcctcaggctcagcattctctaaggcatgcaaatgcagccggagcaagtgcagctatgtacgatggtggttttcagaatgtagctgcggcgcatcagcagctcatgtactatcagtaa

SEQ ID NO: 46678 - protein, 419 aa, Brassica napus
MQNQRLKQQQQQAMMQQAMMQQQHHSLYHPSLMAPPPPPQMEPLPSGNLPPGFDPSTCRSVYAGNIHTQVTEVLLQEIFASTGPVESCKLIRKDKSSYGFVHYFDRRSAGLAIMSLNGRHLFGQPIKVNWAYATGQREDTSSHFNIFVGDLSPEVTDAALFESFSAFNTCSDARVMWDQKTGRSRGFGFVSFRNQQDAQTAINEMNGKWLSSRQIRCNWATKGATFGDDKHSSDGKSVVELTNGSEDGREISITNEEAPENNPQYTTVYVGNLAPEVTQLDLHRLFHTLGAGVIEEVRVQRDKGFGFVRYNTHDEAALAIQMGNSQPFLFSRPIKCSWGNKPTPTGTPSNPLPPPAPVPVPGLSPMDLLAYERQLALAKMHPQAQHSLRHANAAGASAAMYDGGFQNVAAAHQQLMYYQ

SEQ ID NO: 46679 - DNA, 1290 bp, Brassica napus
  CDS (1)..(1290)
atgcagacgacaaacaacggtccagattcgtcatcagccgcaacaaccccaccgttgcagcaaaccactccgccaccaccgcagcaacaacaacagtggcaacaacagcaacaatggatggcgatgatgcagcaccctgcggctatggcgatgatgcagcagcaacagatgatgatgtatcctcaccagtacgctccctacggccaaggtcactaccagcatcctcagtttcaatacgctgcgtatcagcaacagcagcagcagaatcaccagcagcgtggtggatctggtggagatgatgtaaagactctatgggttggggatcttcttcactggatggacgagacttatctccacacatgtttctctcacaccaacgaggtttcatctgtgaaagtcataagaaacaagcaaacgaatcaatcagaagggtacggttttgtcgagttcctttcacgttcagcagctgaagaagtccttcagagctacagcggcgtaaccatgcccaacgcagagcagcccttccgtctaaactgggcgtctttcagcaccggtgaaaagagagcatcagaaaacggtggtcctgacctgtcgatattcgcaggagacttggctccagacgtcactgatgctacactgctcgagactttcgctgggtatcaatctgtcaaaggtgcaaaagttgtgatcgattccaacactgggcggtccaaaggctacggctttgtcaggtttggtgatgagagcgaaaggtcaagggcgttgactgagatgaatggtgctttctgctcaagcaggcagatgcgtgttggtattgctactcctaaaagagcatctgcttatggccaacaaaatggttcacaagctctgacattagctggtggacatggagcgaatggttcagtgtctgatggagactcaaataactcaacaatattcgttggcggcattgatgctgatgtcactgaagacgacctcatgcaacctttctcccagtttggggaggttgtttctgtgaagatccctgtaggaaaaggatgcggttttgtccaatttggtaacaggcagagtgccgaggaagccatcggcagcttgaacgggacagtcattgggaaaaacactgtccggctatcttggggaagaagcccaaacagacagtggagaggacactcggcccaccaatggaacggagggtactcaagaggacaaggttacaacaacaacggatatgccaaccaggagtcaaacatgtatgctactgaagctgctgctgtccctggagcttcttaa

SEQ ID NO: 46680 - protein, 429 aa, Brassica napus
MQTTNNGPDSSSAATTPPLQQTTPPPPQQQQQWQQQQQWMAMMQHPAAMAMMQQQQMMMYPHQYAPYGQGHYQHPQFQYAAYQQQQQQNHQQRGGSGGDDVKTLWVGDLLHWMDETYLHTCFSHTNEVSSVKVIRNKQTNQSEGYGFVEFLSRSAAEEVLQSYSGVTMPNAEQPFRLNWASFSTGEKRASENGGPDLSIFAGDLAPDVTDATLLETFAGYQSVKGAKVVIDSNTGRSKGYGFVRFGDESERSRALTEMNGAFCSSRQMRVGIATPKRASAYGQQNGSQALTLAGGHGANGSVSDGDSNNSTIFVGGIDADVTEDDLMQPFSQFGEVVSVKIPVGKGCGFVQFGNRQSAEEAIGSLNGTVIGKNTVRLSWGRSPNRQWRGHSAHQWNGGYSRGQGYNNNGYANQESNMYATEAAAVPGAS

SEQ ID NO: 46681 - DNA, 1239 bp, Brassica napus
  CDS (1)..(1239)
atgatgcagcagccacctccagccgctaacggtgctgctgcagcaggatcagggcgggaccagcaagcttaccaccaccagcagtggatgatgatgcagcagcagcagcaacagggtcagcctccggcaggatggaatcctcagtcgtcgccgtctcttggtcaacagcagcagtatggcggtggatctcagaatccaggatcaggtggagagatccggtccttgtggatcggagacctccagccatggatggacgagagctacctcaggaacatcttctctacactcactggtgaggttcaacaagctaaagtcattcggaataaacagagcggatactctgaaggttatgggtttattgagtttgttagccacgctgcagccgagaggatcttgcagacttacaatggtgctcaaatgccggggtgtgagcagacgttcaggctgaactgggctcagcttggagctggagagagacgccaggctgacgggcctgagcacacagtttttgttggagatctggcacctgatgttaccgactatatgctcactgagacgtttaaggctgtgtattcatctgtcaagggcgctaaagttgtgactgataggaccactggacggtccaaggggtacggatttgtcaagtttggggatgaaagtgagcagattagggcaatgactgagatgaatggtcaatactgctcgtccaggcctatgcgtactggtccagctgctaacaagaagcctcttacaatgcaacaacaaccaggtgcatatcagaacactcaaggaaatcccggagaaggtgatccaactaacacaacgatttttgttggagctttggatgaaagtgtgacagaagatgttttgaagtcagtttttggtcaatttggtgaacttgttcatgtgaaaataccagcaggaaaacgttgcggatttgttcaatatgctaatagggcatgtgcagagcaagcactcaactcgttgaatggaacacaacttggcggacaaagcattcgtctttcatggggtcgcactccttccaacaagcagactcagcctgatcaagcacagtacggtggtggtggtggatactatgggtatcctcctcagggatacgaaggttacggatatgcacctcctcctcaggaccctaacgcctactatggtggctaccctggtgccggctatggaaactaccagcagcctggtggtggctaccagcagcaacagcagtga

SEQ ID NO: 46682 - protein, 412 aa, Brassica napus
MMQQPPPAANGAAAAGSGRDQQAYHHQQWMMMQQQQQQGQPPAGWNPQSSPSLGQQQQYGGGSQNPGSGGEIRSLWIGDLQPWMDESYLRNIFSTLTGEVQQAKVIRNKQSGYSEGYGFIEFVSHAAAERILQTYNGAQMPGCEQTFRLNWAQLGAGERRQADGPEHTVFVGDLAPDVTDYMLTETFKAVYSSVKGAKVVTDRTTGRSKGYGFVKFGDESEQIRAMTEMNGQYCSSRPMRTGPAANKKPLTMQQQPGAYQNTQGNPGEGDPTNTTIFVGALDESVTEDVLKSVFGQFGELVHVKIPAGKRCGFVQYANRACAEQALNSLNGTQLGGQSIRLSWGRTPSNKQTQPDQAQYGGGGGYYGYPPQGYEGYGYAPPPQDPNAYYGGYPGAGYGNYQQPGGGYQQQQQ

SEQ ID NO: 46683 - DNA, 1275 bp, Brassica napus
  CDS (1)..(1275)
atgcagacaaccaacggctcagattcgacgtcagccacgcctccggctaaccaaacgactcctccgccgcctcagcagtggcagcagcatcaacagtggatgatgcagtatccaggcgcggcggcgatgatgatgatgcaacatcagcagcagcatatgatgatgtatcctcaccaataccttccttacaatcacggtggtcattatcaccaccaccctcctcacctccaatacgcaccgtatcatcagcaacaccataaccaccaccaaaagacacatgagcgtggtggatctggagaagacgtcaagactctatgggttggtgaccttcttcattggatggacgagacttatctccacacctgcttttctcacaccggcgaggtttcttctgtgaaagttattcgtaacaagcaaacatgtcaatcagaagggtatggttttgttgagtttcttacacgtgctgcagctgaagaggttcttcagacctttaacggttcagtgatgccaaactctgagcagctcttccgtctaaactgggcatctttcagcactggtgagaagagagcagtagagaatggtccggagctgtcgatattcgttggagatttgtctccggatgtgactgatactatgttgcaagagttgtttgctgagagatatccatctgtcaaaagcgctaaagttgtgatcgattccaacaccggccggtccaaaggttacggttttgttaggttcggtgatgagagtgagagatcaagggctttgagtgagatgaatggagctttgtgttccaacaggcagatgagagttggtgttgcgactcctaaaagagctgttgctaatcagcaacaacattcttcacaagctgtgatagtggctggtggacatggagcaaatggtttcactgctcatgggtcacagtctgatggtgattcaaacaactcaacaatattcgttggcggacttgaccctgatgttactgaagaagacctcagagaaccttttatacaatttggcgaggttgtttcagtgaagatcccactaggcaaaggatgtgggtttgtccaactttctaacaggaagagtgctgatgatgcgatccagagtttgaacgggacagtcatcggcaagaacactgtcaggctctcttggggaagaaccccgaacaagcagtggagaggagacaatggaggatactcgcgaggacaaggttacaacaacggaggctacgctaaccaccacgactccaacacctatcctgccgagacttga

SEQ ID NO: 46684 - protein, 424 aa, Brassica napus
MQTTNGSDSTSATPPANQTTPPPPQQWQQHQQWMMQYPGAAAMMMMQHQQQHMMMYPHQYLPYNHGGHYHHHPPHLQYAPYHQQHHNHHQKTHERGGSGEDVKTLWVGDLLHWMDETYLHTCFSHTGEVSSVKVIRNKQTCQSEGYGFVEFLTRAAAEEVLQTFNGSVMPNSEQLFRLNWASFSTGEKRAVENGPELSIFVGDLSPDVTDTMLQELFAERYPSVKSAKVVIDSNTGRSKGYGFVRFGDESERSRALSEMNGALCSNRQMRVGVATPKRAVANQQQHSSQAVIVAGGHGANGFTAHGSQSDGDSNNSTIFVGGLDPDVTEEDLREPFIQFGEVVSVKIPLGKGCGFVQLSNRKSADDAIQSLNGTVIGKNTVRLSWGRTPNKQWRGDNGGYSRGQGYNNGGYANHHDSNTYPAET

SEQ ID NO: 46685 - DNA, 1260 bp, Brassica napus
  CDS (1)..(1260)
atggctgacacgaaggtccaatccccggaaacaacggcggttgaggataaccaccaacgaataacatcatcatctccaacgccgccgccgccgccatctcactggatggggatgagatacccttcgccgatgatgatgcctcaccatatgatgtacccgccgcctccttactctccttaccaccaccataatcatatgtatcatcataatcatcatcaccagtctcgtggtaacaaacaccaaaacgcttcgaacgctgagaataagacgatttggatcggtgatttgcttcactggatggatgagaattaccttaattcttgctttgctcccgctggagagatggcgtcagttaaggttatcaggaacaagcacactggtttgtctgagggctatggattcgtggaattcgattcccacgatgtcgccgagaaggttttgcaggattttaacggagtaactatgttacagtccgaccagccttaccgtttaaactgggccagtttcagcaccggcgaaaaacgcttagagaatggtcctgaccactctatattcgtgggcgacttggcgccagaagtcactgatgaactgttgcataaactgttctttgataaatacccatctgtcaagactgcgaaagtcgtcatagatggcactactggtcggtcaaagggttatggctttgtgaggtttggagatgatggcgagaggagcaaagctttggtggagatgaatggtgtgaaatgctgtagcagggctatgagagtcggtgctgctactcctaggaagccaaatggttaccagcaccaaggtggtggagctgctccacgtgatggggactcattgaacacaacaatatttgttggaggacttgacgctgatgtcactgacgaagttcttagacagccttttgctggttttggtgaaatagtatctgtcaagataccagttgggaaaggatgtggattcattcagtttgtcaacagagaaaacgcagaggaggctttggagaaactaaatggttctgtaattggaaaacaaaccgttcgcctttcctggggtcgtaatcaaggcaacaaacagcctcgaggtgggtatggagaccaatgggttgaaccgttctatagaggacaatactacaatggttatggatacatgccattaccaccacctattgacccgagaatgtatggtgctgcaccttatggaggttatcctatgtacggtggtcatcagcagcagcagcaacaagtaagctga

SEQ ID NO: 46686 - protein, 419 aa, Brassica napus
MADTKVQSPETTAVEDNHQRITSSSPTPPPPPSHWMGMRYPSPMMMPHHMMYPPPPYSPYHHHNHMYHHNHHHQSRGNKHQNASNAENKTIWIGDLLHWMDENYLNSCFAPAGEMASVKVIRNKHTGLSEGYGFVEFDSHDVAEKVLQDFNGVTMLQSDQPYRLNWASFSTGEKRLENGPDHSIFVGDLAPEVTDELLHKLFFDKYPSVKTAKVVIDGTTGRSKGYGFVRFGDDGERSKALVEMNGVKCCSRAMRVGAATPRKPNGYQHQGGGAAPRDGDSLNTTIFVGGLDADVTDEVLRQPFAGFGEIVSVKIPVGKGCGFIQFVNRENAEEALEKLNGSVIGKQTVRLSWGRNQGNKQPRGGYGDQWVEPFYRGQYYNGYGYMPLPPPIDPRMYGAAPYGGYPMYGGHQQQQQQVS

SEQ ID NO: 46687 - DNA, 1239 bp, Brassica napus
  CDS (1)..(1239)
atgatgcagcagccacctccagccgctaacggtgctgctgcagcaggatcagggcgggaccagcaagcttaccaccaccagcagtggatgatgatgcagcagcagcagcaacagggtcagcctccggcaggatggaatcctcagtcgtcgccgtctcttggtcaacagcagcagtatggcggtggatctcagaatccaggatcaggtggagagatccggtccttgtggatcggagacctccagccatggatggacgagagctacctcaggaacatcttctctacactcactggtgaggttcaacaagctaaagtcattcggaataaacagagcggatactctgaaggttatgggtttattgagtttgttagccacgctgcagccgagaggatcttgcagacttacaatggtgctcaaatgccggggtgtgagcagacgttcaggctgaactgggctcagcttggagctggagagagacgccaggctgacgggcctgagcacacagtttttgttggagatctggcacctgatgttaccgactatatgcttactgagacgtttaaggctgtgtattcctctgtcaagggcgctaaagttgtgactgataggaccactggacggtccaaggggtacggatttgtcaagtttggggatgaaagtgagcagattagggcaatgactgagatgaatggtcaatactgctcgtccaggcctatgcgtactggtccagctgctaacaagaagcctcttacaatgcaacaacaaccaggtgcatatcagaacactcaaggaaatcccggagaaggtgatccaactaacacaacgatttttgttggagctttggatgaaagtgtgacagaagatgttttgaagtcagtttttggtcaatttggtgaacttgttcatgtgaaaataccagcaggaaaacgttgcggatttgttcaatatgctaataggggatgtgcagagcaagcactcaactcgttgaatggaacacaacttggcggacaaagcattcgtctttcatggggtcgcactccttccaacaagcagactcagcctgatcaagcacagtacggtggtggtggtggatactatgggtatcctcctcagggatacgaaggttacggatatgcgcctcctcctcaggaccctaacgcctactatggtggctaccctggtaccggctatggaaactaccagcagcctggtggtggctaccagcagcaacagcagtga

SEQ ID NO: 46688 - protein, 412 aa, Brassica napus
MMQQPPPAANGAAAAGSGRDQQAYHHQQWMMMQQQQQQGQPPAGWNPQSSPSLGQQQQYGGGSQNPGSGGEIRSLWIGDLQPWMDESYLRNIFSTLTGEVQQAKVIRNKQSGYSEGYGFIEFVSHAAAERILQTYNGAQMPGCEQTFRLNWAQLGAGERRQADGPEHTVFVGDLAPDVTDYMLTETFKAVYSSVKGAKVVTDRTTGRSKGYGFVKFGDESEQIRAMTEMNGQYCSSRPMRTGPAANKKPLTMQQQPGAYQNTQGNPGEGDPTNTTIFVGALDESVTEDVLKSVFGQFGELVHVKIPAGKRCGFVQYANRGCAEQALNSLNGTQLGGQSIRLSWGRTPSNKQTQPDQAQYGGGGGYYGYPPQGYEGYGYAPPPQDPNAYYGGYPGTGYGNYQQPGGGYQQQQQ

SEQ ID NO: 46689 - DNA, 1266 bp, Brassica napus
  CDS (1)..(1266)
atgcagaatccgaggctcaaacaacagcagcaacagcaacaacaagctatgatgcagcaagcgttgatgcaacaacaccactctctctatcatcctagccttatggctcctcctccccctcctcagatggagcctctaccaagtggaaaccttccccctggttttgatcccactacttgccgcagtgtgtatgctggcaacattcacacgcaggtcactgaggttcttcttcaagagatttttgctagcaccggccctgttgagagctgtaaactcatcagaaaggataagtcatcatatggatttgttcactactttgatcgaagatctgctggtttggctatcatgtctcttaacggaaggcatctgtttggacagcctatcaaagttaactgggcgtatgctactggtcaaagggaagacacatcaagccacttcaacatatttgtcggagacctcagtccagatgttactgatgcagctttgtttgagagcttctctgccttcaatacttgctcggatgcaagagtaatgtgggaccagaaaactggacgctcgagaggctttgggtttgtttccttccgcaatcagcaggatgctcaaaatgccataaatgaaatgaatggtaaatggttaagtagcagacaaatcagatgcaactgggcgacaaaaggtgctacttttggcgaggacaaacatagctctgatggcaaaagtgtcgttgaactcacaaacggctcagaggatggtagagagatctcaatcacaaacgaagaagctcctgaaaacaatcctcagtataccactgtgtatgtaggaaaccttgctcctgaagtaactcagcttgatctacaccgcctgttccatacacttggcgctggagtgattgaagaggtccgtgtccagcgagacaaaggctttggttttgtgagatacaacactcatgacgaggctgctcttgctattcagatgggcaactctcagcctttcctcttcaacagacagataaagtgttcatggggaaacaaaccaactccaataggcacagcctcaaacccgcttccaccaccagcgccagtggcagtccctggtctgtccccaatggacctcttagcctatgagaggcaactggctttagctaagatgcatcctcaggctcagcattctctaaggcatgtcaatgcagctggagcaagtgctgctatgtatgatggtggttttcagaatgtagctgcggcgcatcagcagctcatgtactatcagtaa

SEQ ID NO: 46690 - protein, 421 aa, Brassica napus
MQNPRLKQQQQQQQQAMMQQALMQQHHSLYHPSLMAPPPPPQMEPLPSGNLPPGFDPTTCRSVYAGNIHTQVTEVLLQEIFASTGPVESCKLIRKDKSSYGFVHYFDRRSAGLAIMSLNGRHLFGQPIKVNWAYATGQREDTSSHFNIFVGDLSPDVTDAALFESFSAFNTCSDARVMWDQKTGRSRGFGFVSFRNQQDAQNAINEMNGKWLSSRQIRCNWATKGATFGEDKHSSDGKSVVELTNGSEDGREISITNEEAPENNPQYTTVYVGNLAPEVTQLDLHRLFHTLGAGVIEEVRVQRDKGFGFVRYNTHDEAALAIQMGNSQPFLFNRQIKCSWGNKPTPIGTASNPLPPPAPVAVPGLSPMDLLAYERQLALAKMHPQAQHSLRHVNAAGASAAMYDGGFQNVAAAHQQLMYYQ

SEQ ID NO: 46691 - DNA, 1257 bp, Brassica napus
  CDS (1)..(1257)
atgcagagattgaagcagcagcagcaacaacaagcgatgatgcagcaagctttgatgcagcaacagtctctctaccatcccggactcctcaccgctcctcagatagaaccaatcccaagtggaaatcttccccctggttttgatccaacttcttgccgcagtgtgtacgttggaaatgtccatattcaggtgacggaacctctgctccaagaggtttttgccagcactggtcctgtggaaagctgtaagcttattaggaaagaacagtcttcctatggttttgtccactactttgatcgacgatcagctggtctggctatcctctctctcaatggaaggcatttgtttgggcaacctatcaaagtgaactgggcttatgctagtggccagagggaggatacatcagctcactttaatatatttgttggagatttgagcccggaggttactgatgcaatgctgtttagttgcttctctgtctacccaagttgctcggatgcaagggttatgtgggatcagaaaactgggcgttcaagaggatttggttttgtttctttccgaaaccagcaggatgcccagactgcaatagatgaagcaggcgggaaatggcttggtaccaggcagattcgctgcaactgggcaacgaaaggagccacttctggtgaggacaagatgagctctgattccaaaagtgttgtggaactaaccagtggtgtctccgaggatggcaaagatgcaagtaacggtgatgctccagagaataatgctcagtacacaactgtctacgttgggaatcttggtccagaggtttctcaggttgatcttcaccgccacttctattctcttggcgctggagttattgaggaggttcgtattcaaagagacaaaggttttggatttgtaagatactctactcatgtagaggctgccctcgctatccagctgggaaacacacattcctacctcggtggcaggcagatgaagtgttcttggggaagcaagccaactccaccaggaacagcatcgaacccgcttcctccaccaggtcccgcaccaatccctggattctcagccagcgacctcttggcttacgagaggcaactagccatgagcaagatggctggaatgaatccgatgatgcatcacccgcagggacaacacgctctcaagcaagctgcgatgggggccactggttcaaaccaggccatctatgacggtggtttccagaacgcgcagcagctcatgtattaccagtga

SEQ ID NO: 46692 - protein, 418 aa, Brassica napus
MQRLKQQQQQQAMMQQALMQQQSLYHPGLLTAPQIEPIPSGNLPPGFDPTSCRSVYVGNVHIQVTEPLLQEVFASTGPVESCKLIRKEQSSYGFVHYFDRRSAGLAILSLNGRHLFGQPIKVNWAYASGQREDTSAHFNIFVGDLSPEVTDAMLFSCFSVYPSCSDARVMWDQKTGRSRGFGFVSFRNQQDAQTAIDEAGGKWLGTRQIRCNWATKGATSGEDKMSSDSKSVVELTSGVSEDGKDASNGDAPENNAQYTTVYVGNLGPEVSQVDLHRHFYSLGAGVIEEVRIQRDKGFGFVRYSTHVEAALAIQLGNTHSYLGGRQMKCSWGSKPTPPGTASNPLPPPGPAPIPGFSASDLLAYERQLAMSKMAGMNPMMHHPQGQHALKQAAMGATGSNQAIYDGGFQNAQQLMYYQ

SEQ ID NO: 46693 - DNA, 1287 bp, Brassica napus
  CDS (1)..(1287)
atgcagacaaccaacggctcagattcgacgtcagccacgcctccggctaaccaaacgactcctccgccgcctcagcagtggcagcagcatcaacagtggatgatgcagtatccaggcgcggcggcgatgatgatgatgcaacatcagcagcagcatatgatgatgtatcctcaccaataccttccttacaatcacggtggtcattatcaccaccaccctcctcacctccaatacgcaccgtatcatcagcaacaccataaccaccaccaaaagacacatgagcgtggtggatctggagaagacgtcaagactctatgggttggtgaccttcttcattggatggacgagacttatctccacacctgcttttctcacaccggcgaggtttcttctgtgaaagttattcgtaacaagcaaacatgtcaatcagaagggtatggttttgttgagtttcttacacgtgctgcagctgaagaggttcttcagacctttaacggttcagtgatgccaaactctgagcagctcttccgtctaaactgggcatctttcagtactggtgagaagagagctgttgagaatggtccggagctgtcggtattcgttggagatttgtctccggacgtgactgatgctatgttgcaagagttgtttgctgagagatatccatctgtcaaaagcgccaaagttgtgatcgattccaacaccggccggtccaaaggctacggttttgttaggtttggcgatgaaagtgaaaggtcaagggctttgactgagatgaatggagctttgtgttccaacaggcaaatgagagttggtattgcgactcctaaaagagctgttgctaatcatcaacaacattcttcacaagctgtgatagtggctggtggacatggagcaaatggttctatggctaatggttcacaagctgatggtgaatcaaacaactcaacaatattcgttggtggccttgaccctgacgttactgatgaagacctcagacaaccttttacagagtttggtgaggttgtttcagtgaagatcccagtaggcaaaggatgtggatttgtccagtttgctaacaggaaaagtgctgatgatgccatccagagtttgaacgggacagtcattggcaagaacactgtcaggctctcatggggaagaaccccaaacaagtggagaggagactcagggcagcaatggaatggaggatactcacgagggcaaggttacaacaatggaggatatgctaaccaccaggactccaacacctatcctgccgagacttga

SEQ ID NO: 46694 - protein, 428 aa, Brassica napus
MQTTNGSDSTSATPPANQTTPPPPQQWQQHQQWMMQYPGAAAMMMMQHQQQHMMMYPHQYLPYNHGGHYHHHPPHLQYAPYHQQHHNHHQKTHERGGSGEDVKTLWVGDLLHWMDETYLHTCFSHTGEVSSVKVIRNKQTCQSEGYGFVEFLTRAAAEEVLQTFNGSVMPNSEQLFRLNWASFSTGEKRAVENGPELSVFVGDLSPDVTDAMLQELFAERYPSVKSAKVVIDSNTGRSKGYGFVRFGDESERSRALTEMNGALCSNRQMRVGIATPKRAVANHQQHSSQAVIVAGGHGANGSMANGSQADGESNNSTIFVGGLDPDVTDEDLRQPFTEFGEVVSVKIPVGKGCGFVQFANRKSADDAIQSLNGTVIGKNTVRLSWGRTPNKWRGDSGQQWNGGYSRGQGYNNGGYANHQDSNTYPAET

SEQ ID NO: 46695 - DNA, 1293 bp, Glycine max
  CDS (1)..(1293)
atggctcaacccagttccaacggggatctgaataataaccagcagcagggtcaggttcagcaacaacagcagcagggtcagtgggcggcggcggcgcagccgcatcagtatcagcagcaatggatggctatgcagtacccggccaccgccatggccatgatgcagcaacagatgttgatgtacccgcagcattatatgccctatgctcaccctcattacccgccgccgccgccgcctcctccctcctcccaccaccaccaccaccacaaacaggccgcggcctcctccgacgagatcaggaccgtctggctcggcgacctccaccattggatggacgagaactacctccacaactgctttgctcacaccggcgaggttgtttcggccaaggtcattcggaataagcaaactggtcagtccgagggatatggattcgtggagttctattcgcgagggacggctgagaaagtcttgcagaactataatggcacgatgatgcccaatacagatcaggcattccgtctgaattgggccacattcagtgccggggaaagacgttcctccgatgctacttcggatctctctatatttgttggggacttggccattgatgttaccgatgctatgctgcaggatacttttgctggccgatattcgtctattaagggagcaaaagttgtcattgattctaatactggccgctcaaaaggctatggttttgttaggtttggtgatgaaaacgagagaacgagggcaatgaccgaaatgaatggcgtttattgttctagtaggcccatgcgaataggtgttgcaactcccaagaaaacttatggcttccaacaacaatattcttctcaagctgtggtattggctgggggacactcagctaatggtgctgtggcccaaggttcccattctgaaggggatataaacaacactactatatttgttggagggcttgattctgataccagtgatgaggatctcagacaaccatttttgcaatttggtgaggttgtctctgtgaaaattccagtgggtaaagggtgtggatttgttcaatttgcagacagaaagaatgctgaggaagcaattcacgcattgaatgggacagtaattgggaagcagacagtgcgactttcttggggtcgcagtccaggaaataagcattggagatctgattccaatggaggctattttggtggtcagagttatggaggccatggatttgctgtgagacagaatcaggatatagccatgcaacctgcaactgcaattcaaggggcttcctaa

SEQ ID NO: 46696 - protein, 430 aa, Glycine max
MAQPSSNGDLNNNQQQGQVQQQQQQGQWAAAAQPHQYQQQWMAMQYPATAMAMMQQQMLMYPQHYMPYAHPHYPPPPPPPPSSHHHHHHKQAAASSDEIRTVWLGDLHHWMDENYLHNCFAHTGEVVSAKVIRNKQTGQSEGYGFVEFYSRGTAEKVLQNYNGTMMPNTDQAFRLNWATFSAGERRSSDATSDLSIFVGDLAIDVTDAMLQDTFAGRYSSIKGAKVVIDSNTGRSKGYGFVRFGDENERTRAMTEMNGVYCSSRPMRIGVATPKKTYGFQQQYSSQAVVLAGGHSANGAVAQGSHSEGDINNTTIFVGGLDSDTSDEDLRQPFLQFGEVVSVKIPVGKGCGFVQFADRKNAEEAIHALNGTVIGKQTVRLSWGRSPGNKHWRSDSNGGYFGGQSYGGHGFAVRQNQDIAMQPATAIQGAS

SEQ ID NO: 46697 - DNA, 1194 bp, Glycine max
  CDS (1)..(1194)
atgatgcaggctggacccggcggcatggcccaacaagcgaaccaacaatacgcacagcaacagcaacaaccctacatgatgatgccgccgcagcctcagccccctcagatgtgggccacatcggcccagcctccgtcccagtcggtggctcctccgcaacccaccagcgccgatgaggtccgtaccctctggatcggtgatttgcagtactggatggacgaaaattatctctacacctgtttggcacacaccggcgaggtggcttcagttaaagtcattcggaacaaacaaactagtcaatcggagggatatgggtttattgagtttactagtcgtgctggtgctgagagagtccttcaaacatacaatggcaccattatgccaaatggcgggcagaacttcagattgaactgggcaactcttagtgcaggtgagaggcgtcacgatgatagcccagatcacaccatatttgttggagacctggctgccgatgttacggattatcttcttcaagagacatttcgggcacgatatccctcaattaagggggccaaagttgtaattgataggctaactggacggacaaagggttatggttttgttaggtttggagatgagagtgaacaggttagagctatgactgaaatgcaaggggttctttgttcaacaaggcccatgcgaattggaccagcctctaataaaaaccctagcactcagtctcagccaaaagcatcatatcagaatcctcaaggggcacagaacgagcatgatccaaataatacaactatttttgtcggcaatttggatcctaacgtcacggatgaccatttgagacaagtttttgggcattatggagagttagttcatgtgaagattccagctggcaagcgatgtggatttgtccaatttgcggaccggagctgtgcggaagaggcactgcgggttttgaatggcacacttctaggcggacaaaatgttaggctttcatgggggcgaagtccttcaaacaaacaggctcaaccagatgcaaaccagtggaatggtagtggtggtggatactacggatatgctcaggggggctatgaaaattatggttatgcccctgctggacaggaccccaatatgtatggcagttatcctgggtatgcgaattaccaacctccccagcaacagcagcaaataggatatagctaa

SEQ ID NO: 46698 - protein, 397 aa, Glycine max
MMQAGPGGMAQQANQQYAQQQQQPYMMMPPQPQPPQMWATSAQPPSQSVAPPQPTSADEVRTLWIGDLQYWMDENYLYTCLAHTGEVASVKVIRNKQTSQSEGYGFIEFTSRAGAERVLQTYNGTIMPNGGQNFRLNWATLSAGERRHDDSPDHTIFVGDLAADVTDYLLQETFRARYPSIKGAKVVIDRLTGRTKGYGFVRFGDESEQVRAMTEMQGVLCSTRPMRIGPASNKNPSTQSQPKASYQNPQGAQNEHDPNNTTIFVGNLDPNVTDDHLRQVFGHYGELVHVKIPAGKRCGFVQFADRSCAEEALRVLNGTLLGGQNVRLSWGRSPSNKQAQPDANQWNGSGGGYYGYAQGGYENYGYAPAGQDPNMYGSYPGYANYQPPQQQQQIGYS

SEQ ID NO: 46699 - DNA, 1959 bp, Glycine max
  CDS (1)..(1959)
atggcgcagattcaggtgcagcatcagagtccggtgtcggctcctcctccgaacggcgtggctaacgcgccgaacaacccgaaccagttcgttacgacgtcgttgtacgtcggcgatcttgagcagaatgtcaacgacgcacagctatacgatctgttcaaccaggtcgtccaagtcgtttcggtgcgcgtttgcagggaccttacgacgcgtcgttcactcggttatggctatgttaatttcagtaaccctcaggatgcggcgagggcattggatgtgctgaatttcactccactcaacaacagacctattaggatcatgtattctcatcgggatcctagtcttaggaagagtggtactgcgaatatttttatcaagaatttggataaggctattgaccacaaggccttacatgatactttttcttcttttggactcattctttcttgcaaaatagcaactgatgcttctggcctgtctaagggctatggttttgttcaattcgacagtgaagagtctgcacagaatgctattgacaagttaaatggcatgttgatcaatgataagcaggtctatgtaggccattttctgcgaaagcaagatagagagaatgctctcagtaagacaaaatttaataatgtctatgtgaaaaacttatcagagtcaaccacggatgaagagttgatgaaattttttggagaatatggtaccattactagtgctgtaataatgagggacgcagacggtaaatcaaggtgttttggctttgtcaattttgaaaacccagatgatgctgccaaagctgttgaaggacttaatgggaagaaagttgatgataaggagtggtatgttggaaaagcccagaaaaaatctgagcgtgaacaagaactgaaaggacggtttgagcagagtataaaggaatctgctgacaaatatcaaggtgtgaacctgtatctcaagaacttggatgatactatcagtgatgaaaaacttaaggaaatgtttgctgaatatggtacaataacttcatgcaaggttatgcgagaccccactggaatcggtagaggatcaggatttgttgcattttcaactcctgaggaagcatctcgtgctctcggtgagatgaatggtaaaatgattgctggaaaacctctgtacgttgcccttgcacagagaaaagaagacagaagagcaaggttacaggctcagttttcacagatgaggcctgttgcaataacgccttctgttgcgccccgtatgcctctctaccctcctggtgctcctggtcttggacaacaatttttgtatgggcaaggacccccagccatgatgcctccacaagctggatttggataccagcagcaactagttcctggaatgagacctggtggtggtcccatgccaagcttctttgttcctatggttcagcaaggccaacaagggcagcgcccagggggccgccgaggaacaggtcctgtgcaacaaccccaacagccaatgccaatgatgcagcagcagatgcttccaagggggcgtgtctatcgttaccctcctggccgcaacatgcaagatgtcccacttcaaggtgtagctggtggaatgatgtcagtcccttatgacatgggtggtctgccaatccgcgatgctgtgggacagccaatgcccattcaagctttggccacggctcttgcaaatgctccccctgaacagcagaggactatgctcggtgaagctttatacccgcttgtggatcagctggaacacgatgctgcagcaaaggttactggcatgcttctggagatggaccagcctgaagttttacatctgattgagtcaccagatgctctgaaggcaaaagttgctgaagccatggatgtgttaagaaatgttgctcaacagcaaactaacccagctgatcaactagcttcactctctctcaatgacaatcttgtgtcttag

SEQ ID NO: 46700 - protein, 652 aa, Glycine max
MAQIQVQHQSPVSAPPPNGVANAPNNPNQFVTTSLYVGDLEQNVNDAQLYDLFNQVVQVVSVRVCRDLTTRRSLGYGYVNFSNPQDAARALDVLNFTPLNNRPIRIMYSHRDPSLRKSGTANIFIKNLDKAIDHKALHDTFSSFGLILSCKIATDASGLSKGYGFVQFDSEESAQNAIDKLNGMLINDKQVYVGHFLRKQDRENALSKTKFNNVYVKNLSESTTDEELMKFFGEYGTITSAVIMRDADGKSRCFGFVNFENPDDAAKAVEGLNGKKVDDKEWYVGKAQKKSEREQELKGRFEQSIKESADKYQGVNLYLKNLDDTISDEKLKEMFAEYGTITSCKVMRDPTGIGRGSGFVAFSTPEEASRALGEMNGKMIAGKPLYVALAQRKEDRRARLQAQFSQMRPVAITPSVAPRMPLYPPGAPGLGQQFLYGQGPPAMMPPQAGFGYQQQLVPGMRPGGGPMPSFFVPMVQQGQQGQRPGGRRGTGPVQQPQQPMPMMQQQMLPRGRVYRYPPGRNMQDVPLQGVAGGMMSVPYDMGGLPIRDAVGQPMPIQALATALANAPPEQQRTMLGEALYPLVDQLEHDAAAKVTGMLLEMDQPEVLHLIESPDALKAKVAEAMDVLRNVAQQQTNPADQLASLSLNDNLVS

SEQ ID NO: 46701 - DNA, 1965 bp, Glycine max
  CDS (1)..(1965)
atggcggagattcaagtgcagcatcagagtccggtgtcggcggctcctcctccaaacggcggcgtggcgaacgccccgaacaacgcgaaccagttcgtgacgacgtcgttgtacgttggcgatctagaccagaatgtcaacgactcgcagctctacgatctgttcaaccaggtcggccaagtcgtttcggtgcgcgtctgcagggaccttactacgcgtcgttcactcggttacggctacgttaatttcagtaaccctcaggatgcggcgagggcattggatgtgctgaatttcactccacttaacaacagatctattaggatcatgtattctcatcgagatcctagtcttaggaagagtggtactgcgaatatttttatcaagaatttggataaggctattgaccacaaggccttacatgatactttttcttcttttggactcattctttcttgcaaaatagcaactgatgcttctggtctgtctaagggctatggttttgttcaatttgacaatgaagaggctgcacagaatgctattgacaagttaaatggcatgctgatcaatgataagcaggtctatgtaggccatttcctgcgaaagcaagatagagagaatgctctcagcaagacaaaatttaataatgtctatgtgaaaaacttatcagagtcaaccacggatgaagagttgatgaaaaattttggagaatatggtaccattactagtgctttaataatgagagacgcagacggtaaatcaaggtgttttggctttgtcaattttgaaaacccagacgatgctgccaaagctgttgaaggacttaatgggaagaaagttgatgataaggaatggtatgttggaaaagcccagaaaaaatctgagcgtgaacaagaactgaaaggacgatttgagcagagcataaaggaagctgctgacaaatatccaggtttgaacttgtatctcaagaacttggatgatacaatcagtgatgaaaaacttaaggaaatgtttgccgactatggtacaataacttcttgcaaggttatgcgagacccgactggaatcagcagaggatcaggatttgttgcattttcaactcctgaggaagcaactcgagctcttggtgagatgaatggtaaaatgtttgctggaaaacctctgtatgttgcccttgcacagagaaaagaagagagaagagcaaggttacaggcacaattttcacagatgaggcctgttgcaataacgccttctgttgcgccccgtatgcctctctaccctcctggtgctcctggtcttggacaacaatttttgtatgggcaaggacccccagccatgatgcctccacaagctggatttggttaccagcagcaactagttccgggaatgagacctggtggtggtcccatgccaagcttctttgttcccatggttcagcagggccaacaagggcagcgcccagtgggccgccgaggaacaggtcctgtgcaacaaccccagcagccaatgccaatgatgcagcagcagatgcttccaaggggacgtgtctatcgttaccctcctggccgcaacatgcaagatgtcccacttcaagttgcagctggtggaatgctgtcggtcccttatgacatgggaggtctgccaatgcgcgatgctgtgggacagccaatgcccattcaagctttggctacagccctcgcaaatgctccaccagaacagcagaggactatgctcggtgaagctttatacccacttgtggatcagctggaacatgattctgctgcaaaggttacaggcatgcttctggagatggaccagcctgaagttttacatctgattgagtcaccagatgctctgaaggcaaaagttgctgaagccatggatgtgttgagaaatgttgctcaacagcaaaccaacccagctgatcaactagcctcactctctctcaatgacaatcttgtgtcttag

SEQ ID NO: 46702 - protein, 654 aa, Glycine max
MAEIQVQHQSPVSAAPPPNGGVANAPNNANQFVTTSLYVGDLDQNVNDSQLYDLFNQVGQVVSVRVCRDLTTRRSLGYGYVNFSNPQDAARALDVLNFTPLNNRSIRIMYSHRDPSLRKSGTANIFIKNLDKAIDHKALHDTFSSFGLILSCKIATDASGLSKGYGFVQFDNEEAAQNAIDKLNGMLINDKQVYVGHFLRKQDRENALSKTKFNNVYVKNLSESTTDEELMKNFGEYGTITSALIMRDADGKSRCFGFVNFENPDDAAKAVEGLNGKKVDDKEWYVGKAQKKSEREQELKGRFEQSIKEAADKYPGLNLYLKNLDDTISDEKLKEMFADYGTITSCKVMRDPTGISRGSGFVAFSTPEEATRALGEMNGKMFAGKPLYVALAQRKEERRARLQAQFSQMRPVAITPSVAPRMPLYPPGAPGLGQQFLYGQGPPAMMPPQAGFGYQQQLVPGMRPGGGPMPSFFVPMVQQGQQGQRPVGRRGTGPVQQPQQPMPMMQQQMLPRGRVYRYPPGRNMQDVPLQVAAGGMLSVPYDMGGLPMRDAVGQPMPIQALATALANAPPEQQRTMLGEALYPLVDQLEHDSAAKVTGMLLEMDQPEVLHLIESPDALKAKVAEAMDVLRNVAQQQTNPADQLASLSLNDNLVS

SEQ ID NO: 46703 - DNA, 1305 bp, Glycine max
  CDS (1)..(1305)
atggctcaacccagttccaacggggatctgaataataaccagcagggtcaggttcagcaacagcagcagcagtgggcggcggcgcagccgcatcagtatcagcagcaatggatggccatgcagtacccggccacagccatggccatgatgcagcagcagatgatgatgtacccgcagcattacatgccctacgctcacccccattatccgccgccgccgccgccgccgcctcctcagtcgtctcaccatcaccaccacaaacaggccgcagccgcggcggcggctgcggcctcctccgacgagatcaggaccgtctggctcggcgacctccaccattggatggacgagaactacctccacaactgctttgctcacaccggcgaggttgtgtcggccaaggtcattcgaaataagcaaactggtcagtctgagggatatggattcgtggagttctattcacgagcgacggctgagaaagtcttgcagaactataatggcacgatgatgcccaatacagatcaggcattccgtctgaattgggccacattcagtgcgggggaaaggcgttcttccgatgctacttctgatctctctatatttgtgggggacttggccattgatgttactgatgctatgctgcaagagacttttgctggccgatattcatctattaagggagcaaaagttgtcattgattctaataccggccgctcaaaaggctatggttttgttaggtttggtgatgaaaatgagagaacgagggcaatgactgaaatgaatggtgtttattgttctagtaggcccatgcgaataggtgttgcaactcccaagaaaacttatggctaccaacaacaatattcttctcaagctgtggtattggctgggggacactcagctaatggtgctgtggcccaaggttcccattctgaaggggatataaacaacactactatatttgttggagggcttgattctgataccagtgatgaggatctcagacaaccatttttgcaatttggtgaggttgtctctgtgaaaattccagttggtaaagggtgtggatttgttcaatttgctgacagaaagaatgctgaggaagcaattcagggattgaatgggacagtaattgggaagcagacagtgcgtctttcttggggtcgcagtccaggaaataagcattggagatctgattccaatggaggccattatggtggtcatcagggttatggtggccatggatttgctgtgagacagaatcaggatatagccatgcaacctgctgctgcaattcaaggtgcttcctaa

SEQ ID NO: 46704 - protein, 434 aa, Glycine max
MAQPSSNGDLNNNQQGQVQQQQQQWAAAQPHQYQQQWMAMQYPATAMAMMQQQMMMYPQHYMPYAHPHYPPPPPPPPPQSSHHHHHKQAAAAAAAAASSDEIRTVWLGDLHHWMDENYLHNCFAHTGEVVSAKVIRNKQTGQSEGYGFVEFYSRATAEKVLQNYNGTMMPNTDQAFRLNWATFSAGERRSSDATSDLSIFVGDLAIDVTDAMLQETFAGRYSSIKGAKVVIDSNTGRSKGYGFVRFGDENERTRAMTEMNGVYCSSRPMRIGVATPKKTYGYQQQYSSQAVVLAGGHSANGAVAQGSHSEGDINNTTIFVGGLDSDTSDEDLRQPFLQFGEVVSVKIPVGKGCGFVQFADRKNAEEAIQGLNGTVIGKQTVRLSWGRSPGNKHWRSDSNGGHYGGHQGYGGHGFAVRQNQDIAMQPAAAIQGAS

SEQ ID NO: 46705 - DNA, 1242 bp, Glycine max
  CDS (1)..(1242)
atgcagcaatcaaacggctctgattcgacgactacgatggagcagagcgcgccgccgcctccgaggcaatcaccggcggtggcgaggccgcagcagtgggtgccgatgcagtaccctgcggcggcggcgatggtaatgccgcaccacatgttgccgcctcagcattatgcgccgccgccgtacgtgccttaccaccaccagtacgcggcgcagccccagcaccagcaccagaacggatccggcggtgagaacaaaaccatctggatcggcgatttgcatcattggatggacgaaaactatctccatcgctgtttcgcttccaccggcgagatttcctccatcaaggttattcgcaataagcaaactggcctatcagagggttatggatttgtggagttctattcacatgctacagctgagaaagttttgcaaaattatgctggaattttgatgcccaatgctgaacaaccattccgtctgaactgggcaacatttagcacaggagacaagggttcagataatgttcctgacctttctatttttgtaggagatttagctgcagatgttacagatagtttgttgcatgaaacttttgctagtgtatatccttctgttaaagctgcaaaagttgtttttgatgccaatactggccgttcaaagggctatggtttcgtcaggtttggagatgacaatgagagaacccaggccatgactcagatgaatggtgtttactgttctagcaggccaatgcgtattggtgctgcaactcctaggaaatcatctggccatcaacagggtgggctgtcaaatggcacagccaaccaatctgaagcagattctactaacacaactatatttgttggaggactggaccctaatgtttcagatgaagatctcaggcagccattctcccagtatggtgagatagtctctgttaagatacctgttggaaagggctgtggctttgtccaatttgcaaacagaaataatgctgaagaggcattgcagaagctaaatgggacaacgattggcaagcaaacggtccgtctttcttggggtcgtaatccagcaaataagcaatttagaatggatttcggcagcccttggactggggcatattacggggcccctatgtatgatggttatgggtatgcattgacccctcgtcatgatcccagcatatatgctgctgcttatggggcttaccccctttatggaggccaccaacaacaagtaagctga

SEQ ID NO: 46706 - protein, 413 aa, Glycine max
MQQSNGSDSTTTMEQSAPPPPRQSPAVARPQQWVPMQYPAAAAMVMPHHMLPPQHYAPPPYVPYHHQYAAQPQHQHQNGSGGENKTIWIGDLHHWMDENYLHRCFASTGEISSIKVIRNKQTGLSEGYGFVEFYSHATAEKVLQNYAGILMPNAEQPFRLNWATFSTGDKGSDNVPDLSIFVGDLAADVTDSLLHETFASVYPSVKAAKVVFDANTGRSKGYGFVRFGDDNERTQAMTQMNGVYCSSRPMRIGAATPRKSSGHQQGGLSNGTANQSEADSTNTTIFVGGLDPNVSDEDLRQPFSQYGEIVSVKIPVGKGCGFVQFANRNNAEEALQKLNGTTIGKQTVRLSWGRNPANKQFRMDFGSPWTGAYYGAPMYDGYGYALTPRHDPSIYAAAYGAYPLYGGHQQQVS

SEQ ID NO: 46707 - DNA, 1236 bp, Glycine max
  CDS (1)..(1236)
atgcagcctcagaggttaaggcagcaagccatgatgcaaccatctctctaccaccaccctgctctacttactcctcctcagatagagcctatcttgagtggaaatctgccacctggctttgattcgagttcatgccgcagtgtttatgtaggcaacattcatccccaggttacagattcccttcttcaagagcttttttcaactgcaggcgcccttgaaggatgcaagcttattaggaaagagaagtcatcctatgggtttgtggactactttgatcgcagttctgctgcatttgctattgtaactctcaatgggaggaatatttttgggcagcctattaaggttaactgggcttatgctagcagccagagagaggatacctcaggtcactttaatatttttgtcggtgaccttagtcctgaggttacagatgccacattgtatgcttgcttctctgtatatcctagttgttctgatgcaagggtaatgtgggatcagaagacaggccgttccaggggatttgggtttgtttcttttcggaatcagcaggatgctcaaagtgctataaatgatttgactggaaaatggcttggaagtagacagattcgttgtaattgggcaaccaaaggggccagtgccagtgatgaaaagcagacttcagattcgagaagtgtcgtggagttgaccaatggatcatctgaagatggccaagaaacaaccaatgatgacactcctgagaagaatcctcaatataccactgtttatgttggcaatcttgctccagaggttacttctgttgatctccatcaacattttcattctcttaatgccggaactattgaagatgttagggtgcaacgagacaaaggttttgggtttgtgagatacagtacccatgctgaagcagctcttgctatacagatgggtaatgctcgaattctatttggcaaacctatcaagtgttcatggggtagcaagcctactcctccagggactgcctcaactcctctcccaccacctacttctgcgaatgtgtcgggattttctcttgctagtcttgcagcttatgaacgccaaatggctttgagtaaaatgggtggtgcacatgcccttatgcatcaacaaggtcaacatgccctaaaacaggtagccatgggaatgggtgctcctggggctggttatgatgcaagattccagaatgttgcgaccacccaacacctaatgtactatcagtaa

SEQ ID NO: 46708 - protein, 411 aa, Glycine max
MQPQRLRQQAMMQPSLYHHPALLTPPQIEPILSGNLPPGFDSSSCRSVYVGNIHPQVTDSLLQELFSTAGALEGCKLIRKEKSSYGFVDYFDRSSAAFAIVTLNGRNIFGQPIKVNWAYASSQREDTSGHFNIFVGDLSPEVTDATLYACFSVYPSCSDARVMWDQKTGRSRGFGFVSFRNQQDAQSAINDLTGKWLGSRQIRCNWATKGASASDEKQTSDSRSVVELTNGSSEDGQETTNDDTPEKNPQYTTVYVGNLAPEVTSVDLHQHFHSLNAGTIEDVRVQRDKGFGFVRYSTHAEAALAIQMGNARILFGKPIKCSWGSKPTPPGTASTPLPPPTSANVSGFSLASLAAYERQMALSKMGGAHALMHQQGQHALKQVAMGMGAPGAGYDARFQNVATTQHLMYYQ

SEQ ID NO: 46709 - DNA, 1965 bp, Glycine max
  CDS (1)..(1965)
atggcggagattcaggtgcagcatcagagtccggtgtcggcggctcctcctccaaacggcggcgtggcgaacgccccgaacaacgcgaaccagttcgtgacgacgtcgttgtacgttggcgatctagaccagaatgtcaacgactcgcagctctacgatctgttcaaccaggtcggccaagtcgtttcggtgcgcgtctgcagggaccttactacgcgtcgttcactcggttacggctacgttaatttcagtaaccctcaggatgcggcgagggcattggatgtgctgaatttcactccacttaacaacagatctattaggatcatgtattctcatcgagatcctagtcttaggaagagtggtactgcgaatatttttatcaagaatttggataaggctattgaccacaaggccttacatgatactttttcttcttttggactcattctttcttgcaaaatagcaactgatgcttctggtctgtctaagggctatggttttgttcaattcgacagtgaagagtctgcacagaatgctattgacaagttaaatggcatgttgatcaatgataagcaggtctatgtaggccattttctgcgaaagcaagatagagagaatgctctcagtaagacaaaatttaataatgtctatgtgaaaaacttatcagagtcaaccacggatgaagagttgatgaaattttttggagaatatggtaccattactagtgctttaataatgagggacgcagacggtaaatcaaggtgttttggctttgtcaattttgaaaacccagatgatgctgccaaagctgttgaaggacttaatgggaagaaagttgatgataaggagtggtatgttggaaaagcccagaaaaaatctgagcgtgaacaagaactgaaaggacgatttgagcagagtataaaggaagctgctgacaaatatccaggtttgaacttgtatctcaagaacttggatgatacaatcagtgatgaaaaacttaaggaaatgtttgctgaatatggtacaataacttcatgcaaggttatgcgagaccccactggaatcggtagaggatcaggatttgttgcattttcaactcctgaggaagcatctcgagctcttggtgagatgaatggtaaaatgtttgctggaaaacctctgtatgttgcccttgcacagagaaaagaagagagaagagcaaggttacaggcacaattttcacagatgaggcctgttgcaataacgccttctgttgcgccccgtatgcctctctaccctcctggtgctcctggtcttggacaacaatttttgtatgggcaaggacccccagccatgatgcctccacaagctggatttggttaccagcagcaactagttccgggaatgagacctggtggtggtcccatgccaagcttctttgttcccatggttcagcagggccaacaagggcagcgcccagtgggccgccgaggaacaggtcctgtgcaacaaccccagcagccaatgccaatgatgcagcagcagatgcttccaaggggacgtgtctatcgttaccctcctggccgcaacatgcaagatgtcccacttcaagttgcagctggtggaatgctgtcggtcccttatgacatgggaggtctgccaatgcgcgatgctgtgggacagccaatgcccattcaagctttggctacagccctcgcaaatgctccaccagaacagcagaggactatgctcggtgaagctttatacccacttgtggatcagctggaacatgattctgctgcaaaggttacaggcatgcttctggagatggaccagcctgaagttttacatctgattgagtcaccagatgctctgaaggcaaaagttgctgaagccatggatgtgttgagaaatgttgctcaacagcaaaccaacccagctgatcaactagcctcactctctctcaatgacaatcttgtgtcttag

SEQ ID NO: 46710 - protein, 654 aa, Glycine max
MAEIQVQHQSPVSAAPPPNGGVANAPNNANQFVTTSLYVGDLDQNVNDSQLYDLFNQVGQVVSVRVCRDLTTRRSLGYGYVNFSNPQDAARALDVLNFTPLNNRSIRIMYSHRDPSLRKSGTANIFIKNLDKAIDHKALHDTFSSFGLILSCKIATDASGLSKGYGFVQFDSEESAQNAIDKLNGMLINDKQVYVGHFLRKQDRENALSKTKFNNVYVKNLSESTTDEELMKFFGEYGTITSALIMRDADGKSRCFGFVNFENPDDAAKAVEGLNGKKVDDKEWYVGKAQKKSEREQELKGRFEQSIKEAADKYPGLNLYLKNLDDTISDEKLKEMFAEYGTITSCKVMRDPTGIGRGSGFVAFSTPEEASRALGEMNGKMFAGKPLYVALAQRKEERRARLQAQFSQMRPVAITPSVAPRMPLYPPGAPGLGQQFLYGQGPPAMMPPQAGFGYQQQLVPGMRPGGGPMPSFFVPMVQQGQQGQRPVGRRGTGPVQQPQQPMPMMQQQMLPRGRVYRYPPGRNMQDVPLQVAAGGMLSVPYDMGGLPMRDAVGQPMPIQALATALANAPPEQQRTMLGEALYPLVDQLEHDSAAKVTGMLLEMDQPEVLHLIESPDALKAKVAEAMDVLRNVAQQQTNPADQLASLSLNDNLVS

SEQ ID NO: 46711 - DNA, 1305 bp, Glycine max
  CDS (1)..(1305)
atgcaacagaggctaaagttgcagcaacaacaggccctcatgcagcaagctttgcttcaacagcagcagatgtaccaccctggcatgctcgccgctgctatgtctcagatggagcctgttccaagtggaaatgtgcctcctggttttgatacgtctgcatgccgtagtgtttatgtaggaaatattcatgtaaatgtcaccgataaacttcttgcagaagtttttcagagtgctggtcctcttgctggctgcaagctcataagaaaagaaaagtcctcttatggttttgtggactaccacgatcgagcatctgcagcccttgcaataatgacattgcatggacgacaactgtatggtcaagcacttaaggtgaattgggcatatgccaatagcagtagggaggacacgtcagggcacttcaatatatttgtcggtgatttgagtccagaggttactgatgcaactttatttgcttgcttctcagtctatcctagttgttctgatgcaagggttatgtgggatcacaaaactggtcggtcaaaaggatatggttttgtttctttccgtgatcatcaggatgcccaaagtgcaataaatgatatgacaggtaagtggctgggaaataggcaaatacgatgcaactgggcaactaagggtgctggtggcagttccaatgaagagaagattaatgacagtcaaaatgctgttgtgcttacaaatggatcttcagatggaggtcaagataataacaatgaggatgctcctgataacaatccttcatacaccacagtttatgttggcaaccttcctcatgatgtaacacaagctgaacttcattgtcagttccatgcactgggggctggggtgattgaggaggttcgagttcagagggataaaggttttggatttgtcagatacaacactcatgacgaagctgcactggccattcagatggctaatggaagacttgttcgtgggaagaatatgaagtgttcatggggtagtaaaccaactccacctggaacggcttcaaacccactacctcctcctgctcaaccatatcaaatacttcccactgcagggatgaaccaagggtattctcctgcggagttgttggcttatcagcgccaactggccttgagtcaggctgctgtatctggtctttcaggtcaaactcttctgcaaatgactggacaacatggcctagctccagcttcgatgggcgtaaactctggggcatctcaagccatgtatgatggatataccggtaattcatcgagacagcagcttatgtactatcgttga

SEQ ID NO: 46712 - protein, 434 aa, Glycine max
MQQRLKLQQQQALMQQALLQQQQMYHPGMLAAAMSQMEPVPSGNVPPGFDTSACRSVYVGNIHVNVTDKLLAEVFQSAGPLAGCKLIRKEKSSYGFVDYHDRASAALAIMTLHGRQLYGQALKVNWAYANSSREDTSGHFNIFVGDLSPEVTDATLFACFSVYPSCSDARVMWDHKTGRSKGYGFVSFRDHQDAQSAINDMTGKWLGNRQIRCNWATKGAGGSSNEEKINDSQNAVVLTNGSSDGGQDNNNEDAPDNNPSYTTVYVGNLPHDVTQAELHCQFHALGAGVIEEVRVQRDKGFGFVRYNTHDEAALAIQMANGRLVRGKNMKCSWGSKPTPPGTASNPLPPPAQPYQILPTAGMNQGYSPAELLAYQRQLALSQAAVSGLSGQTLLQMTGQHGLAPASMGVNSGASQAMYDGYTGNSSRQQLMYYR

SEQ ID NO: 46713 - DNA, 1278 bp, Zea mays
  CDS (1)..(1278)
atgcaggcggcggcggtgacggtgaatggcgcgggcgacgtgcagaagccccagcagcagccgatggtggtgggggcgccgccgccgccggccatggtgccgccccattgggttgccataccgatgccgccgcacccgatggcgccgccccagttcgcggcggctcacttcgtgccgttccacgccgtcgtgcagtcgccgccgcgggcggcacctgtgccagcggtcgtcctgggatcgccggcgccgcatcaggccgggcaggaggagaacaagaccatctgggtcggtgacctccatttctggatggaagagaattatcttcacaactgcttcggctacaccggcgaggttgtggcaattaaagttatccggaataagcagaccggacagtctgaaggatacggatttgttgagttctacagccatgctgcagctgaaagggttcttgaagggttttctggtcatattatgccaaacactgaccagccctttaggttaaactgggcatcgtttagcatgggagataggcgctcggatgttgcttcgtcggatcattccatattcgtaggcgaccttgcttccgatgtcaatgacgccacactgctggaggccttctccagcaggtactcctctgtcaaaggtgccaaggtcgttatcgatgctaacactggtagatccaagggctatggcttcgtgagatttggagatgacagcgagaagacacatgccatgactgagatgaatggtgtgtattgctcctctaggcccatgaggattggcccggcaactccaagaaaatcatcaggtacctctggatcaaatggctcatctgctcgaccagatggaggagatttgacaaacacaacagtatttgtgggcgggctcgacccagatgtcagtgaagaggaccttaggcaggccttctcccagtacggagaaatttctaccgtaaagattccagttgggaaacagtgcggcttcgtgcagtttgctcagaggaagaacgcggaagacgcgttgcaagggttgaacggcagcactattggcaaacaggccgtgcgtctctcatggggtcgcaacccagcaaacaagcagtttaggggcgacaatggcaacatgcagtggaagaacgggggcgtgtactacgcggcgcccccgttctacaacggcggctacggctaccctgcggcggccccgttccctgatccaggcatgtacgctgctccagcctacggcgcctacccgttctatggcaaccagcagcaagtgagctga

SEQ ID NO: 46714 - protein, 425 aa, Zea mays
MQAAAVTVNGAGDVQKPQQQPMVVGAPPPPAMVPPHWVAIPMPPHPMAPPQFAAAHFVPFHAVVQSPPRAAPVPAVVLGSPAPHQAGQEENKTIWVGDLHFWMEENYLHNCFGYTGEVVAIKVIRNKQTGQSEGYGFVEFYSHAAAERVLEGFSGHIMPNTDQPFRLNWASFSMGDRRSDVASSDHSIFVGDLASDVNDATLLEAFSSRYSSVKGAKVVIDANTGRSKGYGFVRFGDDSEKTHAMTEMNGVYCSSRPMRIGPATPRKSSGTSGSNGSSARPDGGDLTNTTVFVGGLDPDVSEEDLRQAFSQYGEISTVKIPVGKQCGFVQFAQRKNAEDALQGLNGSTIGKQAVRLSWGRNPANKQFRGDNGNMQWKNGGVYYAAPPFYNGGYGYPAAAPFPDPGMYAAPAYGAYPFYGNQQQVS

SEQ ID NO: 46715 - DNA, 1341 bp, Zea mays
  CDS (1)..(1341)
atgaacggcgccgggggcagccaccaccaccagcagcagaggctccggcagcagcagcagcaggcgctcctgatgcagcaggcgctgctgcagcagcagcagcagcagtaccagtccggcgtcctcgccgccgcggcggcggcggccatgacccagatggaacctgtttccaatggcaaccttccacctgggtttgatccttccacttgtcgcagtgtgtatgttggaaatgtgaaccctaatgtcacggagagccttttgattgaagttttccagagtgctggccttgtggaaagatgcaagctcatacggaaagagaagtcttcctttgggtttgtggactactatgatcgaagatctgctgctctagcaatcatgacccttcatggccgtcacgtatatggacaagcaatcaaggtgaactgggcatatgcaagtacgcagagggaggatacgtcagggcatttccatatttttgttggtgatttaagttctgaagtgaatgatgcaactctttatgcctgtttctcagcatatccttcttgttctgatgctcgagtcatgtgggacaacaaaactggacgctccaggggttatggttttgtctccttccgtaatcaacaggaagctgaaactgctataactgaaatgactggaaaatggcttggaagcagacaaataaggtgcaactgggcaacaaagaacaattcggaagagaaaccagaaactgacaatcataacgcagtcgtactaacaaatggtagctccaacaattcagcaacggatgcaagccaggacgcaggaagtaaagagcccccacagaacaatcctgattgtactactgtatatgttggcaacctcggccatgaggttaaccgggatgagcttcaccgccacttctataacttgggggtcggggcgatcgaggaggtccgtgttcagcaggacaaagggtttggattcgtgagatatagcacccacggggaagcagcactcgctattcagatgtccaatgggtcggtagtccgcgggaaaccaatcaagtgctcatggggtgtcaaaccaactccaccggggacaggctccaagcccctaccccctccagccgcaacgtaccagcccgctgtggcaatgccaggcgtcccgcaaggtttcacgacagcagaactccttgcctaccagaggcagcttgccctgagccaggccgcggccgggcagcagcatgctggtcttgcgggccaggtttctgcagcaggccttcttgctgctgccggttcccaggccctctacgacggctacccgaatcaatcgtcagcgcagcagcttatgtactacaactag

SEQ ID NO: 46716 - protein, 446 aa, Zea mays
MNGAGGSHHHQQQRLRQQQQQALLMQQALLQQQQQQYQSGVLAAAAAAAMTQMEPVSNGNLPPGFDPSTCRSVYVGNVNPNVTESLLIEVFQSAGLVERCKLIRKEKSSFGFVDYYDRRSAALAIMTLHGRHVYGQAIKVNWAYASTQREDTSGHFHIFVGDLSSEVNDATLYACFSAYPSCSDARVMWDNKTGRSRGYGFVSFRNQQEAETAITEMTGKWLGSRQIRCNWATKNNSEEKPETDNHNAVVLTNGSSNNSATDASQDAGSKEPPQNNPDCTTVYVGNLGHEVNRDELHRHFYNLGVGAIEEVRVQQDKGFGFVRYSTHGEAALAIQMSNGSVVRGKPIKCSWGVKPTPPGTGSKPLPPPAATYQPAVAMPGVPQGFTTAELLAYQRQLALSQAAAGQQHAGLAGQVSAAGLLAAAGSQALYDGYPNQSSAQQLMYYN

SEQ ID NO: 46717 - DNA, 1230 bp, Glycine max
  CDS (1)..(1230)
atgatgcagcagccaggacccggcatggcacctcccaccatgggccagcagccgccgcaacagtaccagcagcctccgccgcagcagcagcaaccctacgtcatgatgccgccgcaggcccaggccccgcaggccatgtgggccccctccgcccagcctccgcctcagcagcagcccgccagcgccgacgaggtccgaaccctctggatcggggatctgcagtactggatggacgagaactatctctatacctgctttgctcacaccggcgaggttacatcggttaaagtaattcgaaacaagcaaactagtcaatctgaaggttatgggtttattgagtttaatagtcgtgctggagctgagagaattcttcaaacatataatggggcaataatgccaaatggggggcagagtttcaggttgaattgggcaacttttagtgctggtgagaggtcgcgccacgacgattctccagattacaccatatttgttggtgacttggctgcagatgttactgattatcttcttcaggagacatttagggctcgttataactcggtgaagggtgcaaaagttgtcattgataggctaactggccggaccaagggatatggctttgtaaggttttcagatgagagtgagcaagtgagggctatgactgagatgcaaggggttctttgctcaacaagacccatgaggattggacccgcctctaataaaacccccaccactcagtcccagcccaaagcttcatatcagaattctcaacctcaaggttcacagaatgagaatgatccaaataatacaactatttttgttggtaatttggatcctaatgtcactgatgatcatctgaggcaagttttcagccagtatggagaattagtgcatgtgaagattccagcaggcaagcgatgtgggtttgtccaattcgcagacaggagctgtgccgaagaggcacttcgggtgttgaatgggaccctgttgggtggtcaaaatgttcgtctttcatggggccgcagtccttcaaacaaacaggctcaggcagatccaaaccagtggaatggtggtgctggttctggtggtggatactatgggtatgctgcacaaggttatgaaaattatgggtatgctcctgctgctggacaggatcccaacatgtatggcagttatccggggtatcctggttaccaaccacctcagcaacagcaacaaataggatatagttga

SEQ ID NO: 46718 - protein, 409 aa, Glycine max
MMQQPGPGMAPPTMGQQPPQQYQQPPPQQQQPYVMMPPQAQAPQAMWAPSAQPPPQQQPASADEVRTLWIGDLQYWMDENYLYTCFAHTGEVTSVKVIRNKQTSQSEGYGFIEFNSRAGAERILQTYNGAIMPNGGQSFRLNWATFSAGERSRHDDSPDYTIFVGDLAADVTDYLLQETFRARYNSVKGAKVVIDRLTGRTKGYGFVRFSDESEQVRAMTEMQGVLCSTRPMRIGPASNKTPTTQSQPKASYQNSQPQGSQNENDPNNTTIFVGNLDPNVTDDHLRQVFSQYGELVHVKIPAGKRCGFVQFADRSCAEEALRVLNGTLLGGQNVRLSWGRSPSNKQAQADPNQWNGGAGSGGGYYGYAAQGYENYGYAPAAGQDPNMYGSYPGYPGYQPPQQQQQIGYS

SEQ ID NO: 46719 - DNA, 1269 bp, Glycine max
  CDS (1)..(1269)
atgcagaatcacaggctgaagcagcagcagcagcagcaacaacaagctcttatgcagcaagctcttctccaacaacagtctctctaccaccctggcctccttgctcctcctcagattgaaccatatccaagtggaaatttgcctcctggttttgatccaagtacttgccgcagtgtgtatgttgggaacatccatacacaggtaactgagccgcttttgcaagaagttttctcgggtactggcccagttgaaggttgtaagcttatcagaaaggataagtcatcctatggattcattcattactttgatcgcagatctgctgctcttgccatattatctctcaatggaaggcatctatttgggcagcctatcaaagttaattgggcatatgctagtggtcagagagaggatacgtcaggtcactacaatatatttgttggcgatctaagtcctgaggttactgatgctacgttgtttgcatgcttttctgtctatcccagttgttcagatgcaagggttatgtgggatcagaagactgggcgttcaaggggatttggatttgtttcattccgtaaccaacaggatgcacaaagctctataaatgatttgactggtaagtggcttggaagtagacagatacgttgtaactgggcaacaaaaggtgctggtggtaatgaagagaagcaaaactcagatgcaaaaagtgtggtggaacttacaaatggctcatctgaagatggtaaagagacatctaacagtgatgctcctgagaacaatcctcagtatactactgtttatgtgggtaaccttgctccagaggtaactcaacttgatctccatcgccacttccatgctcttggggctggagtgatggaggaggttcgggtccagcgtgataaagggtttggttttgtgaggtacagtactcatgctgaagcagctctggctattcagatggggaacgcccagtctcttctatgtggaaaaccaattaagtgctcttgggggagcaagcccactccacctggaactgcttcaaatccccttcccccacctgctgctgcatctctgcctggcctgtctgcaactgatcttttggcgtatgagcgacagctagcaattagcaagatgggtggcgtccacgccttgatgcatcctcaaggacaacatcatcttaaacaagcagcagctattggagccagccaggcaatatatgatggtgggttccagaatgttgcagctgcacagcaaatgatgtactaccagtaa

SEQ ID NO: 46720 - protein, 422 aa, Glycine max
MQNHRLKQQQQQQQQALMQQALLQQQSLYHPGLLAPPQIEPYPSGNLPPGFDPSTCRSVYVGNIHTQVTEPLLQEVFSGTGPVEGCKLIRKDKSSYGFIHYFDRRSAALAILSLNGRHLFGQPIKVNWAYASGQREDTSGHYNIFVGDLSPEVTDATLFACFSVYPSCSDARVMWDQKTGRSRGFGFVSFRNQQDAQSSINDLTGKWLGSRQIRCNWATKGAGGNEEKQNSDAKSVVELTNGSSEDGKETSNSDAPENNPQYTTVYVGNLAPEVTQLDLHRHFHALGAGVMEEVRVQRDKGFGFVRYSTHAEAALAIQMGNAQSLLCGKPIKCSWGSKPTPPGTASNPLPPPAAASLPGLSATDLLAYERQLAISKMGGVHALMHPQGQHHLKQAAAIGASQAIYDGGFQNVAAAQQMMYYQ

SEQ ID NO: 46721 - DNA, 1221 bp, Zea mays
  CDS (1)..(1221)
atgatgcagccgccgccgccacatcagcagcagcaatgggcaatggcgcccccgcccccgccgcagtactaccaggcggggcaccctccgccgccgcccccgcagttctaccaggcgggccctccgcctcccgctatgtggggccaaccgccaccgcaggcggcgccggcgccggcgccggccggcggcggggcgggggacgaggcgaggaccctctggatcggggacctgcagtactggatggatgagaactacctctatagctgcttctcccaggctggcgaggttatttccgtgaagataattcggaacaagcagactgggcaacctgagggttatggttttattgaattcagcaaccatgctgtagccgaacaagttctgcagaactataatggtcaaatgatgcccaatgttaatcaacctttcaaattgaattgggctaccagtggggctggtgagaaacgtggagacgatggttcagattatactatatttgttggggacttggcctcggatgttacagatttcattctacaagatacgttcaagagtcgttatccatcagttaagggtgcaaaagttgtctttgacagaactactggccgttcgaaaggctatggttttgtaaagtttgcagattcggatgaacagacacgggcaatgactgaaatgaatggacaatactgttctagcagggccatgcgccttggaccagcatccaacaagaagaatactggtggaccacaaccatcgagtgctatttaccagaacacccaaggaactgattctgatagcgatccgaacaatactactgtatttgttggcggccttgacccgagtgtgactgacgagcttctgaagcaaactttcagtccatatggagagcttctctatgtcaaaatacctgtaggaaagcgctgcggatttgtccaatattctaacagggcatcagctgaggaggccataagggtgctaaatggaagccagttgggaggtcagagcataaggctctcatggggccgtagccctgcaaacaagcagcctcagcaagagcagagccaatggagtggtggtggctattatgggtatccccaaggatacgatccatatggctatgctcggccccctcaagatcctgccatgtacgcctacgcagcatatccagggtatggaaattaccagcaacagccaccacagcagcccccgccacaacagtaa

SEQ ID NO: 46722 - protein, 406 aa, Zea mays
MMQPPPPHQQQQWAMAPPPPPQYYQAGHPPPPPPQFYQAGPPPPAMWGQPPPQAAPAPAPAGGGAGDEARTLWIGDLQYWMDENYLYSCFSQAGEVISVKIIRNKQTGQPEGYGFIEFSNHAVAEQVLQNYNGQMMPNVNQPFKLNWATSGAGEKRGDDGSDYTIFVGDLASDVTDFILQDTFKSRYPSVKGAKVVFDRTTGRSKGYGFVKFADSDEQTRAMTEMNGQYCSSRAMRLGPASNKKNTGGPQPSSAIYQNTQGTDSDSDPNNTTVFVGGLDPSVTDELLKQTFSPYGELLYVKIPVGKRCGFVQYSNRASAEEAIRVLNGSQLGGQSIRLSWGRSPANKQPQQEQSQWSGGGYYGYPQGYDPYGYARPPQDPAMYAYAAYPGYGNYQQQPPQQPPPQQ

SEQ ID NO: 46723 - DNA, 1263 bp, Zea mays
  CDS (1)..(1263)
atgcagatggcggcgaccaccaccgagtcccaaccggccgtgccgactaaacaccctaacgcccacccccacgcgcccccgcagcatgctcacccgcaccaccacatgccgcagccacggtgggtcgtcatcccgtacccgccgccgccgcccatggtggccgcgccaccaccgccgccgcagtttgccaagcacttcgctgctgggccgcccccgccgccccaagctggtgctgggcgccgcacgccgaccccgccctcgtctggatccggcgggaacgggtgcgaagaaaataaaaccatttgggtcggtgacctccagtactggatggatgaaaactacctacataactgcttcgggcccagcggcgaggtggttacaataaaagttatccgcaataggcaaacaggacagtcagaggggtatggatttgttgagttcttttctcatgcatcagcagagaaagctcttcagaattttactggtcatgtgatgccaaacactgaccggccatttaaattgaactgggcatcgtatagcatgggtgaaaagcgatctgaagtggcttctgatcactcgatatttgttggcgatctagctgctgatgtcactgatgaaatgctgctggagcttttctccagcaagtaccgctcggtgaaaggagctaaagttattattgatgcaaacacaggccgttccaggggctatggatttgtcaggtttggagacgacaacgacaaatctcatgccatgtctgaaatgaatggtgtatattgctctacgaggccaattcgtataggacctgcgactcccagaagatcttcaggtgattctggctcctcgactcctggtcattcagatggtgattcttctaacagaacggtatatgttggtgggcttgaccccaatgtcagtgaagatgaactgagaaaagcctttgccaaatatgatcttgcctctgtgaaaattcctctaggaaagcaatgtggctttggtcaatgtgttagcagaactgatgctgaagaagcactacaaggattaaatcgatcactcagtgaaaagcaagcagttcgcctttcatgggtccgcagcccatcgcataagcagtctaggggtgactccgtcaacaggaggaacaacatgtactatggcacaccattctacggcggatatggctatgcctccccggtgccacacccaaacatgtacgctgcagcgtatggcacgtacccgctatatggcaaccagcagctagtgagctag

SEQ ID NO: 46724 - protein, 420 aa, Zea mays
MQMAATTTESQPAVPTKHPNAHPHAPPQHAHPHHHMPQPRWVVIPYPPPPPMVAAPPPPPQFAKHFAAGPPPPPQAGAGRRTPTPPSSGSGGNGCEENKTIWVGDLQYWMDENYLHNCFGPSGEVVTIKVIRNRQTGQSEGYGFVEFFSHASAEKALQNFTGHVMPNTDRPFKLNWASYSMGEKRSEVASDHSIFVGDLAADVTDEMLLELFSSKYRSVKGAKVIIDANTGRSRGYGFVRFGDDNDKSHAMSEMNGVYCSTRPIRIGPATPRRSSGDSGSSTPGHSDGDSSNRTVYVGGLDPNVSEDELRKAFAKYDLASVKIPLGKQCGFGQCVSRTDAEEALQGLNRSLSEKQAVRLSWVRSPSHKQSRGDSVNRRNNMYYGTPFYGGYGYASPVPHPNMYAAAYGTYPLYGNQQLVS

SEQ ID NO: 46725 - DNA, 1155 bp, Zea mays
  CDS (1)..(1155)
atggcggggtacccggaggacaaccagcacgcgttgaacgggtacgacgatgaggaggtcgacgaggaggggcaccccgggcggcggggaggtcgggatggggcgtctgggtacggcgatgctggcggagaggatgtgaggggggcgggcggcgactcgttgggaaagatttttgtcggaggcgttgcttgggagacaactgaagaatcattctccaagcattttgagaagtatggggcaataactgattctgtaattatgaaggacaagcatactaagatgcctcgtggatttggatttgttacattttctgatccatctgttatagacaaggttttggaggatgatcacgttatagatggcagaacggttgaagttaagaggactgtcccgagggaagagatgatcaccaaagacggccctaagacaagaaagatcttcatcggtgggctaccaccatctcttactgaagatgaattgaaggatcacttttcatcatatggtaatgtggttgaacatcagataatgcttgatcatagcactgggcgttctagagggtttggttttatcacatttgaaagtgaagattctgttgaaagggtcatatcagaggggagaatgcgtgatcttggtgggaagcaggttgaaataaagaaggctgaaccaaagaaacatggatctgaccacagcagtaatgggagatcaaaccacggaggtggagcttaccgcaattcttaccgtagtggtggtggagctggtagtggcagcagtggaggcggcggtggttatgggtatggtggtgcttatcgatctgctgcagcaggttatggatatgatggtggcgcaggagcaggatatggctatggtagagggtatggctatggaggcaatgctggctttgggtctagttttggtggtggttatggtggatccatgtatggaggtgctgcctatggtgcatatggtgcctatggtggtggcgcctatggaggaggtgcctacggaggcggtgcctatggaggtggtgctgcctatggtggcgccccaggtggttatggcactggcggatacggcagttatggcggagcaggtagtactggtggtgggagcacaggtgctcggggttctagcaggtatcatccatacggaaaataa

SEQ ID NO: 46726 - protein, 384 aa, Zea mays
MAGYPEDNQHALNGYDDEEVDEEGHPGRRGGRDGASGYGDAGGEDVRGAGGDSLGKIFVGGVAWETTEESFSKHFEKYGAITDSVIMKDKHTKMPRGFGFVTFSDPSVIDKVLEDDHVIDGRTVEVKRTVPREEMITKDGPKTRKIFIGGLPPSLTEDELKDHFSSYGNVVEHQIMLDHSTGRSRGFGFITFESEDSVERVISEGRMRDLGGKQVEIKKAEPKKHGSDHSSNGRSNHGGGAYRNSYRSGGGAGSGSSGGGGGYGYGGAYRSAAAGYGYDGGAGAGYGYGRGYGYGGNAGFGSSFGGGYGGSMYGGAAYGAYGAYGGGAYGGGAYGGGAYGGGAAYGGAPGGYGTGGYGSYGGAGSTGGGSTGARGSSRYHPYGK

SEQ ID NO: 46727 - DNA, 1341 bp, Zea mays
  CDS (1)..(1341)
atgcaccatcagcagcggatgaagcaggcggcggcggccgcggccgcggcgcagcagcagcagctgatgcagcaggcactgctcctgcagcagcagcagcagtcgcaggcgcagccgcccttgttccccgggcaccacccgcaccccggcctcctcgccgcaccacagatagagcccatagtcagtggaaacctgcctcctgggtttgattcaagtacatgccgcagcgtgtatgttggcaatatccatcttcaagtgacggacacagtactgcaggaagtcttccaaagcattggtccagtagaagggtgcaagctcatcagaaaagaaaagtcatcctttggtttcattgactactatgaccgcagatatgctgcactggcaattttatctctcaatggcagacaactgtatggtcagccgattaaagtcaattgggcatatacaagtactccgagggaggacacatcaggtcattttaatatttttgttggggatctttgcccggaagtcactgatgctactttgtttgcatttttctctggatactctacttgctcagatgctagggttatgtgggaccagaaaacaggacgatccagagggtttggttttgtttctttcaggaaccagcaggatgctcaaagtgcgataaatgacttgaatgggaagtggcttgggaaccgtcaaattcgttgcaattgggcaacgaaaggtgctaatgctggtgaagagaaacaaattctggacactaaggttgacctgtcaaatggttcatcagaatctggaaaagagaatccaaatgatgatggtcctgaaaataaccctcagtttactactgtttatgttggcaatcttcctcacgaggctaccatgaatgatgtgcacctgtttttccattcactgggggctggttcaattgaggaagtccgtgtaactcgtgataaaggctttggctttgtgaggtacagcacccatgaggaggctgcattggcaattcagatgggtaatggccaacttattggcgggaggcagataaagtgttcctggggaagcaagccgactccacaagggacagcatccttgcctctgcctcccccagcactggcaccattctccactggagtgtcggccaccgacttgctggcctaccagcgcctgactctgagcaagatggcctcgaacccagccctaatgggtcagcacgccttgaagcaggtcgctgcattggggattggcggcggagccagccagtccatctatgatggcggcttccagggcatcaatactgccaccggcacaacttccgtccagcagcagcagcagctcatgtactactag

SEQ ID NO: 46728 - protein, 446 aa, Zea mays
MHHQQRMKQAAAAAAAAQQQQLMQQALLLQQQQQSQAQPPLFPGHHPHPGLLAAPQIEPIVSGNLPPGFDSSTCRSVYVGNIHLQVTDTVLQEVFQSIGPVEGCKLIRKEKSSFGFIDYYDRRYAALAILSLNGRQLYGQPIKVNWAYTSTPREDTSGHFNIFVGDLCPEVTDATLFAFFSGYSTCSDARVMWDQKTGRSRGFGFVSFRNQQDAQSAINDLNGKWLGNRQIRCNWATKGANAGEEKQILDTKVDLSNGSSESGKENPNDDGPENNPQFTTVYVGNLPHEATMNDVHLFFHSLGAGSIEEVRVTRDKGFGFVRYSTHEEAALAIQMGNGQLIGGRQIKCSWGSKPTPQGTASLPLPPPALAPFSTGVSATDLLAYQRLTLSKMASNPALMGQHALKQVAALGIGGGASQSIYDGGFQGINTATGTTSVQQQQQLMYY

SEQ ID NO: 46729 - DNA, 1152 bp, Zea mays
  CDS (1)..(1152)
atggcggggtacggggaagagaaccagaacgccatgaacgggtacgaggaggaagaggaggaagaagaagttgaagaagtcgaggaggtgtacgaagaggaggaggagggggacggggagggggaaggagacgagggggcagccgccgaggcagcagcgatggcggccgagacgagaagtgtcgacggaggccggggcctagcggaggccgttgggaatgttgatgccggaggcgaggatgagagggatgcagattctagcggcggtgacgcttcggggaaggttttcgtagggggtgtagcctgggagacaactgaagaaacattcacaaagcattttcagaagtatggagctataactgattctgtgatcatgaaggacaagcatactaggatgcctcgtggatttggatttgttacattttccgatccgtctgtgcttgacagggttctagaggatgaacatgtcatagatggaaggacggttgaagtcaaaaggactgttccaaaagagctgtcgtcgaaagatggccctaagacaaaaaagatctttgtgggtggtatcccaccatctcttaccgaagataaattaaaggagcacttctcatcgtacgggaaggtggttgagcatcagattatgcttgatcatagcactggacgttcacggggctttggatttgtcacatttgaaagcgaggatgctgttgaaagggttatgtcagaggggagaatgcatgatcttggagggaagcaggttgaaattaagaaagctgaaccaaagaaacctggatctgatcacatcggtaatgggagatcaagccaagggggtggaggttaccgcagtacttaccgtggtggtggtggagctggtagtggcagcagcggcagcggtgggggtggttatgggtttggtgatgcttatcgatctgctgcagcgagttatggatatgatggtggcgcaggagcaggatatggctatggtagaggttatggctatggaggcaatgctggctttgcgtctggttttggtggtggcgccccaggtggtggttatggctctggcggatacggcagttacggtggagcaggtggtactggtggtgggagtacaggtgctcggggttcgagcaggtaccatccatatggaaaataa

SEQ ID NO: 46730 - protein, 383 aa, Zea mays
MAGYGEENQNAMNGYEEEEEEEEVEEVEEVYEEEEEGDGEGEGDEGAAAEAAAMAAETRSVDGGRGLAEAVGNVDAGGEDERDADSSGGDASGKVFVGGVAWETTEETFTKHFQKYGAITDSVIMKDKHTRMPRGFGFVTFSDPSVLDRVLEDEHVIDGRTVEVKRTVPKELSSKDGPKTKKIFVGGIPPSLTEDKLKEHFSSYGKVVEHQIMLDHSTGRSRGFGFVTFESEDAVERVMSEGRMHDLGGKQVEIKKAEPKKPGSDHIGNGRSSQGGGGYRSTYRGGGGAGSGSSGSGGGGYGFGDAYRSAAASYGYDGGAGAGYGYGRGYGYGGNAGFASGFGGGAPGGGYGSGGYGSYGGAGGTGGGSTGARGSSRYHPYGK

SEQ ID NO: 46731 - DNA, 1221 bp, Zea mays
  CDS (1)..(1221)
atgatgcagccgccgccgccacatcagcagcagcaatgggcaatggcgcccccgcctccgccgcagtactaccaggcggggcaccctccgccgccgcccccgcagttctaccaggcgggccctccgcctcccgctatgtggggccaaccgccaccgcaggcggcgccggcgccggcgtcggccggcggcgcggcgggggacgaggcgaggaccctatggatcggggacctgcagtactggatggatgagaactacctctatagctgcttctcccaggctggcgaggttatttccgtgaagataattcggaacaagcagactgggcaacctgagggttatggttttattgaattcagcaaccatgctgtagccgaacaagttctgcagaactataatggtcaaatgatgcccaatgttaatcaacctttcaaattgaattgggctaccagtggggctggtgagaaacgtggagacgatggttcagattatactatatttgttggggacttggcctcggatgttacagatttcattctacaagatacgttcaagagtcgttatccatcagttaagggtgcaaaagttgtctttgacagaactactggccgttcgaaaggctatggttttgtaaagtttgcagattcggatgaacagacacgggcaatgactgaaatgaatggacaatactgttctagcagggccatgcgccttggaccagcatccaacaagaagaatactggtggaccacaaccatcgagtgctatttaccagaacacccaaggaactgattctgatagcgatccgaacaatactactgtatttgttggcggccttgacccgagtgtgactgatgagcttctgaagcaaaccttcagtccatatggagagcttctctatgtcaaaatacctgtaggaaagcgctgcggatttgtccaatattctaacagggcatcagctgaggaggccataagggtgctaaatggaagccagctgggaggtcagagcataaggctctcatggggccgtagccctgcaaacaagcagcctcagcaagagcagagccaatggagtggtggtggctattatgggtatccccaaggatacgatccatatggctatgctcggccccctcaagatcctgccatgtacgcctacgcagcatatccagggtatggaaattaccagcaacagccaccacagcagcccccgccacaacagtaa

SEQ ID NO: 46732 - protein, 406 aa, Zea mays
MMQPPPPHQQQQWAMAPPPPPQYYQAGHPPPPPPQFYQAGPPPPAMWGQPPPQAAPAPASAGGAAGDEARTLWIGDLQYWMDENYLYSCFSQAGEVISVKIIRNKQTGQPEGYGFIEFSNHAVAEQVLQNYNGQMMPNVNQPFKLNWATSGAGEKRGDDGSDYTIFVGDLASDVTDFILQDTFKSRYPSVKGAKVVFDRTTGRSKGYGFVKFADSDEQTRAMTEMNGQYCSSRAMRLGPASNKKNTGGPQPSSAIYQNTQGTDSDSDPNNTTVFVGGLDPSVTDELLKQTFSPYGELLYVKIPVGKRCGFVQYSNRASAEEAIRVLNGSQLGGQSIRLSWGRSPANKQPQQEQSQWSGGGYYGYPQGYDPYGYARPPQDPAMYAYAAYPGYGNYQQQPPQQPPPQQ

SEQ ID NO: 46733 - DNA, 1347 bp, Zea mays
  CDS (1)..(1347)
atgaacggcgccgggggcagccaccaccagcagcagcagaggctccggcagcagcagcagcaggcgctcctgatgcagcaggcgctgcagcagcagcagcagcagcagcagtaccagtccggcgtcctcgccgccgcggcggcggcggccatgacccagatggaacctgtttccaatggcaaccttccacctgggtttgatccttccacttgtcgcagtgtgtatgttggaaatgtgaaccctaatgtcacggagagccttttgattgaagttttccagagtgctggccttgtggaaagatgcaagctcatacggaaagagaagtcttcctttgggtttgtggactactatgatagaagatctgctgctctagcaatcatgacccttcatggccgtcacatatatggacaagcaatcaaggtgaactgggcatatgcaagtacacagagggaggatacgtcagggcatttccatatttttgttggtgatttaagttctgaagtgaatgatgcaactctttatgcctgtttctcagcatatccttcttgttctgatgctcgagtcatgtgggacaacaaaactggacgttccaggggttatggttttgtctccttccgtaatcaacaggaagctgaaactgctataactgaaatgactggaaaatggcttggaagcagacaaataaggtgcaattgggcaacaaagaccaattcagaagagaaaccagaaactgacaatcataatgcagttgtactaacaaatggtagctccaccaattcagcaacagatgcaagccaggatgcaggaagtaaagagaacccagagaacaatcctgattgtactactgtatatgttggcaaccttggacatgaggttaatcgggatgagcttcaccgccacttctataacttgggggtcggggcaatcgaggaaatccgtgttcaacaggataaggggtttggatttgtgagatatagcacccatggggaagcagcattagctattcagatggccaatggattggtagtccgtgggaaatcaattaagtgctcatggggaaacaagccaactccacctggcaccacctccaagcccctaccccctccagttgcttcataccagcctgctgtagcaatgtcaggtgtcccacaaggtttcacagcagccgaacttcttgcttaccagaggcagcttgccttaagccaggctgcagcagggcagattgctggccagcatggtctcgcgggtcaggtttctgcaggtcttcttgctgctgctggttctcaggccctctacgatggctacccgaaccagtcatcagcccagcagcttatgtactacaactag

SEQ ID NO: 46734 - protein, 448 aa, Zea mays
MNGAGGSHHQQQQRLRQQQQQALLMQQALQQQQQQQQYQSGVLAAAAAAAMTQMEPVSNGNLPPGFDPSTCRSVYVGNVNPNVTESLLIEVFQSAGLVERCKLIRKEKSSFGFVDYYDRRSAALAIMTLHGRHIYGQAIKVNWAYASTQREDTSGHFHIFVGDLSSEVNDATLYACFSAYPSCSDARVMWDNKTGRSRGYGFVSFRNQQEAETAITEMTGKWLGSRQIRCNWATKTNSEEKPETDNHNAVVLTNGSSTNSATDASQDAGSKENPENNPDCTTVYVGNLGHEVNRDELHRHFYNLGVGAIEEIRVQQDKGFGFVRYSTHGEAALAIQMANGLVVRGKSIKCSWGNKPTPPGTTSKPLPPPVASYQPAVAMSGVPQGFTAAELLAYQRQLALSQAAAGQIAGQHGLAGQVSAGLLAAAGSQALYDGYPNQSSAQQLMYYN

SEQ ID NO: 46735 - DNA, 1275 bp, Zea mays
  CDS (1)..(1275)
atgcaggcggcggcggtgacggtgaatggcgcgggcgacgtgcagaagccccagcagcagccgatggtggtgggggcgccgccgccggcggccatggtgccgccccattgggttgccataccgatgccgccgcacccgatggcgccgccccagttcgcggcggctcaattcgtgccgttccacgccgtcgtgcagtcgccgcagctggcggcacctgtgccagcggtcgtcctgggatcgccggcgccgcatcaggccgggcaggaggagaacaagaccatctgggttggtgatctccatttctggatggacgagaattatctgcacaactgcttcggctacaccggcgaggttgtggcaattaaagttatccggaataagcagaccggacagtctgaaggatacggatttgttgagttctacagccatgctgcagctgaaagggttcttgaagggttttctggtcatattatgccaaacactgaccagccctttaggttaaactgggcatcgtttagcatgggagataggcgctcggatgttgcttcggatcattccatattcgtaggcgaccttgcttccgatgtcaatgacgccacactgctggaggttttctccagcaggtactcctctgtcaaaggtgccaaagtcgttatcgatgctaacactggtagatccaagggttatggcttcgtgagatttggagatgacagtgagaagacgcatgccatgactgagatgaatggtgtgtattgctcctctaggcccatgaggattggcccggcaactccaagaaaatcatcaggtacctctggatcaaatggctcatctgctcgaccagacggaggagatttgacaaacacaacagtatttgtgggcgggctcgacccagatgtcagtgaagaggaccttaggcaggccttctccaagtacggagaaatttcttccgtaaagattccagttgggaaacagtgcggcttcgtgcagtttgctcagaggaagaacgcggaagacgcgttgcaagggttgaacggcagcactattggcaaacaggccgtgcgtctctcatggggtcgcaacccagcaaacaagcagtttaggggcgacaatggcaacatgcagtggaagaacgggggcgtgtactacgcggcgcccccgttctacaacggcggatacggctaccctgcggcggccccgttccctgatccaggcatgtacgctgctccagcctacggcgcctacccgttctatggcaaccagcagcaagtgagctga

SEQ ID NO: 46736 - protein, 424 aa, Zea mays
MQAAAVTVNGAGDVQKPQQQPMVVGAPPPAAMVPPHWVAIPMPPHPMAPPQFAAAQFVPFHAVVQSPQLAAPVPAVVLGSPAPHQAGQEENKTIWVGDLHFWMDENYLHNCFGYTGEVVAIKVIRNKQTGQSEGYGFVEFYSHAAAERVLEGFSGHIMPNTDQPFRLNWASFSMGDRRSDVASDHSIFVGDLASDVNDATLLEVFSSRYSSVKGAKVVIDANTGRSKGYGFVRFGDDSEKTHAMTEMNGVYCSSRPMRIGPATPRKSSGTSGSNGSSARPDGGDLTNTTVFVGGLDPDVSEEDLRQAFSKYGEISSVKIPVGKQCGFVQFAQRKNAEDALQGLNGSTIGKQAVRLSWGRNPANKQFRGDNGNMQWKNGGVYYAAPPFYNGGYGYPAAAPFPDPGMYAAPAYGAYPFYGNQQQVS

SEQ ID NO: 46737 - DNA, 1155 bp, Zea mays
  CDS (1)..(1155)
atggcggggtacccggaggacaaccagcacgcgttgaacgggtacgacgatgaggaggtcgacgaggaggggcaccccgggcggcggggaggtcgggatggggcgtctgggtacggcgatgctggcggagaggatgtgaggggggcgggcggcgactcatcggggaagatttttgtcggaggcgttgcttgggagacaactgaagaatcattctccaagcattttgagaagtatggggcaataactgattctgtaattatgaaggacaagcatactaagatgcctcgtggatttggattcgttacattttctgatccatctgttatagacaaggttttggaggatgaacacgttatagatggcagaacggtggaagtcaagaggacagttccgagggaagagatgaataccaaagatggccctaagacaagaaagatcttcatcggtgggctacctgcatctcttactgaagatgagttgaaggatcacttttcattgtatggtaaggtgcttgaacatcagataatgcttgatcatagcactgggcgttctagagggtttggttttgtcacttttgaaagtgaagattctgttgaaagagtcatatcagaggggagaatgcgtgatcttggtgggaagcaggttgaaataaagaaggctgaaccaaagaaacatggatctgatcacatcggtaatgggagatcaagccaagggggtggaggttaccgcagtacttaccgtggtggtggtggagctggtagtggcagcagcggcagcggtgggggtggttatgggtttggtgatgcttatcgatctgctgcagcgagttatggatatgatggtggcgcaggagcaggatatggctatggtagagggtatggctatggaggcaatgctggctttgcgtctggttttggtggtgggtatggtggatccatgtatggaggcgcatatggtgcatatggggcatacggtggtggtgcttatggaggtggtgcctatggaggtggtgcatatggaggcagcgcctatggtggcgccccaggtggtggttatggcactggtggatacggcagttatggtggagcaggtggtactggtggtgggagtacaggtgctcggggttcaagtaggtaccatccatatggaaaataa

SEQ ID NO: 46738 - protein, 384 aa, Zea mays
MAGYPEDNQHALNGYDDEEVDEEGHPGRRGGRDGASGYGDAGGEDVRGAGGDSSGKIFVGGVAWETTEESFSKHFEKYGAITDSVIMKDKHTKMPRGFGFVTFSDPSVIDKVLEDEHVIDGRTVEVKRTVPREEMNTKDGPKTRKIFIGGLPASLTEDELKDHFSLYGKVLEHQIMLDHSTGRSRGFGFVTFESEDSVERVISEGRMRDLGGKQVEIKKAEPKKHGSDHIGNGRSSQGGGGYRSTYRGGGGAGSGSSGSGGGGYGFGDAYRSAAASYGYDGGAGAGYGYGRGYGYGGNAGFASGFGGGYGGSMYGGAYGAYGAYGGGAYGGGAYGGGAYGGSAYGGAPGGGYGTGGYGSYGGAGGTGGGSTGARGSSRYHPYGK

SEQ ID NO: 46739 - DNA, 1263 bp, Zea mays
  CDS (1)..(1263)
atgcagatggcggcgaccaccaccgagtcccaggcggccgtgccgcctcaacaccctcacgcccacccccacgcgcccccgcagcatgctcacccgcaccaccacatgccgcagccacggtgggtcgtcatcccgtacccgccgccgccgcccatggtggccgcgccaccaccgccgccgcagtttgccaagcacttcgctgctgggccgcccccgccgccccaagctggtgctgggcgccgcacgccgaccccgccctcgtctggatccggcgggaacgggtgcgaagaaaataaaaccatttgggtcggtgacctccagtactggatggatgaaaactacctacataactgcttcgggcccagcggcgaggtggttacaataaaagttatccgcaataggcaaacaggacagtcagaggggtatggatttgttgagttcttttctcatgcatcagcagagaaagctcttcagaattttactggtcatgtgatgccaaacactgaccggccatttaaattgaactgggcatcgtatagcatgggtgaaaagcgatctgaagtggcttctgatcactcgatatttgttggcgatctagctgctgatgtcactgatgaaatgctgctggagcttttctccagcaagtaccgctcggtgaaaggagctaaagttattattgatgcaaacacaggccgttccaggggctatggatttgtcaggtttggagacgacaacgacaaatctcatgccatgtctgaaatgaatggtgtatattgctctacgaggccaattcgtataggacctgcgactcccagaagatcttcaggtgattctggctcctcgactcctggtcattcagatggtgattcttctaacagaacggtatatgttggtgggcttgaccccaatgtcagtgaagatgaactgagaaaagcctttgccaaatatgatcttgcctctgtgaaaattcctctaggaaagcaatgtggctttgttcaatttgttagcagaactgatgctgaagaagcactacaaggattaaatggatcactcattggaaagcaggcagttcgcctttcatgggtccgcagcccatcgcataagcagtctaggggtgactccgtcaacaggaggaacaacatgtactatggcacaccattctacggcggatatggctatgcctccccggtgccacacccaaacatgtacgctgcagcgtatggcacgtacccgctatatggcaaccagcagctagtgagctag

SEQ ID NO: 46740 - protein, 420 aa, Zea mays
MQMAATTTESQAAVPPQHPHAHPHAPPQHAHPHHHMPQPRWVVIPYPPPPPMVAAPPPPPQFAKHFAAGPPPPPQAGAGRRTPTPPSSGSGGNGCEENKTIWVGDLQYWMDENYLHNCFGPSGEVVTIKVIRNRQTGQSEGYGFVEFFSHASAEKALQNFTGHVMPNTDRPFKLNWASYSMGEKRSEVASDHSIFVGDLAADVTDEMLLELFSSKYRSVKGAKVIIDANTGRSRGYGFVRFGDDNDKSHAMSEMNGVYCSTRPIRIGPATPRRSSGDSGSSTPGHSDGDSSNRTVYVGGLDPNVSEDELRKAFAKYDLASVKIPLGKQCGFVQFVSRTDAEEALQGLNGSLIGKQAVRLSWVRSPSHKQSRGDSVNRRNNMYYGTPFYGGYGYASPVPHPNMYAAAYGTYPLYGNQQLVS

SEQ ID NO: 46741 - DNA, 1155 bp, Zea mays
  CDS (1)..(1155)
atggcggggtacccggaggacaaccagcacgagttgaacgggtacgacgaggaggtcgacgaagaggagggacaccccgggaggcgggtaggccgggatgggggctctgggtacgctgttgctgtcggagaggatgggaggggggcgggtggcgactcgttgggaaagatttttgtcggaggcgttgcttgggagactactgaagaatcattctccaagcattttgagaagtatggggcaataactgattctgtaattatgaaggacaagcatactaagatgcctcgtggatttggatttgttacattttctgatccatctgttatagacaaggttttggaggatgatcacgttatagatggcagaacggttgaagttaagaggactgtcccgagggaagagatgatcaccaaagacggccctaagacaagaaagatcttcatcggtgggctaccgccatctcttactgaagatgaattgaaggatcacttttcatcatatggtaatgtggttgaacatcagataatgcttgatcatagcactgggcgttctagagggtttggttttatcacatttgaaagtgaagattctgttgaaagggtcatatcagaggggagaatgcgtgatcttggtgggaagcaggttgaaataaagaaggctgaaccaaagaaacatggatctgaccacagcagtaatgggagatcaaaccacggaggtggagcttaccgcaattcttaccgtagtggtggtggagctggtagtggcagcagtggaggcggcggtggttatgggtatggtggtgcttatcgatctgctgcagcaggttatggatatgatggtggcgcaggagcaggatatggctatggtagagggtatggctatggaggcaatgctggctttgggtctagttttggtggtggttatggtggatccatgtatggaggtgctgcctatggtgcatatggtgcctatggtggtggcgcctatggaggaggtgcctacggaggcggtgcctatggaggtggtgctgcctatggtggcgccccaggtggttatggcactggcggatacggcagttatggcggagcaggcagtactggtggtgggagcacaggtgctcggggttctagcaggtatcatccatacggaaaataa

SEQ ID NO: 46742 - protein, 384 aa, Zea mays
MAGYPEDNQHELNGYDEEVDEEEGHPGRRVGRDGGSGYAVAVGEDGRGAGGDSLGKIFVGGVAWETTEESFSKHFEKYGAITDSVIMKDKHTKMPRGFGFVTFSDPSVIDKVLEDDHVIDGRTVEVKRTVPREEMITKDGPKTRKIFIGGLPPSLTEDELKDHFSSYGNVVEHQIMLDHSTGRSRGFGFITFESEDSVERVISEGRMRDLGGKQVEIKKAEPKKHGSDHSSNGRSNHGGGAYRNSYRSGGGAGSGSSGGGGGYGYGGAYRSAAAGYGYDGGAGAGYGYGRGYGYGGNAGFGSSFGGGYGGSMYGGAAYGAYGAYGGGAYGGGAYGGGAYGGGAAYGGAPGGYGTGGYGSYGGAGSTGGGSTGARGSSRYHPYGK

SEQ ID NO: 46743 - DNA, 21 bp, Artificial sequence
  primer
atggctcaacccagttccaac

SEQ ID NO: 46744 - DNA, 20 bp, Artificial sequence
  primer
ttaggaagccccttgaattg

SEQ ID NO: 46745 - protein, 367 aa, Artificial sequence
  consensus sequence
  Variant (2)..(8): Xaa in position 2 to 8 is any amino acid
  Variant (10)..(15): Xaa in position 10 to 15 is any amino acid
  Variant (17)..(21): Xaa in position 17 to 21 is any amino acid
  Variant (22)..(27): Xaa in position 22 to 27 is any or no amino acid
  Variant (29)..(29): Xaa in position 29 is any amino acid
  Variant (32)..(36): Xaa in position 32 to 36 is any amino acid
  Variant (37)..(41): Xaa in position 37 to 41 is any or no amino acid
  Variant (45)..(46): Xaa in position 45 to 46 is any amino acid
  Variant (48)..(52): Xaa in position 48 to 52 is any amino acid
  Variant (54)..(60): Xaa in position 54 to 60 is any amino acid
  Variant (61)..(61): Xaa in position 61 is any or no amino acid
  Variant (63)..(72): Xaa in position 63 to 72 is any amino acid
  Variant (73)..(75): Xaa in position 73 to 75 is any or no amino acid
  Variant (79)..(90): Xaa in position 79 to 90 is any amino acid
  Variant (91)..(100): Xaa in position 91 to 100 is any or no amino acid
  Variant (107)..(109): Xaa in position 107 to 109 is any amino acid
  Variant (113)..(114): Xaa in position 113 to 114 is any amino acid
  Variant (116)..(118): Xaa in position 116 to 118 is any amino acid
  Variant (120)..(127): Xaa in position 120 to 127 is any amino acid
  Variant (128)..(131): Xaa in position 128 to 131 is any or no amino acid
  Variant (133)..(133): Xaa in position 133 is any amino acid
  Variant (135)..(136): Xaa in position 135 to 136 is any amino acid
  Variant (138)..(139): Xaa in position 138 to 139 is any amino acid
  Variant (144)..(144): Xaa in position 144 is any amino acid
  Variant (150)..(150): Xaa in position 150 is any amino acid
  Variant (152)..(159): Xaa in position 152 to 159 is any amino acid
  Variant (161)..(162): Xaa in position 161 to 162 is any amino acid
  Variant (167)..(171): Xaa in position 167 to 171 is any amino acid
  Variant (173)..(174): Xaa in position 173 to 174 is any amino acid
  Variant (176)..(178): Xaa in position 176 to 178 is any amino acid
  Variant (180)..(202): Xaa in position 180 to 202 is any amino acid
  Variant (203)..(246): Xaa in position 203 to 246 is any or no amino acid
  Variant (248)..(248): Xaa in position 248 is any amino acid
  Variant (249)..(249): Xaa in position 249 is any or no amino acid
  Variant (252)..(252): Xaa in position 252 is any amino acid
  Variant (254)..(256): Xaa in position 254 to 256 is any amino acid
  Variant (258)..(261): Xaa in position 258 to 261 is any amino acid
  Variant (263)..(265): Xaa in position 263 to 265 is any amino acid
  Variant (267)..(269): Xaa in position 267 to 269 is any amino acid
  Variant (271)..(274): Xaa in position 271 to 274 is any amino acid
  Variant (275)..(279): Xaa in position 275 to 279 is any or no amino acid
  Variant (281)..(282): Xaa in position 281 to 282 is any amino acid
  Variant (283)..(285): Xaa in position 283 to 285 is any or no amino acid
  Variant (287)..(288): Xaa in position 287 to 288 is any amino acid
  Variant (292)..(293): Xaa in position 292 to 293 is any amino acid
  Variant (294)..(298): Xaa in position 294 to 298 is any or no amino acid
  Variant (300)..(301): Xaa in position 300 to 301 is any amino acid
  Variant (303)..(307): Xaa in position 303 to 307 is any amino acid
  Variant (309)..(311): Xaa in position 309 to 311 is any amino acid
  Variant (312)..(312): Xaa in position 312 is any or no amino acid
  Variant (314)..(319): Xaa in position 314 to 319 is any amino acid
  Variant (323)..(335): Xaa in position 323 to 335 is any amino acid
  Variant (336)..(366): Xaa in position 336 to 366 is any or no amino acid
GXXXXXXXEXXXXXXFXXXXXXXXXXXKXIRXXXXXXXXXXYGFXXFXXXXXAXXXXXXXXGXXXXXXXXXXXXXNWAXXXXXXXXXXXXXXXXXXXXXXIFVGDLXXXVTDXXLXXXFXXXXXXXXXXXXAXVXXDXXTGRSXGYGFVXFXXXXXXXXAXXEMNGXXXXXRXXRXXXAXXXXXXXXXXXXXXXXXXXXXXXXXXXXXXXXXXXXXXXXXXXXXXXXXXXXXXXXXXXXXXXXXXXTXXVGXLXXXVXXXXLXXXFXXXGXXXXXXXXXVXXXXXKXXGFVXXXXXXXAXXAXXXXXGXXXXGXXXXXXSWGXXXXXXXXXXXXXXXXXXXXXXXXXXXXXXXXXXXXXXXXXXXXY

SEQ ID NO: 46746 - protein, 27 aa, Artificial sequence
  protein pattern
  Variant (2)..(4): Xaa in position 2 to 4 is any or no amino acid
  Variant (6)..(6): Xaa in position 6 is Lys or Arg
  Variant (8)..(8): Xaa in position 8 is Ile, Met or Val
  Variant (9)..(9): Xaa in position 9 is any amino acid
  Variant (11)..(12): Xaa in position 11 to 12 is any amino acid
  Variant (14)..(14): Xaa in position 14 is any amino acid
  Variant (16)..(16): Xaa in position 16 is Ser or Thr
  Variant (17)..(17): Xaa in position 17 is Lys or Arg
  Variant (19)..(19): Xaa in position 19 is Phe or Tyr
  Variant (23)..(23): Xaa in position 23 is any amino acid
  Variant (25)..(25): Xaa in position 25 is any amino acid
  Variant (26)..(26): Xaa in position 26 is Asp or Asn
  Variant (27)..(27): Xaa in position 27 is Asp, Glu, Pro, Gln or Ser
SXXXAXVXXDXXTXRXXGXGFVXFXXX

SEQ ID NO: 46747 - protein, 25 aa, Artificial sequence
  protein pattern
  Variant (2)..(2): Xaa in position 2 is any amino acid
  Variant (3)..(4): Xaa in position 3 to 4 is any or no amino acid
  Variant (6)..(7): Xaa in position 6 to 7 is any amino acid
  Variant (8)..(8): Xaa in position 8 is any or no amino acid
  Variant (11)..(11): Xaa in position 11 is Ala, Gly or Asn
  Variant (13)..(13): Xaa in position 13 is Ala, Asp, Gly or Ser
  Variant (14)..(16): Xaa in position 14 to 16 is any amino acid
  Variant (17)..(17): Xaa in position 17 is Asn, Ser or Thr
  Variant (18)..(18): Xaa in position 18 is Asp, Glu, Gln, Arg or Ser
  Variant (19)..(20): Xaa in position 19 to 20 is any amino acid
  Variant (22)..(24): Xaa in position 22 to 24 is any amino acid
NXXXTXXXVGXLXXXXXXXXLXXXF

SEQ ID NO: 46748 - protein, 14 aa, Artificial sequence
  protein pattern
  Variant (2)..(2): Xaa in position 2 is Ile or Met
  Variant (3)..(3): Xaa in position 3 is Asn, Gln or Thr
  Variant (5)..(7): Xaa in position 5 to 7 is any amino acid
  Variant (8)..(8): Xaa in position 8 is any or no amino acid
  Variant (10)..(10): Xaa in position 10 is any or no amino acid
  Variant (12)..(12): Xaa in position 12 is any amino acid
  Variant (13)..(13): Xaa in position 13 is Ile or Met
EXXGXXXXSXRXXR

SEQ ID NO: 46749 - protein, 15 aa, Artificial sequence
  protein pattern
  Variant (3)..(3): Xaa in position 3 is Ile or Val
  Variant (4)..(4): Xaa in position 4 is Asp, Glu or Arg
  Variant (5)..(5): Xaa in position 5 is Phe or Tyr
  Variant (6)..(6): Xaa in position 6 is any amino acid
  Variant (7)..(7): Xaa in position 7 is Asp, Asn, Ser or Thr
  Variant (8)..(8): Xaa in position 8 is His or Arg
  Variant (9)..(10): Xaa in position 9 to 10 is any amino acid
  Variant (12)..(12): Xaa in position 12 is any amino acid
  Variant (13)..(14): Xaa in position 13 to 14 is any or no amino acid
GFXXXXXXXXAXXXL

SEQ ID NO: 46750 - protein, 10 aa, Artificial sequence
  protein pattern
  Variant (3)..(3): Xaa in position 3 is Asp or Asn
  Variant (4)..(4): Xaa in position 4 is Ile or Leu
  Variant (5)..(6): Xaa in position 5 to 6 is any amino acid
  Variant (7)..(7): Xaa in position 7 is Asp, Glu or Gln
  Variant (9)..(9): Xaa in position 9 is Asn, Ser or Thr
  Variant (10)..(10): Xaa in position 10 is Asp or Glu
VGXXXXXVXX

SEQ ID NO: 46751 - DNA, 1353 bp, Glycine max
  CDS (1)..(1353)
atgccggaaaacatgagcatatcagtgaatggtcaatctcaagtccctcctggcttcaggtttcatccaactgaagaagagcttcttcagtactacttgaggaagaaggtctcttacgagaagattgacctcgacgtgattcgtgacgttgatctcaacaagctcgagccatgggacatacaagagaaatgcaaaataggaaccactccgcagaatgattggtacttcttcagccacaaagacaagaagtaccccacaggaacgcgcaccaatcgcgcaactgctgcagggttctggaaggccactggccgcgacaaagtcatctacagcaatggaaagaggattggaatgagaaagactctggttttctacaaaggaagagcgccacatggccagaaatccgattggatcatgcatgaatacagactagacgacaacaacaccaccgacaccaatattgtgtccaatgtgatgggggatgctgctcaggaagaagggtgggtggtgtgcaggatattcaagaagaagaaccatctgaaaaccctagacagccccttagcttcaggggaagatagaaggagccacttgttcgactcgtgcgacgagggagctttggagcaaatacttcagcaaatgggaaggggttgcaaggaggagagcagctatgaaggcaactacaacagctatggaaggtttacaaggccgtatgagacaacagcggcgaacaatggcggcggatacaatgataggttcatgaagctcccgagcctcgagagcccaaaatccgcaagcatggagaaccaccacaacaccaacaacaacaataacatgaatagtaataataataataatggtgataacaacgagaacaacaataataatgggtaccatcccataattccagtagagatgggcacggacaatgaagggacattcacaacgcaccaggtgagtggtggtgacccaaacaacaacaacaacaacagcaacattgttcatccattggaggtaggatcaggtggtggaggcctcaccaactgggctgcgctggaccgtttagttgcatctcaactcaatggccaaaccgatgcctctaggcaactaggatgtgctttcaacgaccccaccatgtattgcaccagcgtcgaccatcatgatcttcatcatcaaatccccaccctccgatcctcatcaacgtccgctaacacacgaccttcccctgcacccgcattcatcaaccccccaacacaggacttcaccagcgagattgacctttggaacttctcccgatccacgtcctcactgttggcatcctccgaaccactgtgccacgtgtccaacacgtcagtgtag

SEQ ID NO: 46752 - protein, 450 aa, Glycine max
MPENMSISVNGQSQVPPGFRFHPTEEELLQYYLRKKVSYEKIDLDVIRDVDLNKLEPWDIQEKCKIGTTPQNDWYFFSHKDKKYPTGTRTNRATAAGFWKATGRDKVIYSNGKRIGMRKTLVFYKGRAPHGQKSDWIMHEYRLDDNNTTDTNIVSNVMGDAAQEEGWVVCRIFKKKNHLKTLDSPLASGEDRRSHLFDSCDEGALEQILQQMGRGCKEESSYEGNYNSYGRFTRPYETTAANNGGGYNDRFMKLPSLESPKSASMENHHNTNNNNNMNSNNNNNGDNNENNNNNGYHPIIPVEMGTDNEGTFTTHQVSGGDPNNNNNNSNIVHPLEVGSGGGGLTNWAALDRLVASQLNGQTDASRQLGCAFNDPTMYCTSVDHHDLHHQIPTLRSSSTSANTRPSPAPAFINPPTQDFTSEIDLWNFSRSTSSLLASSEPLCHVSNTSV

SEQ ID NO: 46753 - DNA, 1297 bp, Arabidopsis thaliana
  CDS (98)..(1297)
atctccaactttcagtatgatatatagttacaattaaataaacctcacatgctctattcttgcttgatttttgagttaatcttgaatctctttgatgatgtcaaaatctatgagcatatcagtgaacggacaatctcaagtgcctcctgggtttaggtttcatccgaccgaggaagagctgttgcagtattatctccggaagaaagttaatagcatcgagatcgatcttgatgtcattcgcgacgttgatctcaacaagctcgagccttgggacattcaagagatgtgtaaaataggaacaacgccacaaaacgactggtatttctttagccacaaggacaaaaaatatccgacgggaacgagaactaacagagccactgcggctggattttggaaagcaactggccgcgacaagatcatatatagcaatggccgtagaattgggatgagaaagactcttgttttctacaaaggccgagctcctcacggccaaaaatctgattggatcatgcatgaatatagactcgatgacaacattatttcccccgaggatgtcaccgttcatgaggtcgtgagtattataggggaagcatcacaagacgaaggatgggtggtgtgtcgtattttcaagaagaagaatcttcacaaaaccctaaacagtcccgtcggaggagcttccctgagcggcggcggagatacgccgaagacgacatcatctcagatcttcaacgaggatactctcgaccaatttcttgaacttatggggagatcttgtaaagaagagctaaatcttgaccctttcatgaaactcccaaacctcgaaagccctaacagtcaggcaatcaacaactgccacgtaagctctcccgacactaatcataatatccacgtcagcaacgtggtcgacactagctttgttactagctgggcggctttagaccgcctcgtggcctcgcagcttaacggacccacatcatattcaattacagccgtcaatgagagccacgtgggccatgatcatctcgctttgccttccgtccgatctccgtaccccagcctaaaccggtccgcttcgtaccacgccggtttaacacaggaatatacaccggagatggagctatggaatacgacgacgtcgtctctatcgtcatcgcctggcccattttgtcacgtgtcgaatgttttgctgcttgtttgtctccttcgtctgcagcttcagttctggccgttccaaccatggcagaggcaggttcatttcgatctttcatcgcctcagatgcagatctctctccattga

SEQ ID NO: 46754 - protein, 399 aa, Arabidopsis thaliana
MSKSMSISVNGQSQVPPGFRFHPTEEELLQYYLRKKVNSIEIDLDVIRDVDLNKLEPWDIQEMCKIGTTPQNDWYFFSHKDKKYPTGTRTNRATAAGFWKATGRDKIIYSNGRRIGMRKTLVFYKGRAPHGQKSDWIMHEYRLDDNIISPEDVTVHEVVSIIGEASQDEGWVVCRIFKKKNLHKTLNSPVGGASLSGGGDTPKTTSSQIFNEDTLDQFLELMGRSCKEELNLDPFMKLPNLESPNSQAINNCHVSSPDTNHNIHVSNVVDTSFVTSWAALDRLVASQLNGPTSYSITAVNESHVGHDHLALPSVRSPYPSLNRSASYHAGLTQEYTPEMELWNTTTSSLSSSPGPFCHVSNVLLLVCLLRLQLQFWPFQPWQRQVHFDLSSPQMQISLH

SEQ ID NO: 46755 - DNA, 1915 bp, Glycine max
  CDS (164)..(1258)
  misc_feature (1840)..(1840): n is a, g, c or t
cccacgcgtccgcccacgcgtccgatttagtgctgcgtactaagtttttggtttcatcagatccacaccggaattctattcagactctatacatagttacatcgatcctcgcggggagagccaaataacgagatacacaggttttaattctttgagagcggaaatggatacattttcacatgtaccaccaggctttcggtttcatccaaccgatgaagagctcgttggttactaccttaggaaaaaggtagcgtctaaaaggattgatctagatgtgatcaaagatgtcgatctctataaaattgaaccatgggatctccaagaactatgcaaaataggaaccgatgaacaaagtgactggtacttcttcagtcataaagataagaaatatccaactggaactcgcaccaatagagctacaaaagcaggattctggaaagccacgggaagagacaaggcaatatactctaagcattgcctcattggcatgagaaagactctcgtgttttacaaaggacgagccccaaatggacagaagtctgattggatcatgcatgagtacagactagaaactaatgaaaatggaacttctcaggaagaaggctgggttgtgtgtagagtgttcaagaagaggatgacaacaacgcagaaagtgggagagtatgatcaatcaccctgttggtacgatgagcaagtttccttcatgcaagatcttgaatccccaaggcgcaatatttctcagacttatgcatcataccaccatcaccaacaacagcaccaccaccatccctgcaagcctgagctcatggaattgcaatacaacaacattccccacgatgcattcctccaacttccgcaactcgaaagccccaaagttactcaatcatcatgctcagttgtcccttatggctatgaaagcaacaacaacaacaatggaagcaccttgcaattctcatcactcactcaggaagaacagctacaatattgcaataatcaacaaagtcaccattctctctatggtagcaatgatcatgcagttgaccaggtcacagattggcgtgtgcttgacaagtttgttgcttctcagctcagtcacaacaaccaagatgtttccaaggaaaccagttattccaatgcacctatcttccatgtggctgaacaaatttctgtggctgcaaatggatccaaaaaggagcaagtttctcaggagtatgcttcaacgtctacctccagttaccagattgacctgtggaagtgaatttttatatatatatatatatatatagtaactataaataagatacgatgcataataccaattataggaagtacgtacaagtgaatgttggaaaaaaaagaccatagtgttgttgctacgtgttgttgtacataagaagcctaaaatgttttatatatcattagttgttgaacctcttgaggctggagtatatggactgaaaatgtatccattagttgcaattcttcagttgcaaaagacacgcctatatacagcaaacagattggtgcttcaaggtcaactcgatctacagcaagaagtgatctatatgatgggaagagttctatgaattaatgttacaggtgatttgttcactacagcttaatgttgcatttattataaaagttacatatgttttcagtttgtatttgaaatagccaattacttggatatatgattggatctaccagaagtttaagaatggagggatgagatttgagaatctaaactaagcatgcttctgatatatcgttcctccactgtgccagtttagaattgactgtaatatggccttttctgcaagcgttcaatttctgtatagcncataagatgtgaaatttcaaacaccaagttaaagagattataaatcactgaaattgactgaaaatcattaacttt

SEQ ID NO: 46756 - protein, 364 aa, Glycine max
MDTFSHVPPGFRFHPTDEELVGYYLRKKVASKRIDLDVIKDVDLYKIEPWDLQELCKIGTDEQSDWYFFSHKDKKYPTGTRTNRATKAGFWKATGRDKAIYSKHCLIGMRKTLVFYKGRAPNGQKSDWIMHEYRLETNENGTSQEEGWVVCRVFKKRMTTTQKVGEYDQSPCWYDEQVSFMQDLESPRRNISQTYASYHHHQQQHHHHPCKPELMELQYNNIPHDAFLQLPQLESPKVTQSSCSVVPYGYESNNNNNGSTLQFSSLTQEEQLQYCNNQQSHHSLYGSNDHAVDQVTDWRVLDKFVASQLSHNNQDVSKETSYSNAPIFHVAEQISVAANGSKKEQVSQEYASTSTSSYQIDLWK

SEQ ID NO: 46757 - DNA, 1095 bp, Arabidopsis thaliana
  CDS (1)..(1095)
atgtcaaaatctatgagcatatcagtgaacggacaatctcaagtgcctcctgggtttaggtttcatccgaccgaggaagagctgttgcagtattatctccggaagaaagttaatagcatcgagatcgatcttgatgtcattcgcgacgttgatctcaacaagctcgagccttgggacattcaagagatgtgtaaaataggaacaacgccacaaaacgactggtatttctttagccacaaggacaaaaaatatccgacgggaacgagaactaacagagccactgcggctggattttggaaagcaactggccgcgacaagatcatatatagcaatggccgtagaattgggatgagaaagactcttgttttctacaaaggccgagctcctcacggccaaaaatctgattggatcatgcatgaatatagactcgatgacaacattatttcccccgaggatgtcaccgttcatgaggtcgtgagtattataggggaagcatcacaagacgaaggatgggtggtgtgtcgtattttcaagaagaagaatcttcacaaaaccctaaacagtcccgtcggaggagcttccctgagcggcggcggagatacgccgaagacgacatcatctcagatcttcaacgaggatactctcgaccaatttcttgaacttatggggagatcttgtaaagaagagctaaatcttgaccctttcatgaaactcccaaacctcgaaagccctaacagtcaggcaatcaacaactgccacgtaagctctcccgacactaatcataatatccacgtcagcaacgtggtcgacactagctttgttactagctgggcggctttagaccgcctcgtggcctcgcagcttaacggacccacatcatattcaattacagccgtcaatgagagccacgtgggccatgatcatctcgctttgccttccgtccgatctccgtaccccagcctaaaccggtccgcttcgtaccacgccggtttaacacaggaatatacaccggagatggagctatggaatacgacgacgtcgtctctatcgtcatcgcctggcccattttgtcacgtgtcgaatggtagtggataa

SEQ ID NO: 46758 - protein, 364 aa, Arabidopsis thaliana
MSKSMSISVNGQSQVPPGFRFHPTEEELLQYYLRKKVNSIEIDLDVIRDVDLNKLEPWDIQEMCKIGTTPQNDWYFFSHKDKKYPTGTRTNRATAAGFWKATGRDKIIYSNGRRIGMRKTLVFYKGRAPHGQKSDWIMHEYRLDDNIISPEDVTVHEVVSIIGEASQDEGWVVCRIFKKKNLHKTLNSPVGGASLSGGGDTPKTTSSQIFNEDTLDQFLELMGRSCKEELNLDPFMKLPNLESPNSQAINNCHVSSPDTNHNIHVSNVVDTSFVTSWAALDRLVASQLNGPTSYSITAVNESHVGHDHLALPSVRSPYPSLNRSASYHAGLTQEYTPEMELWNTTTSSLSSSPGPFCHVSNGSG

SEQ ID NO: 46759 - DNA, 1449 bp, Eucalyptus grandis
  CDS (68)..(1219)
ggtttcaaaagcttctgcttcatccaaaggatcaatttgtaacttcaggctatatgctttagaagagatggacatgaatttgtccataaatggccagtctcagattcctccaggcttcagattccatccaacggaagaggagcttctgcattattatctgagaaagaaaatgtcgaacaaaaagatcgatctggatgtgattcgcgatgtcgatcttaataagcttgagccatgggatatccaagagaggtgcaagataggatctgggccccagagcgactggtacttctttagccacaaggacaagaagtacccaaccgggactcggacgaaccgcgcaacagccgtggggttttggaaggcgaccggccgcgacaagatcatatacggcggttcttcgaggatcgggttgaggaagacccttgtgttttacaaaggacgagccccacatggacagaaatcggactggatcatgcatgagtaccggctcgacgagggttcaaacagttccgtgggtccgagcttggtttgcgagtcctccccggaagacgggtgggtggtctgccgggtattcaggaagaagagccatcaaagaacactagagagtcctaaaagcacgtcgacctcgtccatggacaccgagatgctgatgaacgcgagcgcagacagcagcgtcctggatcagatactatcgtacatgggaaggactaactgcgaatcgccagagaattatcaagcgcccatcaacatcagcagcatgcaaactcaactgatccatgggaagttcttgcacctcccaaggctggatgacagttcgcacttgggtcaagagaccggcttgaggacattttatcagaagttcgatgaaatccgcatcccagggagcgatgacccctcctccaagcacaccagttctgattacgaaccgaaagctgggactgctgggatcaatgactgggtcgcattggaccggctcgtggcttcgcagcttaatggccagcttgagatcagcgctgcatccaagcaatcgccttatcccggagctccaaacccggtactggccggtccggctccaggcgaccatcaagtagggcaactgtccccgctgcagctaaacagacccaatcaaatctacagtagcgagagcagtttcgactggagcttcggaaagtcgtcgtcggtgaccccatcgaacccgctgcaccacttgtcagtataattatagccaagatatatcgatcaataaccgattagcagctcctacagtgaagttacattttcctgtgtacatgtacgcatagattacttaggaataaacgtgttctctatacaattctcggttaaaatactgcttagtcaccttatctgaaataatcaatgcagtggcattctgtcccgcaatatctcatcttcaacgcaacgtggatttgtcgtttgttaaaaaaaaaa

SEQ ID NO: 46760 - protein, 383 aa, Eucalyptus grandis
MDMNLSINGQSQIPPGFRFHPTEEELLHYYLRKKMSNKKIDLDVIRDVDLNKLEPWDIQERCKIGSGPQSDWYFFSHKDKKYPTGTRTNRATAVGFWKATGRDKIIYGGSSRIGLRKTLVFYKGRAPHGQKSDWIMHEYRLDEGSNSSVGPSLVCESSPEDGWVVCRVFRKKSHQRTLESPKSTSTSSMDTEMLMNASADSSVLDQILSYMGRTNCESPENYQAPINISSMQTQLIHGKFLHLPRLDDSSHLGQETGLRTFYQKFDEIRIPGSDDPSSKHTSSDYEPKAGTAGINDWVALDRLVASQLNGQLEISAASKQSPYPGAPNPVLAGPAPGDHQVGQLSPLQLNRPNQIYSSESSFDWSFGKSSSVTPSNPLHHLSV

SEQ ID NO: 46761 - DNA, 1567 bp, Eucalyptus grandis
  CDS (209)..(1408)
gcgcctcctctctctctctcggtgtgccggcggttcatctctcttccatctcaaaggacgagtttttcggtttttatcttccttcaggtcttttcctatggagttcctcatatagatcaaaaatctccacacacacacacacacaacgctttccactcgacacgctgagcatacagctcggtaattcggtcctctgttgtaagagaaaatgaacctgtccataaacggccagtctcaggtgccgccaggtttcagattccatcccaccgaagaagaactcttgcattactacctgagaaagaaagttgcctatgagaagatcgacttggacgtgattcgtgaggttgatctcaataagcttgaaccatgggacatccaagagaagtgcaggattggatcgaccccccaaaacgactggtacttcttcagccacaaggacaagaagtaccctactggaacgaggacgaaccgggcgacagctgcagggttctggaaggccacaggacgggacaagatcatctacagtgggttcaagcgcataggtttgaggaagacgttagtgttttacaagggacgagctccgcacgggcagaagtcggattggatcatgcatgagtatcggctggatgagagcacacatgacccgaatgctctgagtccagctggagatgcatccccagaagaagggtgggtggtgtgccgagtgttcaagaagaagaactatcagaaaaccctagacagccccaagagcccgtcgtcttcgacctccatggactcgaaggccatgcaacagatgctcgccgccactgccaatgatggtgtattggaccagatactctcctacatgggaagaacttgcaaggttgaaagcgagactcccaccaaactcaatctctcccacaacaattacaaccacaacaacaacatcaagtaccccgtttcaaacaccgatctcctccacgggaagttcatgcatctcccgaggctcgagagcccgatcctccctttaatccctgtagcgagcccgccgttcgaccaccaagactgctctttcaagctgtcttaccattcgcttgacgagatgctcgctgagacctcgggacaccaagggatcggtaggtctcccaccccggattgggtcgccatggaccggctagtggcgtctcagctcaatggccaagttgccgagacaccaaagcaactctcgagctgcttcagcgatgaccctggttccgatgtcggcggcctgagcatggatgatgaggtgcagttttcacacaccaaattaagtaacaagccttcgggtcagcaaagtctggagatgtacggctgcgagagcaacgacttgtggagcttcacgaagacgtcgacgtcgtcgtctgacccattacgtcatttgtcggtataacgggagtgccttgagatttgtcatattaaaacctagttgcttcctaaaacctagggtttgatatgttgtaacaacaaagagaagaaggaaccgcctaggttcatgatatatacaggttaagtacatgcatgtagtgaataaaaaaaaaaaaaaaaaaaa

SEQ ID NO: 46762 - protein, 399 aa, Eucalyptus grandis
MNLSINGQSQVPPGFRFHPTEEELLHYYLRKKVAYEKIDLDVIREVDLNKLEPWDIQEKCRIGSTPQNDWYFFSHKDKKYPTGTRTNRATAAGFWKATGRDKIIYSGFKRIGLRKTLVFYKGRAPHGQKSDWIMHEYRLDESTHDPNALSPAGDASPEEGWVVCRVFKKKNYQKTLDSPKSPSSSTSMDSKAMQQMLAATANDGVLDQILSYMGRTCKVESETPTKLNLSHNNYNHNNNIKYPVSNTDLLHGKFMHLPRLESPILPLIPVASPPFDHQDCSFKLSYHSLDEMLAETSGHQGIGRSPTPDWVAMDRLVASQLNGQVAETPKQLSSCFSDDPGSDVGGLSMDDEVQFSHTKLSNKPSGQQSLEMYGCESNDLWSFTKTSTSSSDPLRHLSV

SEQ ID NO: 46763 - DNA, 1062 bp, Pinus radiata
  CDS (1)..(1062)
atgaacacgctatctcgcgttcctccaggtttcagattccatcctaccgacgaagaacttgtagattattatctcagaaagaaggttgcttcgaaaaggattgatttggacgtgatcaaggacattgacctttacaagattgagccttgggatctccaagagaaatgcaagatagggtccgaggaacagacggagtggtatttcttcagccacaaggacaaaaaataccctacaggcacgcgcacaaacagggccacagcggccgggttctggaaagccacgggaagagataaggcaatatactgcaagttgaacctcattgggatgaggaaaacgttggtcttctacaaaggccgcgctcccaatggacagaagtcagactggatcatgcacgaatacaggcttgagaccaatgaaaacgctacacctcaggaggagggatgggttgtttgtcgcgtcttcaagaaacgcataacaacacagaggaaaggaaatgatgataatgtctgttggtacgaggaccaggtaggtttgatgcccgagttagattcacccaagaaacttcctcaaggtggggatatgggataccaacttccattcgcctgcaaacaggagctagagttacactaccatatgtctcatgatccgtttcttcagcttccgcagctggagagtccaaaagtaccctgcaacgcatcctcaagcgcaccaggaaaaagggctgaatgttcaatgccatacaatggatttgaaacaggttgcaacatggaaggacaccatggcaatgccaatccacagtcagcagctacccaagaagatcaacaaggtgttaacacatacaatgaggagcaggttactgactggagagtgctggataaatttgttgcttcacagttgagccaggaggacgtgtcgaaggatgctaggttttctaatgaaacaatgtaccccatacctgatatgactgtgcttctgcgacagtctaataaacatgagcagcaagcagattatgcctcaaattccaactgtgatgttgatctctggagctttgcaggaaaatga

SEQ ID NO: 46764 - protein, 353 aa, Pinus radiata
MNTLSRVPPGFRFHPTDEELVDYYLRKKVASKRIDLDVIKDIDLYKIEPWDLQEKCKIGSEEQTEWYFFSHKDKKYPTGTRTNRATAAGFWKATGRDKAIYCKLNLIGMRKTLVFYKGRAPNGQKSDWIMHEYRLETNENATPQEEGWVVCRVFKKRITTQRKGNDDNVCWYEDQVGLMPELDSPKKLPQGGDMGYQLPFACKQELELHYHMSHDPFLQLPQLESPKVPCNASSSAPGKRAECSMPYNGFETGCNMEGHHGNANPQSAATQEDQQGVNTYNEEQVTDWRVLDKFVASQLSQEDVSKDARFSNETMYPIPDMTVLLRQSNKHEQQADYASNSNCDVDLWSFAGK

SEQ ID NO: 46765 - DNA, 1667 bp, Pinus radiata
  CDS (131)..(1309)
gcatggacgaagcagatttggagttttggatttactgtaccgtatattgctaggatatctccattttcatttcccccttcctccaaaagtctgcagccaaagaagatcgaaacctttaaaaacttacggaatgactttatcagtaaatgggcagtcccgagtgccgccaggctttcggttccatccaacggaggaggagcttttatattactacctgaagaagaaggtctcgtttgaaaagattgatcttgacgttattcgcgatgtggatctcaacaagctggagccatgggatattcaagagagatgcaagattggatctacgccacagcacgattggtacttctttagccacaaggacaaaaaataccctaccgggactcgcacgaatagggcaacagcggccggcttctggaaagccacgggacgagacaaggccatacacacgaatttgaagaaaataggaatgcgaaagacgctggtgttctacaaaggccgagcgcctcacggccagaaaacagattggattatgcatgaatatcgcctggacgacgccgaatatccccaagccaatacattcaacgagttacaggaggacggctgggtcgtgtgccgagttttcaagaagcgcaatcatcacaagagccaagaatcggcggaattgtcacccaaatacggcagcaaacaattcagcaacaacaaaattctgtcagactcagattgccccagcgataatcttacagaccagttgcactacacgcatcagctgaacatgtgcaagcaagaactggagatgcagcaatacgcgttcccccacgaccaattcatgcagctgcctcagctagagagccccaagatccccacctgcaacaaccctccttcgtccggcatcaaacgattctttcccgatagtcgatcagggttcttccagctcgaaaacattcctaactccaagcgcccctgcagctatccgatgactctggacatgaccgaattggagggctccacggtcacgacacacgaccatatgaccgaattcaagcccacggaagaagtccagaatttgcaggactggacagtgctggaccggctggtagcttcgcatcttaacggtcaagaggtcgaaactcccaagctggaagtgaggacctacggcgctcctaattcttcttccgatcatcaggccttggtggatgcagcaacagcgtctggagatcagctcacacttctaccccagcttcgaattaacagactgaacccccatgactactcttcatgtgaaatagatttatggaacttcgtaaagtaaaatattattcttatgatctgcaaattaatatactcatgtagtttaaacgttaaagctcctaaaaacaaattccatgactgctcattgatggtatttgctgtaaggttttagggaatagaatgtgaatgtagcaagaagagatcatatgaggctctctgtgtaaatatagtttaagatgtcatagttatctatggattcatcagttacttgacataggttagaatcagtctgtgaagaacaggctgatacactgaaagagctgtatccttattcaaattgtcgaccactccaaggttgaaactgcagacttaatattttttattatttcaataattactattattatacaaaaaaaaaa

SEQ ID NO: 46766 - protein, 392 aa, Pinus radiata
MTLSVNGQSRVPPGFRFHPTEEELLYYYLKKKVSFEKIDLDVIRDVDLNKLEPWDIQERCKIGSTPQHDWYFFSHKDKKYPTGTRTNRATAAGFWKATGRDKAIHTNLKKIGMRKTLVFYKGRAPHGQKTDWIMHEYRLDDAEYPQANTFNELQEDGWVVCRVFKKRNHHKSQESAELSPKYGSKQFSNNKILSDSDCPSDNLTDQLHYTHQLNMCKQELEMQQYAFPHDQFMQLPQLESPKIPTCNNPPSSGIKRFFPDSRSGFFQLENIPNSKRPCSYPMTLDMTELEGSTVTTHDHMTEFKPTEEVQNLQDWTVLDRLVASHLNGQEVETPKLEVRTYGAPNSSSDHQALVDAATASGDQLTLLPQLRINRLNPHDYSSCEIDLWNFVK

SEQ ID NO: 46767 - DNA, 1188 bp, Arabidopsis thaliana
  CDS (1)..(1188)
atgaattcattttcccacgtccctccgggttttagatttcacccgacagatgaagaacttgtagactactacctgaggaaaaaagtcgcatcgaagagaatagaaattgatttcataaaggacattgatctttacaagattgagccatgggaccttcaagagttgtgcaaaattgggcatgaagagcagagtgattggtacttctttagccataaagacaagaagtatcccacagggactcgaaccaatagagcaacaaaagcagggttttggaaagccaccggaagagataaggctatctatttgaggcatagtctaattggcatgaggaaaacacttgtgttttacaagggaagagccccaaatggacaaaagtctgattggatcatgcacgaataccgcttagaaaccgatgaaaacggaactcctcaggaagaaggatgggttgtgtgtagggttttcaagaagagattggctgcagttagacgaatgggagattacgactcatccccttcacattggtacgatgatcaactttcttttatggcctccgagctcgagacaaacggtcaacgacggattctccccaatcatcatcagcagcagcagcacgagcaccaacaacatatgccatatggcctcaatgcatctgcttacgctctcaacaaccctaacttgcaatgcaagcaagagctagaactacactacaaccacctggtacaacgaaatcatcttcttgatgaatctcatttatcgttcctccaacttcctcaactagaaagccctaagattcaacaagataacagtaattgcaactctcttccttatggaacaagcaacatcgataataactcgagccataatgctaacttgcagcaatcaaatatcgcgcatgaggaacaattgaatcaaggaaatcagaacttcagctctctatacatgaacagcggcaacgagcaagtgatggaccaagtcacagactggagagttctcgataaatttgttgcttctcagctaagcaacgaggaggctgccacagcttctgcatctatacagaataatgccaaggacacaagcaatgctgagtaccaagttgatgaagaaaaagatccgaaaagggcttcagacatgggagaagaatatactgcttctacttcttcgagttgtcagattgatctatggaagtga

SEQ ID NO: 46768 - protein, 395 aa, Arabidopsis thaliana
MNSFSHVPPGFRFHPTDEELVDYYLRKKVASKRIEIDFIKDIDLYKIEPWDLQELCKIGHEEQSDWYFFSHKDKKYPTGTRTNRATKAGFWKATGRDKAIYLRHSLIGMRKTLVFYKGRAPNGQKSDWIMHEYRLETDENGTPQEEGWVVCRVFKKRLAAVRRMGDYDSSPSHWYDDQLSFMASELETNGQRRILPNHHQQQQHEHQQHMPYGLNASAYALNNPNLQCKQELELHYNHLVQRNHLLDESHLSFLQLPQLESPKIQQDNSNCNSLPYGTSNIDNNSSHNANLQQSNIAHEEQLNQGNQNFSSLYMNSGNEQVMDQVTDWRVLDKFVASQLSNEEAATASASIQNNAKDTSNAEYQVDEEKDPKRASDMGEEYTASTSSSCQIDLWK

SEQ ID NO: 46769 - DNA, 1077 bp, Arabidopsis thaliana
  CDS (1)..(1077)
atggctgataataaggtcaatctttcgattaatggacaatcaaaagtgcctccaggtttcagattccatcccaccgaagaagaacttctccattactatctccgtaagaaagttaactctcaaaagatcgatcttgatgtcattcgtgaagttgatctaaacaagcttgagccttgggatattcaagaggaatgtagaatcggttcaacgccacaaaacgactggtacttcttcagccacaaggacaagaagtatccaaccgggaccaggacgaaccgggcaacagtcgctggattctggaaagctaccggacgtgacaaaatcatctgcagttgtgtccggagaattggactgaggaagacactcgtgttctacaaaggaagagctcctcacggtcagaaatccgactggatcatgcatgagtatcgcctcgacgatactccaatgtctaatggctatgctgatgttgttacagaagatccaatgagctataacgaagaaggttgggtggtatgtcgagtgttcaggaagaagaactatcaaaagattgacgattgtcctaaaatcactctatcttctttacctgatgacacggaggaagagaaggggcccacctttcacaacactcaaaacgttaccggtttagaccatgttcttctctacatggaccgtaccggttctaacatttgcatgcccgagagccaaacaacgactcaacatcaagatgatgtcttattcatgcaactcccaagtcttgagacacctaaatccgagagcccggtcgaccaaagtttcctgactccaagcaaactcgatttctctcccgttcaagagaagataaccgaaagaccggtttgcagcaactgggctagtcttgaccggctcgtagcttggcaattgaacaatggtcatcataatccgtgtcatcgtaagagttttgatgaagaagaagaaaatggtgatactatgatgcagcgatgggatcttcattggaataatgatgataatgttgatctttggagtagtttcactgagtcttcttcgtctttagacccacttcttcatttatctgtatga

SEQ ID NO: 46770 - protein, 358 aa, Arabidopsis thaliana
MADNKVNLSINGQSKVPPGFRFHPTEEELLHYYLRKKVNSQKIDLDVIREVDLNKLEPWDIQEECRIGSTPQNDWYFFSHKDKKYPTGTRTNRATVAGFWKATGRDKIICSCVRRIGLRKTLVFYKGRAPHGQKSDWIMHEYRLDDTPMSNGYADVVTEDPMSYNEEGWVVCRVFRKKNYQKIDDCPKITLSSLPDDTEEEKGPTFHNTQNVTGLDHVLLYMDRTGSNICMPESQTTTQHQDDVLFMQLPSLETPKSESPVDQSFLTPSKLDFSPVQEKITERPVCSNWASLDRLVAWQLNNGHHNPCHRKSFDEEEENGDTMMQRWDLHWNNDDNVDLWSSFTESSSSLDPLLHLSV

SEQ ID NO: 46771 - DNA, 1185 bp, Arabidopsis thaliana
  CDS (1)..(1185)
atgaattcgttttcacaagtacctcctggcttcagatttcatcctactgatgaagaacttgtagactactacttgaggaaaaaagttgcatcaaagagaatagaaatcgatatcatcaaggatgttgatctttacaagattgagccatgtgatcttcaagagttatgcaagataggaaacgaagagcagagcgaatggtacttctttagtcataaagacaagaagtatcccacgggaactcgaaccaatagagccacgaaagcaggattttggaaagccactggaagagacaaggctatatatataagacatagtcttatcggtatgaggaaaacacttgtgttttacaaaggaagagccccaaatggtcagaaatccgattggatcatgcacgaatatcgcttagaaacaagtgaaaatggaacccctcaggaagaaggatgggtagtatgtagggtattcaagaagaaattggcagcgacagtgaggaaaatgggagattaccattcatcaccatcgcagcattggtacgatgatcagctctcttttatggcctccgagatcatttctagttctccacgacagtttcttcccaatcatcattataaccgccaccatcaccagcagacattgccttgtggcctcaatgcattcaacaacaacaatcctaacttgcaatgcaagcaagagctcgagttacattacaatcaaatggtacaacatcaacaacaaaaccatcatcttcgtgaatctatgtttctccagcttcctcagctcgaaagccctaccagtaattgcaattctgacaacaacaataacacaagaaatattagtaacttgcagaaatcatcaaatatatctcatgaggaacaattgcaacaagggaatcaaagtttcagctctctgtattacgatcaaggagtagagcaaatgactactgactggagagttctcgataaatttgttgcttcacagcttagcaatgatgaagaggctgcagccgtggtttcttcttcttctcatcaaaacaacgtcaagattgacacgagaaacacgggttatcatgtgatagatgagggaataaatttgccggagaatgattctgaaagggttgttgaaatgggagaagagtattcaaatgctcatgctgcttctacttcttcaagttgtcagattgatctctag

SEQ ID NO: 46772 - protein, 394 aa, Arabidopsis thaliana
MNSFSQVPPGFRFHPTDEELVDYYLRKKVASKRIEIDIIKDVDLYKIEPCDLQELCKIGNEEQSEWYFFSHKDKKYPTGTRTNRATKAGFWKATGRDKAIYIRHSLIGMRKTLVFYKGRAPNGQKSDWIMHEYRLETSENGTPQEEGWVVCRVFKKKLAATVRKMGDYHSSPSQHWYDDQLSFMASEIISSSPRQFLPNHHYNRHHHQQTLPCGLNAFNNNNPNLQCKQELELHYNQMVQHQQQNHHLRESMFLQLPQLESPTSNCNSDNNNNTRNISNLQKSSNISHEEQLQQGNQSFSSLYYDQGVEQMTTDWRVLDKFVASQLSNDEEAAAVVSSSSHQNNVKIDTRNTGYHVIDEGINLPENDSERVVEMGEEYSNAHAASTSSSCQIDL

SEQ ID NO: 46773 - DNA, 1098 bp, Arabidopsis thaliana
  CDS (1)..(1098)
atggagccaatggaatcttgtagcgttcctccaggatttaggttccatccgacggacgaagagcttgtcgggtactatctaaggaagaaaatcgcatcgcaaaagattgatctcgacgtcatcagagacatcgatctctacagaatagaaccatgggatctacaagaacaatgtcgaatcggttatgaggaacaaaatgaatggtatttttttagtcacaaggacaagaaatatccaacggggacaagaactaatagagcgaccatggctggattttggaaagccacgggaagagacaaagctgtttacgacaaaacaaaactaattggtatgaggaaaacacttgtgttctacaaaggacgtgcacctaatggcaagaaatccgattggatcatgcatgagtaccggctcgagtcagatgagaatgcaccgccccaggaagaaggatgggtggtttgtagagcattcaaaaaaagagctacagggcaagccaagaacacggaaacttggagctcaagttacttttacgatgaagttgcaccgaatggagttaactcggttatggaccccattgattacatatctaagcagcaacataacatttttgggaaaggtttgatgtgtaagcaagaactagaaggaatggttgatggtataaactatatacaatcgaatcaattcattcagctcccacaactccaaagcccttctctcccgctgatgaaaagaccttcaagctcgatgtccataacatcaatggataacaattacaactataaactcccattagcggatgaagaaagcttcgagtcattcataagaggagaggatagaaggaagaagaaaaagcaagtaatgatgacgggaaattggagagagttagacaagtttgttgcttcacaacttatgagccaagaagacaatggaacttcaagtttcgcaggtcatcatatagttaatgaagataaaaacaacaatgatgtggagatggattcgtcaatgtttttgagcgaaagagaagaagaaaacaggttcgtcagtgaattcttgagtacaaactcggattatgatattgggatttgcgtatttgataattga

SEQ ID NO: 46774 - protein, 365 aa, Arabidopsis thaliana
MEPMESCSVPPGFRFHPTDEELVGYYLRKKIASQKIDLDVIRDIDLYRIEPWDLQEQCRIGYEEQNEWYFFSHKDKKYPTGTRTNRATMAGFWKATGRDKAVYDKTKLIGMRKTLVFYKGRAPNGKKSDWIMHEYRLESDENAPPQEEGWVVCRAFKKRATGQAKNTETWSSSYFYDEVAPNGVNSVMDPIDYISKQQHNIFGKGLMCKQELEGMVDGINYIQSNQFIQLPQLQSPSLPLMKRPSSSMSITSMDNNYNYKLPLADEESFESFIRGEDRRKKKKQVMMTGNWRELDKFVASQLMSQEDNGTSSFAGHHIVNEDKNNNDVEMDSSMFLSEREEENRFVSEFLSTNSDYDIGICVFDN

SEQ ID NO: 46775 - DNA, 1095 bp, Arabidopsis thaliana
  CDS (1)..(1095)
atggagagcaccgattcttccggtggtccaccaccgccacaacctaaccttcctccaggcttccggtttcaccctaccgacgaagagcttgttgttcactacctcaaacgcaaagcagcctctgctcctttacctgtcgccatcatcgccgaagtcgatctctataaatttgatccatgggaacttcccgctaaagcatcgtttggagaacaagaatggtacttctttagtccacgagatcggaagtatccaaacggagcaagaccaaacagagcggcgacttcaggttattggaaagcgaccggtacagataaaccggtacttgcttccgacggtaaccaaaaggtgggcgtgaagaaggcactagtcttctacagtggtaaaccaccaaaaggcgttaaaagtgattggatcatgcatgagtatcgtctcatcgaaaacaaaccaaacaatcgacctcctggctgtgatttcggcaacaaaaaaaactcactcagacttgatgattgggtgttatgtagaatctacaagaagaacaacgcaagtcgacatgttgataacgataaggatcatgatatgatcgattacattttcaggaagattcctccgtctttatcaatggcggctgcttctacaggacttcaccaacatcatcataatgtctcaagatcaatgaatttcttccctggcaaattctccggtggtggttacgggattttctctgacggtggtaacacgagtatatacgacggcggtggcatgatcaacaatattggtactgactcagtagatcacgacaataacgctgacgtcgttggtttaaatcatgcttcgtcgtcaggtcctatgatgatggcgaatttgaaacgaactctcccggtgccgtattggcctgtagcagatgaggagcaagatgcatctccgagcaaacggtttcacggtgtaggaggaggaggaggagattgttcgaacatgtcttcctccatgatggaagagactccaccattgatgcaacaacaaggtggtgtgttaggagatggattattcagaacgacatcgtaccaattacccggtttaaattggtactcttcttaa

SEQ ID NO: 46776 - protein, 364 aa, Arabidopsis thaliana
MESTDSSGGPPPPQPNLPPGFRFHPTDEELVVHYLKRKAASAPLPVAIIAEVDLYKFDPWELPAKASFGEQEWYFFSPRDRKYPNGARPNRAATSGYWKATGTDKPVLASDGNQKVGVKKALVFYSGKPPKGVKSDWIMHEYRLIENKPNNRPPGCDFGNKKNSLRLDDWVLCRIYKKNNASRHVDNDKDHDMIDYIFRKIPPSLSMAAASTGLHQHHHNVSRSMNFFPGKFSGGGYGIFSDGGNTSIYDGGGMINNIGTDSVDHDNNADVVGLNHASSSGPMMMANLKRTLPVPYWPVADEEQDASPSKRFHGVGGGGGDCSNMSSSMMEETPPLMQQQGGVLGDGLFRTTSYQLPGLNWYSS

SEQ ID NO: 46777 - DNA, 1134 bp, Arabidopsis thaliana
  CDS (1)..(1134)
atggaatcggtggatcaatcatgtagtgttcctccgggattcagattccatccaacagatgaagagctcgttggttactatttaaggaaaaaagttgcatcgcaaaagatcgatcttgatgtcataagagatattgatctctacagaatcgaaccatgggatttacaagagagctgccgaatcggatatgaggaaagaaatgaatggtatttcttcagccacaaagataagaaatatccaacaggaacaagaacaaacagagcgaccatggctgggttttggaaagccacgggccgagacaaggctgtttacgacaagtcaaaactgattggtatgagaaaaacacttgtgttctacaaaggaagagcccctaatggccaaaaaaccgattggatcatgcatgaataccggctagagtcagatgagaatgcacctcctcaggaagaagggtgggtggtttgtagagcgttcaagaaaaagccaatgaccgggcaagccaagaacacagaaacttggagctcaagttacttttacgacgaattaccgagtggagtacgctcagttacggagcctcttaactacgtatctaagcagaaacaaaacgtttttgcacaagatttaatgttcaagcaagaactagaaggatcagatatcggtttaaacttcatccactgcgatcaattcattcaacttccgcagcttgaaagcccttcactccctcttaccaaaagaccagtgagcttgacgtcaattacatcattggagaagaataaaaatatctacaaaagacatttaatagaagaggatgtgagcttcaatgcgctaataagtagtggaaataaagataagaagaagaagaaaacatcagtgatgacgacggattggagagcactcgataaatttgttgcttctcaacttatgagccaagaagatggagtttcgggttttggaggtcatcatgaagaagataacaataaaatcggtcattacaataacgaagagagcaataacaagggatcagtagagactgcttcttccacgttattgagtgatagagaagaagagaacagattcatcagtggattattgtgttccaacttggactatgacttatatagggatttacatgtttga

SEQ ID NO: 46778 - protein, 377 aa, Arabidopsis thaliana
MESVDQSCSVPPGFRFHPTDEELVGYYLRKKVASQKIDLDVIRDIDLYRIEPWDLQESCRIGYEERNEWYFFSHKDKKYPTGTRTNRATMAGFWKATGRDKAVYDKSKLIGMRKTLVFYKGRAPNGQKTDWIMHEYRLESDENAPPQEEGWVVCRAFKKKPMTGQAKNTETWSSSYFYDELPSGVRSVTEPLNYVSKQKQNVFAQDLMFKQELEGSDIGLNFIHCDQFIQLPQLESPSLPLTKRPVSLTSITSLEKNKNIYKRHLIEEDVSFNALISSGNKDKKKKKTSVMTTDWRALDKFVASQLMSQEDGVSGFGGHHEEDNNKIGHYNNEESNNKGSVETASSTLLSDREEENRFISGLLCSNLDYDLYRDLHV

SEQ ID NO: 46779 - DNA, 1047 bp, Arabidopsis thaliana
  CDS (1)..(1047)
atggaaagtctcgcacacattcctcccggttatcgattccatccgaccgatgaagaactcgttgactattatctcaagaacaaagttgcattcccgggaatgcaagttgatgttatcaaagatgttgatctctacaaaatcgagccatgggacatccaagagttatgtggaagagggacaggagaagagagggaatggtatttctttagccacaaggacaagaaatatccaactgggacacgaaccaatagagcaacgggctccggattttggaaagcaacgggtcgagacaaggccatttactcaaagcaagagcttgttgggatgaggaagactcttgtcttttacaaaggtagggccccaaatggtcagaaatctgattggataatgcacgaataccgtcttgagaccgatgaaaatggaccgcctcatgaggaaggatgggtggtttgtcgcgctttcaagaagaagctaaccacgatgaactacaacaatccaagaacaatgatgggatcatcatcaggccaagaatctaactggttcacgcagcaaatggatgtggggaatggtaattactatcatcttcctgatctagagagtccgagaatgtttcaaggctcatcatcatcatcactatcatcattacatcagaatgatcaagacccttatggtgtcgtactcagcactattaacgcaaccccaactacaataatgcaacgagatgatggtcatgtgattaccaatgatgatgatcatatgatcatgatgaacacaagtactggtgatcatcatcaatcaggattactagtcaatgatgatcataatgatcaagtaatggattggcaaacgcttgacaagtttgttgcttctcagctaatcatgagccaagaagaggaagaagttaacaaagatccatcagataattcttcgaatgaaacatttcatcatctctctgaagagcaagctgcaacaatggtttcgatgaatgcttcttcctcttcttctccatgttccttctactcttgggctcaaaatacacacacgtaa

SEQ ID NO: 46780 - protein, 348 aa, Arabidopsis thaliana
MESLAHIPPGYRFHPTDEELVDYYLKNKVAFPGMQVDVIKDVDLYKIEPWDIQELCGRGTGEEREWYFFSHKDKKYPTGTRTNRATGSGFWKATGRDKAIYSKQELVGMRKTLVFYKGRAPNGQKSDWIMHEYRLETDENGPPHEEGWVVCRAFKKKLTTMNYNNPRTMMGSSSGQESNWFTQQMDVGNGNYYHLPDLESPRMFQGSSSSSLSSLHQNDQDPYGVVLSTINATPTTIMQRDDGHVITNDDDHMIMMNTSTGDHHQSGLLVNDDHNDQVMDWQTLDKFVASQLIMSQEEEEVNKDPSDNSSNETFHHLSEEQAATMVSMNASSSSSPCSFYSWAQNTHT

SEQ ID NO: 46781 - DNA, 879 bp, Arabidopsis thaliana
  CDS (1)..(879)
atgatgaaggttgatcaagattattcgtgtagtataccgcctggatttaggtttcatccgacagatgaagaacttgtcggatattatctcaagaagaaaatcgcctcccagaggattgatctcgacgttatcagagaaattgatctttacaagatcgaaccatgggatctacaagagagatgtaggatagggtacgaggagcaaacggagtggtatttcttcagccatagagacaagaagtatccgactgggactaggacaaaccgagccaccgtggccggtttctggaaagcaacgggccgggacaaggcggtttacctcaactccaaacttatcggtatgagaaaaacgcttgtcttttaccgaggtcgagcgcctaatggccaaaagtccgattggatcattcacgaatactacagcctcgagtcacaccagaactctcctccacaggaagaaggatgggtagtgtgtagagcatttaagaaacgaacgaccatcccaacaaaaaggaggcaactttgggatccgaactgcttattctacgacgacgccactctcttggaacctctcgacaagcgagccagacataatcctgattttaccgccacaccgttcaagcaagaactactctccgaggccagtcacgtccaggatggagatttcggatctatgtaccttcaatgcatcgatgatgatcaattctcccagcttcctcagctcgagagcccctctcttccgtcggaaataactccccatagtactactttttctgagaacagtagccggaaagatgacatgagctccgagaagaggatcactgactggagatatctagataagttcgtggcgtctcaatttttgatgagtggagaagactaa

SEQ ID NO: 46782 - protein, 292 aa, Arabidopsis thaliana
MMKVDQDYSCSIPPGFRFHPTDEELVGYYLKKKIASQRIDLDVIREIDLYKIEPWDLQERCRIGYEEQTEWYFFSHRDKKYPTGTRTNRATVAGFWKATGRDKAVYLNSKLIGMRKTLVFYRGRAPNGQKSDWIIHEYYSLESHQNSPPQEEGWVVCRAFKKRTTIPTKRRQLWDPNCLFYDDATLLEPLDKRARHNPDFTATPFKQELLSEASHVQDGDFGSMYLQCIDDDQFSQLPQLESPSLPSEITPHSTTFSENSSRKDDMSSEKRITDWRYLDKFVASQFLMSGED

SEQ ID NO: 46783 - DNA, 1116 bp, Arabidopsis thaliana
  CDS (1)..(1116)
atggagatagggtcgtcatccacggtggctggcggaggacagctttcggtgcctccgggattccggtttcatccaacggaggaggagcttctttactattacctcaagaagaaggtttcttatgaaccaattgatttagatgtaattagagaagttgatctcaacaagctggaaccttgggaacttaaagagaaatgcagaatcgggtcgggtcctcaaaacgagtggtatttctttagccacaaggacaagaaatatccgactgggacccgaacgaaccgggcgacagcagccgggttctggaaagctactggtagagacaaatccatacatctcaacagctccaagaagattggacttcgtaagactcttgtcttctacactggtcgtgctcctcatggccaaaaaaccgaatggatcatgcacgaatatcgcttggacgatagcgaaaacgaaattcaggaagatgggtgggttgtatgcagagtgttcaagaagaagaatcatttcagaggatttcaccaagaacaagagcaagatcatcatcatcatcaccaatacataagcaccaacaatgatcatgatcaccatcatcacattgactccaattcaaacaatcattctcctttgatcctacatcctctggatcatcatcaccaccatcatcacattggacgacaaatccacatgccattacatgagtttgcaaacactctgagccatggctcaatgcatctacctcagctctttagccctgactcagctgcagcggcggctgccgcagcagcatcagcccaaccatttgtgtcgccaatcaacactacggacattgaatgttcacagaatctactgaggttgacttctaacaacaactatggtggagactggtcgtttctggacaagcttctcactacaggcaacatgaatcagcaacagcagcagcaagtgcagaaccatcaagcaaaatgttttggtgacttgagtaacaacgataataacgatcaggctgatcatttgggtaacaacaatggtggttcttcttcatctccagttaatcaaaggtttccgtttcactacttgggaaacgacgctaatcttctcaagttcccaaagtag

SEQ ID NO: 46784 - protein, 371 aa, Arabidopsis thaliana
MEIGSSSTVAGGGQLSVPPGFRFHPTEEELLYYYLKKKVSYEPIDLDVIREVDLNKLEPWELKEKCRIGSGPQNEWYFFSHKDKKYPTGTRTNRATAAGFWKATGRDKSIHLNSSKKIGLRKTLVFYTGRAPHGQKTEWIMHEYRLDDSENEIQEDGWVVCRVFKKKNHFRGFHQEQEQDHHHHHQYISTNNDHDHHHHIDSNSNNHSPLILHPLDHHHHHHHIGRQIHMPLHEFANTLSHGSMHLPQLFSPDSAAAAAAAAASAQPFVSPINTTDIECSQNLLRLTSNNNYGGDWSFLDKLLTTGNMNQQQQQQVQNHQAKCFGDLSNNDNNDQADHLGNNNGGSSSSPVNQRFPFHYLGNDANLLKFPK

SEQ ID NO: 46785 - DNA, 1101 bp, Oryza sativa subsp
  CDS (1)..(1101)
atgcatcctaatggcgcgccgctggccgtgccaccgggtttccggttccatccgacggacgaggaattgctctactactacctgaggaagaaggttgcttatgaggccatagatctcgacgtcatcagggagattgacctcaacaagcttgagccttgggatctcaaagatcggtgcaggattgggacggggccgcaggaggagtggtacttcttcagccacaaggacaagaagtacccgacggggacgaggaccaaccgcgccacggcggccggcttctggaaggccaccggccgtgacaaggccatcttcctcggcggcggcggcggcacgaggatcgggctgaggaagacgctggtgttctacaccggcagggccccgcacggcaagaagaccgactggatcatgcacgagtaccgcctcgacgacgacaatgtcgacgtcccggaggaaggatgggtggtgtgtagggtattcaagaagaagagcatccatcagaggggcttcgaccagccggacatggcggcggctgccgacgaggacgagctccggtaccagctgctccatggcgtgggcatgtcgtcgtcgccggtcgaccagaagcacgtgctgctccaagagcagctcgtcgcgcacggcgcccatggcggcggcttcgtcgtcccggcgttcgacgcctccatgcacctcccgcagctcgccagcgccgacgcggcgccgtgcggcggcggcggcggcggtggcggcggccatgtcgcgttcgcctccatgaacccgctcgacgccgccggctgcggctcgcagaacatgatgacgatgaagatggcagcgacatccggtggcgagatgctgctgatgagaagcggcggcgtcgacggcggccgcttcggcgccgccgccgactggtcgatccttgacaagctcctggcgtcgcaccagaacctcgaccagctcttccatggcaaggtcgccggagcgcatcagcagcagcagcagcagcagcagcagatggccatggacgccgcctcgtcgttgcagaggttgccgttccaccattacctcgggttggaagctgcagatcttctcaagttttctatgtag

SEQ ID NO: 46786 - protein, 366 aa, Oryza sativa subsp
MHPNGAPLAVPPGFRFHPTDEELLYYYLRKKVAYEAIDLDVIREIDLNKLEPWDLKDRCRIGTGPQEEWYFFSHKDKKYPTGTRTNRATAAGFWKATGRDKAIFLGGGGGTRIGLRKTLVFYTGRAPHGKKTDWIMHEYRLDDDNVDVPEEGWVVCRVFKKKSIHQRGFDQPDMAAAADEDELRYQLLHGVGMSSSPVDQKHVLLQEQLVAHGAHGGGFVVPAFDASMHLPQLASADAAPCGGGGGGGGGHVAFASMNPLDAAGCGSQNMMTMKMAATSGGEMLLMRSGGVDGGRFGAAADWSILDKLLASHQNLDQLFHGKVAGAHQQQQQQQQQMAMDAASSLQRLPFHHYLGLEAADLLKFSM

SEQ ID NO: 46787 - DNA, 1137 bp, Oryza sativa subsp
  CDS (1)..(1137)
atggacactttctcccatgtgccacctggtttccgctttcaccctactgacgaggagctcgtcgattactacctgaggaagaaggtggcatcgaagaaaatcgacctcgacgttataaaagacgtcgacctgtacaaaatcgagccctgggatctccaagagaagtgcaagattggcatggaagaacagaatgactggtacttcttcagccacaaagacaaaaagtacccgacgggcacccgcaccaaccgggccacgggcgccggcttctggaaggcgacggggagggacaagcccatctacgcccgcagctgcctcgtcgggatgaggaagacactcgtcttctacaagggccgtgccccccaatggccagaagtcggactggatcatgcacgagtaccgcctcgagaccaacgaaaacggcaccacacctgtatgcatatatttgatgaggaaggatgggtggtctgccgggtgttcaagaagcgggtggcgacggtgcggagaatggccgacggatcaccgtgctggttcgatgaccacggcgccgtcggtgcgttcatgccggacctcagctcgccgaggcagctactgccgcaccaccaccaccaccacccgggctcgtcggcggcgctgtaccacggccaccaccaccagcagctgcagcagatgtacggtcactgcaagccggagctggagtaccaccacctcctgccgcaggaggccttcctgcagcatcttcctcagctggagagccccaagccgccgccgccgcctcctgcggcggcggcctacattggcggccacctcggatcgtcgtcgtccaccgcccttactactcacgacgacgaagcctccggctccgccgcgcagcagcagccgccgtcgttggaggctgtttacatggccggcgccggcgtcggcgtcggcatcggcgtcgacgcgtcggtgacggactggaggctactggacaagttcgtcgcgtctcagctgctcagcaaggagtccatgtccagctacggatcccatccggctcaggtgtttcaggctgcagacggtggcaagcatgaagaggctttggactacgcttcgacgtcggccggctccggtggcggcgaggctgatctgtggaaatag

SEQ ID NO: 46788 - protein, 378 aa, Oryza sativa subsp
MDTFSHVPPGFRFHPTDEELVDYYLRKKVASKKIDLDVIKDVDLYKIEPWDLQEKCKIGMEEQNDWYFFSHKDKKYPTGTRTNRATGAGFWKATGRDKPIYARSCLVGMRKTLVFYKGRAPQWPEVGLDHARVPPRDQRKRHHTCMHIFDEEGWVVCRVFKKRVATVRRMADGSPCWFDDHGAVGAFMPDLSSPRQLLPHHHHHHPGSSAALYHGHHHQQLQQMYGHCKPELEYHHLLPQEAFLQHLPQLESPKPPPPPPAAAAYIGGHLGSSSSTALTTHDDEASGSAAQQQPPSLEAVYMAGAGVGVGIGVDASVTDWRLLDKFVASQLLSKESMSSYGSHPAQVFQAADGGKHEEALDYASTSAGSGGGEADLWK

SEQ ID NO: 46789 - DNA, 1155 bp, Oryza sativa subsp
  CDS (1)..(1155)
atggaatcatgcgtccctcctgggttcaggttccaccccaccgacgaggagctcgtcggctactacctccgcaagaaggtcgcctcccagaagatcgacctcgacgtcatccgcgacatcgatctctaccgcatcgaaccctgggatctccaaggtacaactagagatcgtatgattaatttgagtttcagagatgatcattgtggcattatttatcctaattgtgttgcctgccaaagcgagtggtacttcttcagctacaaggacaggaagtacccgacggggacgaggacgaacagggcgacaatggcggggttctggaaggcgacggggagggacaaggcggtgcacgacaagagcaggctcatcggcatgaggaagacactcgtcttctataagggcagggcgcctaatggccagaagaccgactggatcatgcacgagtaccgcctcgagaccgacgagaacgcgccgccacaggaagaaggatgggtggtgtgccgagcattcaagaagaggacggcgtatccggcgaggagcatggtggagacgtgggactactccttgcacgagcgcaacatcatgagcgccgcggcggcggcggcgttcgccgatccgagcgcggcgtacgcgcagatgaggcggcagcacaggagcgggcggttcaagcaggaggcggagctggacggcgccgccacagccctcctccactactccagccacctcgccgagctgccgcagctcgagagcccctccgcggctgcggcgccgctccagcccaacccgagccagctggccaccgccggcgaggacgacgactgcaagggcgataatggcggtaggagggccaagaaagcccgcgccgccggcgacaaggtggcgacgaccacggactggagagcgctcgacaagttcgtcgcgtcgcagcttagccccggggagtgtggcagcatggaggcaacggcggaagccgcggcggcggcagtcgccggtgtgagctcgccgctggaccacggcgatgacgacatggcagcattgctgtttctcaacagcgacgagagagacgaggtcgacaggtggacggggttgctcggctccggcgccggcgcgagcggcgtcgacggcgacctcggaatctgtgtgtttgacaaatga

SEQ ID NO: 46790 - protein, 384 aa, Oryza sativa subsp
MESCVPPGFRFHPTDEELVGYYLRKKVASQKIDLDVIRDIDLYRIEPWDLQGTTRDRMINLSFRDDHCGIIYPNCVACQSEWYFFSYKDRKYPTGTRTNRATMAGFWKATGRDKAVHDKSRLIGMRKTLVFYKGRAPNGQKTDWIMHEYRLETDENAPPQEEGWVVCRAFKKRTAYPARSMVETWDYSLHERNIMSAAAAAAFADPSAAYAQMRRQHRSGRFKQEAELDGAATALLHYSSHLAELPQLESPSAAAAPLQPNPSQLATAGEDDDCKGDNGGRRAKKARAAGDKVATTTDWRALDKFVASQLSPGECGSMEATAEAAAAAVAGVSSPLDHGDDDMAALLFLNSDERDEVDRWTGLLGSGAGASGVDGDLGICVFDK

SEQ ID NO: 46791 - DNA, 1095 bp, Medicago truncatula
  CDS (1)..(1095)
atgaatacattttcacatgtacctccaggctttcgttttcatccaaccgacgaagaacttgttgattactacctcaggaagaaggtatcgtctaaaaagattgatctcgatgtcatcaaagacgttgatctctataaaattgaaccatgggatcttcaagaattatgcaaaataggaagtgatgaacaaaatgactggtatttctttagtcataaagataagaagtatccaacaggaactcgaacgaatagagcaacaaaagcaggattctggaaagccacaggaagagataaggcaatatactcaaaacaatttctggttgggatgagaaagactctagtgttttacaaaggacgtgccccaaatggacagaaatctgattggatcatgcatgagtaccgtcttgaaactaatcaaaatggaatttctcaggaagaaggatgggttgtatgcagagtattcaagaagagaatgacaacagtgcaaaaaatgaatgagtatgatcaatcaccatgtaactggtatgatgatcaagtttccttcatgccagatcttgaatctccaacccgaaccaattctcaccctcctaactatacttcatatcactcatgcaaaccagaactagaattaattcaatataacacaccccaccaataccatgatgctaattttctccaacttccacaccttgaaagtccaaaaattactcaatctattatcccttataatcatcatgctcatgcaaacaataacaatattgcacttactcaacagatgcaatatttgcagtaccatcaacaaaatcttcactcactttatggtggtaacagcagtactggcaatgatgaacaagttactgattggagagtgcttgacaagtttgttgcttctcagctaagtcatgaagataatgataataataataataatcaagatcatgtttctaataaagaaactagttctttctccaatgcagctattcttcatgtggctgaacaaattactcttcttgataatggatccaaaaagaatgaagtttctgaggaacatgcttcaacttctacctccagttgccacatggaactttggaagtga

SEQ ID NO: 46792 - protein, 364 aa, Medicago truncatula
MNTFSHVPPGFRFHPTDEELVDYYLRKKVSSKKIDLDVIKDVDLYKIEPWDLQELCKIGSDEQNDWYFFSHKDKKYPTGTRTNRATKAGFWKATGRDKAIYSKQFLVGMRKTLVFYKGRAPNGQKSDWIMHEYRLETNQNGISQEEGWVVCRVFKKRMTTVQKMNEYDQSPCNWYDDQVSFMPDLESPTRTNSHPPNYTSYHSCKPELELIQYNTPHQYHDANFLQLPHLESPKITQSIIPYNHHAHANNNNIALTQQMQYLQYHQQNLHSLYGGNSSTGNDEQVTDWRVLDKFVASQLSHEDNDNNNNNQDHVSNKETSSFSNAAILHVAEQITLLDNGSKKNEVSEEHASTSTSSCHMELWK

SEQ ID NO: 46793 - DNA, 1440 bp, Arabidopsis thaliana
  CDS (1)..(1440)
atggctcctgtctcgttacctccaggtttccgattccatccaacagacgaggaactaattacttactatctaaaaagaaagatcaacggtctagaaatcgaacttgaagttatcgctgaagttgatctttacaagtgtgagccatgggacttaccagggaagtccttgcttccgagcaaagaccaagaatggtacttcttcagcccacgagaccggaagtatcccaacggctcaaggacaaaccgggcaactaaaggcggttattggaaggctacaggtaaagaccgccgagttagttggagagaccgagccataggaaccaagaagacattggtttactaccgtgggcgcgcgccacatggcataagaactggttgggtcatgcacgaatatcgacttgatgaaacagaatgtgagccttctgcatacggcatgcaggacgcatatgcactttgtcgtgtgttcaaaaagattgttattgaagctaagccaagagatcaacatcggtcatatgtccacgcgatgtcgaatgtgagtggtaattgctcatcgagttttgacacttgttcggatctcgaaatcagttcaactactcatcaagttcaaaacacattccaaccgcgatttggcaacgagcgatttaactccaacgcaatcagcaacgaggattggtcacaatactacggttcttcttatagaccgttccctactccatataaggttaacacagagatcgaatgttcaatgttacaacacaatatatatctaccaccgttgcgtgtagagaactctgcgtttagtgattccgatttcttcacgagtatgactcacaacaacgaccatggcgttttcgatgactttacttttgctgcaagtaactccaaccacaataatagcgttggtgatcaagtgatccacgttggcaattatgatgaacaattaataacatctaaccgtcatatgaaccagactggttatataaaagagcagaagatcagatcgagtttggataatactgacgaagatccaggatttcatggtaacaataccaatgacaacatagatatcgatgattttctctcgtttgatatatataacgaggacaacgtgaatcaaatagaagataatgaagacgtgaatacaaatgaaacccttgattcatcgggattcgaggtggttgaagaagaaactagatttaacaaccaaatgctcatctcgacatatcaaacgacaaagattctatatcaccaagtcgtaccttgtcacacgttgaaagttcacgtcaatcctattagtcacaatgtggaagagagaacattgttcattgaagaggacaaagattcttggttacaaagagctgagaagatcacgaagacaaaactaacactttttagtttaatggctcagcaatactacaaatgtcttgctatttttttctga

SEQ ID NO: 46794 - protein, 479 aa, Arabidopsis thaliana
MAPVSLPPGFRFHPTDEELITYYLKRKINGLEIELEVIAEVDLYKCEPWDLPGKSLLPSKDQEWYFFSPRDRKYPNGSRTNRATKGGYWKATGKDRRVSWRDRAIGTKKTLVYYRGRAPHGIRTGWVMHEYRLDETECEPSAYGMQDAYALCRVFKKIVIEAKPRDQHRSYVHAMSNVSGNCSSSFDTCSDLEISSTTHQVQNTFQPRFGNERFNSNAISNEDWSQYYGSSYRPFPTPYKVNTEIECSMLQHNIYLPPLRVENSAFSDSDFFTSMTHNNDHGVFDDFTFAASNSNHNNSVGDQVIHVGNYDEQLITSNRHMNQTGYIKEQKIRSSLDNTDEDPGFHGNNTNDNIDIDDFLSFDIYNEDNVNQIEDNEDVNTNETLDSSGFEVVEEETRFNNQMLISTYQTTKILYHQVVPCHTLKVHVNPISHNVEERTLFIEEDKDSWLQRAEKITKTKLTLFSLMAQQYYKCLAIFF

SEQ ID NO: 46795 - DNA, 1206 bp, Vitis vinifera
  CDS (1)..(1206)
  misc_feature (592)..(592): r is g or a
  misc_feature (941)..(941): y is t or c
  misc_feature (1047)..(1047): y is t or c
atgaatctatcagtgaatggtcagtctcaggtccctccagggttccgattccatcctacagaagaggagcttctgcactactatttgaggaagaaggtggcctatgagaagatagacctggatgtgattcgtgatgttgatcttaataagcttgagccctgggatattcaagagaaatgcaaaataggatccactccacagaatgattggtacttcttcagtcacaaagataagaagtaccccacagggacaagaacaaatcgcgccaccgcagcagggttctggaaagccactgggcgcgataaggttatctacagtagctttagaagaattggaatgaggaagacactggttttctacaagggtcgagccccacatggacaaaagtccgattggatcatgcatgagtacaggcttgaggagaacaccccagttcatgacaccatggcatccaattcactgggagagtccatgccagaagatggttgggtggtctgccgcgttttcagaaagaaaaactaccagaagaccttggagagccctaaaagcacatcaaactctatggattcaaggacccagatgctcaattcargcaacgatggggttctagatcagatactttcctacatgggaaggacttgcaagcaggaaaatgaagcaatcagcaacgtgaacttctctgacagcaataacaccatgaggtttctcaaccaaaacaacacaggcatcagcgagggtctccaagaaaggtttatgcatcttccaaggctggagagcccaactcttccttctctgcccaacaacagctcacactttgatcaggaacggtgttttaatattgcttgcttgcaatcaattgatgagatgctcagaggaagtgagccttcctctgagaaccaaggcagtgggtgtaacaccaccccagttcatgaccccaaagytgggctcaatgactgggttgcctttgacaggctggtggcttctcagctcaatggtcaagtggacaccaagcaactctcctgtttcagtacagaccccaacatgggyttctgcctttctcctgaccatgatgtagaattatcacacctacgttcgagtagaccgaatccaaacccccagaactataacagcgagatggatctgtggaacttcactcgatcatcctcctcctcctcatcagacccattaggccatttgtcggtataa

SEQ ID NO: 46796 - protein, 401 aa, Vitis vinifera
  misc_feature (198)..(198): The Xaa at location 198 stands for Gly, or Ser.
  misc_feature (314)..(314): The Xaa at location 314 stands for Ala, or Val.
MNLSVNGQSQVPPGFRFHPTEEELLHYYLRKKVAYEKIDLDVIRDVDLNKLEPWDIQEKCKIGSTPQNDWYFFSHKDKKYPTGTRTNRATAAGFWKATGRDKVIYSSFRRIGMRKTLVFYKGRAPHGQKSDWIMHEYRLEENTPVHDTMASNSLGESMPEDGWVVCRVFRKKNYQKTLESPKSTSNSMDSRTQMLNSXNDGVLDQILSYMGRTCKQENEAISNVNFSDSNNTMRFLNQNNTGISEGLQERFMHLPRLESPTLPSLPNNSSHFDQERCFNIACLQSIDEMLRGSEPSSENQGSGCNTTPVHDPKXGLNDWVAFDRLVASQLNGQVDTKQLSCFSTDPNMGFCLSPDHDVELSHLRSSRPNPNPQNYNSEMDLWNFTRSSSSSSSDPLGHLSV

SEQ ID NO: 46797 - DNA, 1095 bp, Medicago truncatula
  CDS (1)..(1095)
atgatgttagcaatggaagaagtactatgtgaacttagtgatcatgaaaagaaaaacgagcaaggtctaccacctggtttcaggtttcacccaactgatgaagaactcattaccttttatttggcttctaaggttttcaaaaatacttatttcaataatgtcaagtttgctgaagttgacctcaacagatgtgagccatgggaacttccagaaatggcaaagatgggagaaagagagtggtatctgttcagcttgagagacagaaaatatccaactgggcttagaacaaacagagcaacaagtgctggttactggaaagcaactgggaaggacaaggaagtttacagctgtagtagtagatcccttttggggatgaagaagacccttgttttctacaaaggaagggcccctcgtggtgaaaagaccaaatgggtcatgcatgagtaccgtttacactctcatcacttttctccttcgaatacctgtaaggaagagtgggtgatatgcagaatatttcataaatcaggggaaaagagaaattcactactccaaattcaaggacatttaggtggtaatcctaatttaagcccccaaaaaagctgtttacctcctacaccacttttacttgcaacttcatttacacaactagaccaaaatgaccaattactctcacattctcataatattttcccattacctacattccaaccttccttctcaatgatcaatcacaccaccagaaacaacaataatagtccatcttcagaactactcttcaagtcacaacaaaattacaccatgaagcagaccattccaaaaacagaagctactttctatgatcagcagaaatcaatagatgatgctcttaacataagatggattattgacaataataataattatgaaaactctttattccctgtggagatggagatggagatggagatggatggtgctgctcatgatctgattgcattctcaggagctgctacaaatgctgaatttagggacatatcaattattaacagtagaggaggaggaggagtagttggtcctatgggaatagattcttggccacatgctcaacttgtctaa

SEQ ID NO: 46798 - protein, 364 aa, Medicago truncatula
MMLAMEEVLCELSDHEKKNEQGLPPGFRFHPTDEELITFYLASKVFKNTYFNNVKFAEVDLNRCEPWELPEMAKMGEREWYLFSLRDRKYPTGLRTNRATSAGYWKATGKDKEVYSCSSRSLLGMKKTLVFYKGRAPRGEKTKWVMHEYRLHSHHFSPSNTCKEEWVICRIFHKSGEKRNSLLQIQGHLGGNPNLSPQKSCLPPTPLLLATSFTQLDQNDQLLSHSHNIFPLPTFQPSFSMINHTTRNNNNSPSSELLFKSQQNYTMKQTIPKTEATFYDQQKSIDDALNIRWIIDNNNNYENSLFPVEMEMEMEMDGAAHDLIAFSGAATNAEFRDISIINSRGGGGVVGPMGIDSWPHAQLV

SEQ ID NO: 46799 - DNA, 1287 bp, Sorghum bicolor
  CDS (1)..(1287)
atgagcatctcggtgaacgggcagtcggtggtgccgccggggttccggttccacccgacggaggaggagcttctgacctactacctcaagaagaaggtggcgtcggagcgcatcgacctggacgtcatccgcgacgtcgacctgaacaagctcgagccatgggacatccaagagaagtgccgcatcggttctggcccccagaacgactggtacttcttcagccacaaggacaagaagtacccgacggggacgcgcaccaaccgcgccaccgccgccggcttctggaaggccaccggccgcgacaaggccatctacgcgtccggcgcccgccgcatcggcatgcgcaagacgctcgtcttctacaagggtcgtgccccgcacggccagaagtccgactggatcatgcacgagtaccgcctcgagccggcgctcgacgtcgacgccgccgccggtagtgcctccgcccaccacgccgccgccggggccgccgccgatcatcacccctactacacctcgtcgtcgccgcctgctcttcctaccgcaatccgtggcgcggccggagaccaacaagcggcgcaggagcaggaagggtgggtgatctgcagggtgttcaagaagaagaacctcgttcaccacggccagagcagcggcggcggcgtgacagcagcaggatccaagatggcgtctgcggcggcgcccatggagggcagcccgagccactgctcgtcggtgaccgtcatcagtgaccacaccatgaacaagcaccaggcgcaggcgatgctgcagcactccgccagcgacgacgacgcgctcgaccacatcctgcagtacatgggcggcggcggcggcaagcagccggacaccaagccggtgctgctggaccatcaccaccaccaccacctagctgcagcagctactacgacgaccaccgcgtgctctgccggcggcgcgggtctctacgggaagttcatgaagctcccgcccctcgagcacgccggcggcggcggcgggctgctgccgagccctgcaggggcgtgcgactacggcgccgccgacgcctcggggatcgccgactgggacgcgctggaccggctcgccgcgtacgagctcaacggcctctccgacgcgtccaagaacatgtccgccttcttcgacgaacccagcgccaccgccgccttctcctcctcctcctcgtccgtgcacgcggccgccgtcgacggcgacctgtggagcctggcgaggtcggtgtcggcgttgcacgcggacttgacgatgaacaacgtctag

SEQ ID NO: 46800 - protein, 428 aa, Sorghum bicolor
MSISVNGQSVVPPGFRFHPTEEELLTYYLKKKVASERIDLDVIRDVDLNKLEPWDIQEKCRIGSGPQNDWYFFSHKDKKYPTGTRTNRATAAGFWKATGRDKAIYASGARRIGMRKTLVFYKGRAPHGQKSDWIMHEYRLEPALDVDAAAGSASAHHAAAGAAADHHPYYTSSSPPALPTAIRGAAGDQQAAQEQEGWVICRVFKKKNLVHHGQSSGGGVTAAGSKMASAAAPMEGSPSHCSSVTVISDHTMNKHQAQAMLQHSASDDDALDHILQYMGGGGGKQPDTKPVLLDHHHHHHLAAAATTTTTACSAGGAGLYGKFMKLPPLEHAGGGGGLLPSPAGACDYGAADASGIADWDALDRLAAYELNGLSDASKNMSAFFDEPSATAAFSSSSSSVHAAAVDGDLWSLARSVSALHADLTMNNV

SEQ ID NO: 46801 - DNA, 1230 bp, Arabidopsis thaliana
  CDS (1)..(1230)
atgaattcattttcccacgtccctccgggttttagatttcacccgacagatgaagaacttgtagactactacctgaggaaaaaagtcgcatcgaagagaatagaaattgatttcataaaggacattgatctttacaagattgagccatgggaccttcaaggaaagattttaaaagtctttttttattcgtttgtggaaatagagttgtgcaaaattgggcatgaagagcagagtgattggtacttctttagccataaagacaagaagtatcccacagggactcgaaccaatagagcaacaaaagcagggttttggaaagccaccggaagagataaggctatctatttgaggcatagtctaattggcatgaggaaaacacttgtgttttacaagggaagagccccaaatggacaaaagtctgattggatcatgcacgaataccgcttagaaaccgatgaaaacggaactcctcaggaagaaggatgggttgtgtgtagggttttcaagaagagattggctgcagttagacgaatgggagattacgactcatccccttcacattggtacgatgatcaactttcttttatggcctccgagctcgagacaaacggtcaacgacggattctccccaatcatcatcagcagcagcagcacgagcaccaacaacatatgccatatggcctcaatgcatctgcttacgctctcaacaaccctaacttgcaatgcaagcaagagctagaactacactacaaccacctggtacaacgaaatcatcttcttgatgaatctcatttatcgttcctccaacttcctcaactagaaagccctaagattcaacaagataacagtaattgcaactctcttccttatggaacaagcaacatcgataataactcgagccataatgctaacttgcagcaatcaaatatcgcgcatgaggaacaattgaatcaaggaaatcagaacttcagctctctatacatgaacagcggcaacgagcaagtgatggaccaagtcacagactggagagttctcgataaatttgttgcttctcagctaagcaacgaggaggctgccacagcttctgcatctatacagaataatgccaaggacacaagcaatgctgagtaccaagttgatgaagaaaaagatccgaaaagggcttcagacatgggagaagaatatactgcttctacttcttcgagttgtcagattgatctatggaagtga

SEQ ID NO: 46802 - protein, 409 aa, Arabidopsis thaliana
MNSFSHVPPGFRFHPTDEELVDYYLRKKVASKRIEIDFIKDIDLYKIEPWDLQGKILKVFFYSFVEIELCKIGHEEQSDWYFFSHKDKKYPTGTRTNRATKAGFWKATGRDKAIYLRHSLIGMRKTLVFYKGRAPNGQKSDWIMHEYRLETDENGTPQEEGWVVCRVFKKRLAAVRRMGDYDSSPSHWYDDQLSFMASELETNGQRRILPNHHQQQQHEHQQHMPYGLNASAYALNNPNLQCKQELELHYNHLVQRNHLLDESHLSFLQLPQLESPKIQQDNSNCNSLPYGTSNIDNNSSHNANLQQSNIAHEEQLNQGNQNFSSLYMNSGNEQVMDQVTDWRVLDKFVASQLSNEEAATASASIQNNAKDTSNAEYQVDEEKDPKRASDMGEEYTASTSSSCQIDLWK

SEQ ID NO: 46803 - DNA, 1257 bp, Arabidopsis thaliana
  CDS (1)..(1257)
atgaattcgttttcacaagtacctcctggcttcagatttcatcctactgatgaagaacttgtagactactacttgaggaaaaaagttgcatcaaagagaatagaaatcgatatcatcaaggatgttgatctttacaagattgagccatgtgatcttcaaggtttagcaggaaaatcctatcatctctctttagtagtgatatccttgttttggtataaattaaggcttacgattttatgcaagataggaaacgaagagcagagcgaatggtacttctttagtcataaagacaagaagtatcccacgggaactcgaaccaatagagccacgaaagcaggattttggaaagccactggaagagacaaggctatatatataagacatagtcttatcggtatgaggaaaacacttgtgttttacaaaggaagagccccaaatggtcagaaatccgattggatcatgcacgaatatcgcttagaaacaagtgaaaatggaacccctcaggaagaaggatgggtagtatgtagggtattcaagaagaaattggcagcgacagtgaggaaaatgggagattaccattcatcaccatcgcagcattggtacgatgatcagctctcttttatggcctccgagatcatttctagttctccacgacagtttcttcccaatcatcattataaccgccaccatcaccagcagacattgccttgtggcctcaatgcattcaacaacaacaatcctaacttgcaatgcaagcaagagctcgagttacattacaatcaaatggtacaacatcaacaacaaaaccatcatcttcgtgaatctatgtttctccagcttcctcagctcgaaagccctaccagtaattgcaattctgacaacaacaataacacaagaaatattagtaacttgcagaaatcatcaaatatatctcatgaggaacaattgcaacaagggaatcaaagtttcagctctctgtattacgatcaaggagtagagcaaatgactactgactggagagttctcgataaatttgttgcttcacagcttagcaatgatgaagaggctgcagccgtggtttcttcttcttctcatcaaaacaacgtcaagattgacacgagaaacacgggttatcatgtgatagatgagggaataaatttgccggagaatgattctgaaagggttgttgaaatgggagaagagtattcaaatgctcatgctgcttctacttcttcaagttgtcagattgatctctag

SEQ ID NO: 46804 - protein, 418 aa, Arabidopsis thaliana
MNSFSQVPPGFRFHPTDEELVDYYLRKKVASKRIEIDIIKDVDLYKIEPCDLQGLAGKSYHLSLVVISLFWYKLRLTILCKIGNEEQSEWYFFSHKDKKYPTGTRTNRATKAGFWKATGRDKAIYIRHSLIGMRKTLVFYKGRAPNGQKSDWIMHEYRLETSENGTPQEEGWVVCRVFKKKLAATVRKMGDYHSSPSQHWYDDQLSFMASEIISSSPRQFLPNHHYNRHHHQQTLPCGLNAFNNNNPNLQCKQELELHYNQMVQHQQQNHHLRESMFLQLPQLESPTSNCNSDNNNNTRNISNLQKSSNISHEEQLQQGNQSFSSLYYDQGVEQMTTDWRVLDKFVASQLSNDEEAAAVVSSSSHQNNVKIDTRNTGYHVIDEGINLPENDSERVVEMGEEYSNAHAASTSSSCQIDL

SEQ ID NO: 46805 - DNA, 1005 bp, Arabidopsis thaliana
  CDS (1)..(1005)
atgaacatatcagtaaacggacagtcacaagtacctcctggctttaggtttcacccaaccgaggaagagctcttgaagtattacctccgcaagaaaatctctaacatcaagatcgatctcgatgttattcctgacattgatctcaacaagctcgagccttgggatattcaagagatgtgtaagattggaacgacgccgcaaaacgattggtacttttatagccataaggacaagaagtatcccaccgggactagaaccaacagagccaccacggtcggattttggaaagcgacgggacgtgacaagaccatatataccaatggtgatagaatcgggatgcgaaagacgcttgtcttctacaaaggtcgagcccctcatggtcagaaatccgattggatcatgcacgaatatagactcgacgagagtgtattaatctcctcgtgtggcgatcatgacgtcaacgtagaaacgtgtgatgtcataggaagtgacgaaggatgggtggtgtgtcgtgttttcaagaaaaataacctttgcaaaaacatgattagtagtagcccggcgagttcggtgaaaacgccgtcgttcaatgaggagactatcgagcaacttctcgaagttatggggcaatcttgtaaaggagagatagttttagaccctttcttaaaactccctaacctcgaatgccataacaacaccaccatcacgagttatcagtggttaatcgacgaccaagtcaacaactgccacgtcagcaaagttatggatcccagcttcatcactagctgggccgctttggatcggctcgttgcctcacagttaaatgggcccaactcgtattcaataccagccgttaatgagacttcacaatcaccgtatcatggactgaaccggtccggttgtaataccggtttaacaccagattactatataccggagattgatttatggaacgaggcagatttcgcgagaacgacatgccacttgttgaacggtagtggataa

SEQ ID NO: 46806 - protein, 334 aa, Arabidopsis thaliana
MNISVNGQSQVPPGFRFHPTEEELLKYYLRKKISNIKIDLDVIPDIDLNKLEPWDIQEMCKIGTTPQNDWYFYSHKDKKYPTGTRTNRATTVGFWKATGRDKTIYTNGDRIGMRKTLVFYKGRAPHGQKSDWIMHEYRLDESVLISSCGDHDVNVETCDVIGSDEGWVVCRVFKKNNLCKNMISSSPASSVKTPSFNEETIEQLLEVMGQSCKGEIVLDPFLKLPNLECHNNTTITSYQWLIDDQVNNCHVSKVMDPSFITSWAALDRLVASQLNGPNSYSIPAVNETSQSPYHGLNRSGCNTGLTPDYYIPEIDLWNEADFARTTCHLLNGSG

SEQ ID NO: 46807 - DNA, 1113 bp, Oryza sativa
  CDS (1)..(1113)
atggacactttctcccatgtgccacctggtttccgctttcaccctactgacgaggagctcgtcgattactacctgaggaagaaggtggcatcgaagaaaatcgacctcgacgttataaaagacgtcgacctgtacaaaatcgagccctgggatctccaagagaagtgcaagattggcatggaagaacagaatgactggtacttcttcagccacaaagacaaaaagtacccgacgggcacccgcaccaaccgggccacgggcgccggcttctggaaggcgacggggagggacaagcccatctacgcccgcagctgcctcgtcgggatgaggaagacactcgtcttctacaagggccgtgcccccaatggccagaagtcggactggatcatgcacgagtaccgcctcgagaccaacgaaaacggcaccacacctgaggaaggatgggtggtctgccgggtgttcaagaagcgggtggcgacggtgcggagaatggccgacggatcaccgtgctggttcgatgaccacggcgccgtcggtgcgttcatgccggacctcagctcgccgaggcagctactgccgcaccaccaccaccaccacccgggctcgtcggcggcgctgtaccacggccaccaccaccagcagctgcagcagatgtacggtcactgcaagccggagctggagtaccaccacctcctgccgcaggaggccttcctgcagcatcttcctcagctggagagccccaagccgccgccgccgcctcctgcggcggcggcctacattggcggccacctcggatcgtcgtcgtccaccgcccttactactcacgacgacgaagcctccggctccgccgcgcagcagcagccgccgtcgttggaggctgtttacatggccggcgccggcgtcggcatcggcgtcgacgcgtcggtgacggactggaggctactggacaagttcgtcgcgtctcagctgctcagcaaggagtccatgtccagctacggatcccatccggctcaggtgtttcaggctgcagacggtggcaagcatgaagaggctttggactacgcttcgacgtcggccggctccggcggcggcgaggctgatctgtggaaatag

SEQ ID NO: 46808 - protein, 370 aa, Oryza sativa
MDTFSHVPPGFRFHPTDEELVDYYLRKKVASKKIDLDVIKDVDLYKIEPWDLQEKCKIGMEEQNDWYFFSHKDKKYPTGTRTNRATGAGFWKATGRDKPIYARSCLVGMRKTLVFYKGRAPNGQKSDWIMHEYRLETNENGTTPEEGWVVCRVFKKRVATVRRMADGSPCWFDDHGAVGAFMPDLSSPRQLLPHHHHHHPGSSAALYHGHHHQQLQQMYGHCKPELEYHHLLPQEAFLQHLPQLESPKPPPPPPAAAAYIGGHLGSSSSTALTTHDDEASGSAAQQQPPSLEAVYMAGAGVGIGVDASVTDWRLLDKFVASQLLSKESMSSYGSHPAQVFQAADGGKHEEALDYASTSAGSGGGEADLWK

SEQ ID NO: 46809 - DNA, 1101 bp, Oryza sativa
  CDS (1)..(1101)
atggaatcatgcgtccctcctgggttcaggttccaccccaccgacgaggagctcgtcggctactacctccgcaagaaggtcgcctcccagaagatcgacctcgacgtcatccgcgacatcgatctctaccgcatcgaaccctgggatctccaagaacattgtgggatcgggtacgatgagcaaagcgagtggtacttcttcagctacaaggacaggaagtacccgacggggacgaggacgaacagggcgacaatggcggggttctggaaggcgacggggagggacaaggcggtgcacgacaagagcaggctcatcggcatgaggaagacactcgtcttctataagggcagggcgcctaatggccagaagaccgactggatcatgcacgagtaccgcctcgagaccgacgagaacgcgccgccacaggaagaaggatgggtggtgtgccgagcattcaagaagaggacggcgtatccggcgaggagcatggtggagacgtgggactactccttgcacgagcgcaacatcatgagcgccgcggcggcggcggcgttcgccgatccgagcgcggcgtacgcgcagatgaggcggcagcacaggagcgggcggttcaagcaggaggcggagctggacggcgccgccacagccctcctccactactccagccacctcgccgagctgccgcagctcgagagcccctccgcggctgcggcgccgctccagcccaacccgagccagctggccaccgccggcgaggacgacgactgcaagggcgataatggcggtaggagggccaagaaagcccgcgccgccggcgacaaggtggcgacgaccacggactggagagcgctcgacaagttcgtcgcgtcgcagcttagccccggggagtgtggcagcatggaggcaacggcggaagccgcggcggcggcagtcgccggtgtgagctcgccgctggaccacggcgatgacgacatggcagcattgctgtttctcaacagcgacgagagagacgaggtcgacaggtggacggggttgctcggctccggcgccggcgcgagcggcgtcgacggcgacctcggaatctgtgtgtttgacaaatga

SEQ ID NO: 46810 - protein, 366 aa, Oryza sativa
MESCVPPGFRFHPTDEELVGYYLRKKVASQKIDLDVIRDIDLYRIEPWDLQEHCGIGYDEQSEWYFFSYKDRKYPTGTRTNRATMAGFWKATGRDKAVHDKSRLIGMRKTLVFYKGRAPNGQKTDWIMHEYRLETDENAPPQEEGWVVCRAFKKRTAYPARSMVETWDYSLHERNIMSAAAAAAFADPSAAYAQMRRQHRSGRFKQEAELDGAATALLHYSSHLAELPQLESPSAAAAPLQPNPSQLATAGEDDDCKGDNGGRRAKKARAAGDKVATTTDWRALDKFVASQLSPGECGSMEATAEAAAAAVAGVSSPLDHGDDDMAALLFLNSDERDEVDRWTGLLGSGAGASGVDGDLGICVFDK

SEQ ID NO: 46811 - DNA, 1188 bp, Oryza sativa
  CDS (1)..(1188)
atgagcatatcggtgaacgggcagtcggtggtgccaccggggttccggttccacccaacggaggaggagctcctgacatactacctgaagaagaaggtggcctcggagcgcatcgacctcgacgtcatccgcgacgtcgacctcaacaagctcgagccatgggacatccaagagaggtgcaggattgggtcagggccgcaaaacgactggtacttcttcagccacaaggacaagaagtacccgacggggacgaggacgaaccgggcaacggcggccggcttctggaaggccaccggccgcgacaaggccatctactccagctccaaccgcatcggcatgcgcaaaaccctcgtcttctacaagggccgtgccccccacggccagaaatcagactggatcatgcacgagtaccgcctcgacgacccctcctccgcctccgcctccgtctccgtcaacctcccctcctactactcttcctcctcatcgtcatcttccccaatgcacggtgtcgccggagaccaaggagctcaggaggaaggctgggtgatctgcagggtgttcaagaagaagaacctcgtgcaccacggcggcggcgccgccgcggcgagccaccacgcggcggccaagctcgcggcggcggccatggagggcagcccgagcaactgctcgacggtgaccgttagcgaccacgtcaaggcgcagatgctgcactcgtccgccagcgacgacgccctcgaccacatcctccagtacatgggccgctccggctgcaagcaggagaccaagccggcggcgatgtcggcgtcgtcggcggcagcggcggcggcgctggagcagcacctcagtacgcctcagtacggcaagttcatgaagcttccgccgctcgagcacgtcgccggcggcgtgggcctcctggcggcggccggcggcggcggcgagtactgctccgccgccgacgcgtcggggatcgccgactgggacacgctggaccggctcgcggcgtcgtacgagctcaacggcgccctctccgacgtcgcctccggcaagaacatggccggcttcttcgacgtcgtcgatcagcccgccggcgccgccgccttctcctccggcgacggcgacctgtggagccttgcgcggtcggtgtcatcgtcgctacacgcagacttgacgaccatgaataacgtataa

SEQ ID NO: 46812 - protein, 395 aa, Oryza sativa
MSISVNGQSVVPPGFRFHPTEEELLTYYLKKKVASERIDLDVIRDVDLNKLEPWDIQERCRIGSGPQNDWYFFSHKDKKYPTGTRTNRATAAGFWKATGRDKAIYSSSNRIGMRKTLVFYKGRAPHGQKSDWIMHEYRLDDPSSASASVSVNLPSYYSSSSSSSSPMHGVAGDQGAQEEGWVICRVFKKKNLVHHGGGAAAASHHAAAKLAAAAMEGSPSNCSTVTVSDHVKAQMLHSSASDDALDHILQYMGRSGCKQETKPAAMSASSAAAAAALEQHLSTPQYGKFMKLPPLEHVAGGVGLLAAAGGGGEYCSAADASGIADWDTLDRLAASYELNGALSDVASGKNMAGFFDVVDQPAGAAAFSSGDGDLWSLARSVSSSLHADLTTMNNV

SEQ ID NO: 46813 - DNA, 1203 bp, Oryza sativa
  CDS (1)..(1203)
atgagcatctcggtgaacgggcagtcgtgcgtgccgccggggttccggttccacccgacggaggaggagctgctcaactactacctccgcaagaaggtcgcctccgagcagatcgacctcgacgtcatccgcgacgtcgacctcaacaagctcgagccatgggacatccaagagaggtgtaagattgggtcagggccgcagaacgactggtacttcttcagccacaaggacaagaagtacccgacggggacgaggacgaacagggcgacggcggccgggttctggaaggccaccggccgcgacaaggccatctacaacgccgtccaccgcattggcatgcgcaagacgctcgtcttctacaagggccgcgccccccacggccagaagtccgactggatcatgcacgagtaccgcctcgacgaccccgccaccgacaccgccgccgccacacccacggttacttctgctgctgctgcggcggcggcgatggcggcggcggcggacggcgggcaggaggatggctgggtggtgtgcagggtgttcaagaagaagcaccaccacaaggaggccggcggcggcggcggcaagcacggcggcgacggcagcgccggcgccaaggcggcgcacgcttactcctccagcgacgacgcgctcgaccagatcctgcagtacatgggcaggtcgtgcaagcaggagcacgagctcccctcgccgcaggccagcggcggcggcggcgccggcgcagggagcaggccggcgtcgaggtacctccggccaatcgacaccgtgctcggcggccatggcttcatgaagctgccgccgctcgagagcccgtcggccgccacggcgctctcctccactccgagcaccggcggcgacgcggcctcctcggccgccgccgccgccgccgaccacctgctgctccaccaccaccaccgcacggactgggccatgatggaccgcctcgtcgcgtcgcacctcaacggcgccaactccgacgcgcccgacgaccagctctgcttcgacgccgccgacgacgacggcctcgcctactactccgccgccgccacgaggctgctcggcggtgccaacgccggcaccgacgacgacctgtggagcttcgcgcggtcggctgcgccgccaccgccgccgccgccgccgtcgtcggccacgccagagcgtctcagccacgtggcactgtaa

SEQ ID NO: 46814 - protein, 400 aa, Oryza sativa
MSISVNGQSCVPPGFRFHPTEEELLNYYLRKKVASEQIDLDVIRDVDLNKLEPWDIQERCKIGSGPQNDWYFFSHKDKKYPTGTRTNRATAAGFWKATGRDKAIYNAVHRIGMRKTLVFYKGRAPHGQKSDWIMHEYRLDDPATDTAAATPTVTSAAAAAAAMAAAADGGQEDGWVVCRVFKKKHHHKEAGGGGGKHGGDGSAGAKAAHAYSSSDDALDQILQYMGRSCKQEHELPSPQASGGGGAGAGSRPASRYLRPIDTVLGGHGFMKLPPLESPSAATALSSTPSTGGDAASSAAAAAADHLLLHHHHRTDWAMMDRLVASHLNGANSDAPDDQLCFDAADDDGLAYYSAAATRLLGGANAGTDDDLWSFARSAAPPPPPPPPSSATPERLSHVAL

SEQ ID NO: 46815 - DNA, 1026 bp, Oryza sativa
  CDS (1)..(1026)
atggtgatcatggagtcatgtgtgcctcctgggtttaggttccaccccaccgacgaggagctcgtcggctactacctccggaagaaggtggcctcgcagaagatcgacctcgacgtcatccgcgacgtcgacctctaccgcatcgagccatgggatctccaagagcattgcaggatagggtacgaggagcagagcgagtggtacttcttcagctacaaggacaggaagtacccgacggggacgaggacgaacagggcgacgatgacggggttctggaaggcgacggggagggacaaggcggtgcgtgagaggagcaggctcatcgggatgaggaagacgctcgtcttctacaagggcagggcacccaacggccacaagaccgactggatcgtccacgagtaccgcctcgagtccgacgagaacgccccgcctcaggaagaaggctgggtggtgtgccgcgcgttcaagaagcgaaccatgcagccgccgcggagctccatcggagcatgggaggcgagctactcctaccacgaccccgccgtcttcgtcggcggcggggaacacttcaagcaagaggccgcggccgagctggacggcgtcgccgccgccgccggagctaacgccttcctgcggtactccacccgcctggccgagctcccgcagctggagagcccgccgctgccaagccaggggagccaggcggcctcggccgtcgtcgacggcgaggaagataacgccgattctagcaggcgccctggcggcggcggcggcgccgccgccgcggtgaccacggactggagggcgttcgacaagttcgtcgcgtcccagctcagccccgaggagcagcacacctgccgggccaccgacgacgacgacatggcagcgctgctgctcctcgacggcggcgggcaggaggacgacgccgggaggtggctgggctccgccgggttgctgagcgccgtggcggccgacgcgacgacggactgcggcctcggcaccagctgcgtgcctggcgacatcaactga

SEQ ID NO: 46816 - protein, 341 aa, Oryza sativa
MVIMESCVPPGFRFHPTDEELVGYYLRKKVASQKIDLDVIRDVDLYRIEPWDLQEHCRIGYEEQSEWYFFSYKDRKYPTGTRTNRATMTGFWKATGRDKAVRERSRLIGMRKTLVFYKGRAPNGHKTDWIVHEYRLESDENAPPQEEGWVVCRAFKKRTMQPPRSSIGAWEASYSYHDPAVFVGGGEHFKQEAAAELDGVAAAAGANAFLRYSTRLAELPQLESPPLPSQGSQAASAVVDGEEDNADSSRRPGGGGGAAAAVTTDWRAFDKFVASQLSPEEQHTCRATDDDDMAALLLLDGGGQEDDAGRWLGSAGLLSAVAADATTDCGLGTSCVPGDIN

SEQ ID NO: 46817 - DNA, 1035 bp, Brassica napus
  CDS (1)..(1035)
atgttggaagaaggaggtgtagttgtgaaccaaggaggggaccaagagatggtggatttgcctccagggtttcggtttcatccaactgatgcagagatcataattcactatctcaaagagaaggtcttcaacgttcgattcacctcggctgcaattggtcaagccgaccttaacaagaacgagccatgggatctaccaaaaattgcaaagatgggggagaaggagttttacttcttttgccagagggatcggaagtacccgaccggcatgaggacgaaccgtgcaaccgtgtccggttattggaaggcgaccgggaaggacaaggagatctttagaggcaaaggttgtcttgttgggatgaagaaaacacttgtgttctatagaggaagagctccaaaaggtgaaaagaccaattgggttatgcatgagtatcgtcttgatggcatctattcttatcacaacctccctaaaaccgcaagtgatgaatgggtggtgtgtagggttttccacaagaacgctcctcctcccactactacagctactactactactacaaatcaacttacaaggattgattctcttgacaacattgatcatctcttagacttctcgtctctccctcctctcatcgatccgggtttcttgagtcagcccggcccaagcttctccggtgccggccaacaacacgacttcaaactcatctctcatcaccctacaaccgtgcagatcaacaacacttacccatcagcccaaaccctcacttacccttataactcggtgccaaattatggatttggttctggttatgggactggttccggcaacaataacaacggtatgatcaagctggagcattctctggtgagtgtgtctcaagaaaccggtttaagttccgatgtgaacacaaccgccacgccggagatatcttcttcgtatccagggatggtgaatactgcggccaatgcggcgatgatggatggtaacaagacgtcctacgatgatgatgacttggggatcttttgggacgactactaa

SEQ ID NO: 46818 - protein, 344 aa, Brassica napus
MLEEGGVVVNQGGDQEMVDLPPGFRFHPTDAEIIIHYLKEKVFNVRFTSAAIGQADLNKNEPWDLPKIAKMGEKEFYFFCQRDRKYPTGMRTNRATVSGYWKATGKDKEIFRGKGCLVGMKKTLVFYRGRAPKGEKTNWVMHEYRLDGIYSYHNLPKTASDEWVVCRVFHKNAPPPTTTATTTTTNQLTRIDSLDNIDHLLDFSSLPPLIDPGFLSQPGPSFSGAGQQHDFKLISHHPTTVQINNTYPSAQTLTYPYNSVPNYGFGSGYGTGSGNNNNGMIKLEHSLVSVSQETGLSSDVNTTATPEISSSYPGMVNTAANAAMMDGNKTSYDDDDLGIFWDDY

SEQ ID NO: 46819 - DNA, 1224 bp, Glycine max
  CDS (1)..(1224)
atggaagagcctattgtggtgaacaaaggtgaggagcctttagatttgcctccaggtttcaggttccaccctaccgatgaagagataatcacttattatctcactgagaaggtgaagaatagcattttcagtgcaattgctattggagaggctgatttgaacaagtgtgaaccttgggatttaccaaagaaagccaagataggggagaaagagtggtacttcttctgtcaaaaggataggaagtacccaactgggatgagaaccaatagagcaacagaatctgggtactggaaggccacaggaaaagataaggagatttacaaagggaaagggaaccttgtggggatgaagaagaccctcgtgttctataaagggagagctccaaagggtgagaagagcaattgggtcatgcatgaattcagattggaaggcaaatttgctagttacaatcttcctaaggcagcaaaggatgaatgggttgtctcaagggtttttcacaagaacacagatgtcaaaaagtcctcaattcctggccttttgaggataaactctattggggatgatcttcttgattattcttcactcccatctctcatggatcctccttatggcaacaacaccaacaccaccaacaacaacaacaacaatgctaacccactttcatcaactaaattatcacaatcagagggctattatcttcccagtttctccatcaacaacaaccaccaccagcttctcatcaagccagaagaccaccacaaccacagaatctatgaatttcccacaattaacttcacctccaaccaaaccaatctcagcagcaacaacgttaacccaatggggaacaacaacacactctcatcacagcccttaaacatgttctcagctgattactatgtacaccaaaacaggatcaaaagctccatcatgccaagtgttgcaggctcaggttttgttagcgacaacaataaccatgatgaagctatcctaagagcatttgcagccaagaacaacgagcacatacagtgcaagatggagcaattttcttctaaccactcacaagacacgggcttgagcaacgacagaaacacaactgacacatcctcggtggtttcgatgggaagaaataataataatagggcactgtacgaggatcttgaaggcccttcttcagttgcacctctctcagatttggaatgcctgcagtgggatgatgactactga

SEQ ID NO: 46820 - protein, 407 aa, Glycine max
MEEPIVVNKGEEPLDLPPGFRFHPTDEEIITYYLTEKVKNSIFSAIAIGEADLNKCEPWDLPKKAKIGEKEWYFFCQKDRKYPTGMRTNRATESGYWKATGKDKEIYKGKGNLVGMKKTLVFYKGRAPKGEKSNWVMHEFRLEGKFASYNLPKAAKDEWVVSRVFHKNTDVKKSSIPGLLRINSIGDDLLDYSSLPSLMDPPYGNNTNTTNNNNNNANPLSSTKLSQSEGYYLPSFSINNNHHQLLIKPEDHHNHRIYEFPTINFTSNQTNLSSNNVNPMGNNNTLSSQPLNMFSADYYVHQNRIKSSIMPSVAGSGFVSDNNNHDEAILRAFAAKNNEHIQCKMEQFSSNHSQDTGLSNDRNTTDTSSVVSMGRNNNNRALYEDLEGPSSVAPLSDLECLQWDDDY

SEQ ID NO: 46821 - DNA, 891 bp, Linum usitatissimum
  CDS (1)..(891)
atgattgctgcagagaaaggaagcggctgtgatcagctgccaccaggtttcaggttccatccaactgatgaagagcttatcgtttactatctcaagaaccaggcaacctccaagccttgccctgtttccatcatccctgaagttgatatctacaagtttgatccttggcaattgcctgagaaggcagagtttggtgagaaggaatggtacttcttcagcccaagggacaggaaatacccaaatggagtgaggcccaacagagccactgtttctggttactggaaagccactggcactgataaggccatctacagtgcttccaaatgcgtgggtgtcaaaaaagctctagtcttttacatcgggaagcctccgaagggtgccaagaccgactggatcatgcacgagtatcgcctctccgattccaggaagcagatcatcaagcacaatggaaccatgcgattggatgattgggtcctctgcaggatttacaagaagaagccttctgtagggaaacaatacttggatcaggaaatcaatgcagttgctgctgcttcagattacagccaatcaacaggtagaagaatagcagaacaagtagtcgtagaagaagacacgaaggaacatcagaagatgttgaagctgccaaagacatgttctttgagcaacttgttggagttggaatgtctgggcccaatctcacagctgttgaatgataacagtaacatgatcacaaatggaagctttgttggtttccagaacacggtggtgaatcagcagaaccagtattattacaataccagcacagattctggcaagttccaagggatgatgaaccatcatcagcttcagcagcagcagccattttatgtgaaccagaatcagtttcagtga

SEQ ID NO: 46822 - protein, 296 aa, Linum usitatissimum
MIAAEKGSGCDQLPPGFRFHPTDEELIVYYLKNQATSKPCPVSIIPEVDIYKFDPWQLPEKAEFGEKEWYFFSPRDRKYPNGVRPNRATVSGYWKATGTDKAIYSASKCVGVKKALVFYIGKPPKGAKTDWIMHEYRLSDSRKQIIKHNGTMRLDDWVLCRIYKKKPSVGKQYLDQEINAVAAASDYSQSTGRRIAEQVVVEEDTKEHQKMLKLPKTCSLSNLLELECLGPISQLLNDNSNMITNGSFVGFQNTVVNQQNQYYYNTSTDSGKFQGMMNHHQLQQQQPFYVNQNQFQ

SEQ ID NO: 46823 - DNA, 1170 bp, Helianthus annuus
  CDS (1)..(1170)
atgtctaaagaagaagtgaatttgtctgtgaatgtaaatggtcagtctaaagtgcctccagggtttcggttccaccctaccgaagaagagcttcttcattactacttaaggaagaaagtcgcgtatgaaaagatcgatcttgatgttattcgtgatattgatcttaacaagctcgaaccatgggatatcaaagaaaagtgcagaattggatcaaccccgcaaaacgattggtatttttttagccacaaagacaagaaatacccgactggaacgcgtacaaatcgtgcaactgctgcaggtttttggaaagccaccggtcgagataaggtcatttatagtagcatgagaagaatcggtatgaggaagacactcgtgttctataaaggaagagcacctcatggacaaaagtcggattggattatgcacgaatatagactcgatgacaacacgattatctcccaggattatgcctcaggttctaatttatgtgattccactcaagaagacgggtgggtcgtatgtcgcgtttttaaaaagaaaaactaccataaagcggttgagagtccccaaaggtcatcatcagcaccttccattgattcaacagctcaaatgcaatctttaaagaaagatggaactcaacttcttgcatacatcaatggtactaaatcctgcaagcaagaaaccgaatcactcgccaatatagcaaccacccatgactatgaccctttgcaacaattcatcaacccgataagcgacagattcctacacctcccaaggctccacaacacttcaagtgacttgatcacgtcagccacctttgatcaagattcaatctttccggcccataacaccatgactcatttgctaacggaagttgaacattctaggaatcataaacatcttgaaaactggtcagatgtggatcgactcgtggcctcccaactcaatggccaaccgcgatcatccaggcagatgtacggttgctacgacgaacccaatgaagacatatgcttctcacttcaccatgatgatcagcaagaaccaccacaaccatcatccatggctaaacccaaccaagcagcctatacaagcgagatagatatatggagctttgcacaatcttcatcacaatcatcatcaccggatccattttaccatttgtcggtatag

SEQ ID NO: 46824 - protein, 389 aa, Helianthus annuus
MSKEEVNLSVNVNGQSKVPPGFRFHPTEEELLHYYLRKKVAYEKIDLDVIRDIDLNKLEPWDIKEKCRIGSTPQNDWYFFSHKDKKYPTGTRTNRATAAGFWKATGRDKVIYSSMRRIGMRKTLVFYKGRAPHGQKSDWIMHEYRLDDNTIISQDYASGSNLCDSTQEDGWVVCRVFKKKNYHKAVESPQRSSSAPSIDSTAQMQSLKKDGTQLLAYINGTKSCKQETESLANIATTHDYDPLQQFINPISDRFLHLPRLHNTSSDLITSATFDQDSIFPAHNTMTHLLTEVEHSRNHKHLENWSDVDRLVASQLNGQPRSSRQMYGCYDEPNEDICFSLHHDDQQEPPQPSSMAKPNQAAYTSEIDIWSFAQSSSQSSSPDPFYHLSV

SEQ ID NO: 46825 - DNA, 1038 bp, Glycine max
  CDS (1)..(1038)
atgggagttccagagaaagaccctctttcccaattgagtttgcctcctggttttcggttttaccccaccgacgaggagctcctcgttcagtatctatgccgcaaggtcgctggccaccatttctctcttccaatcattgctgaaattgatttgtacaagttcgacccatgggttcttccaagtaaggcgattttcggtgagaaagagtggtactttttcagccctagagacaggaaataccctaacgggtcccgacccaacagagtagccgggtcgggttattggaaagccaccggaaccgacaagatcatcaccaccgaaggtagaaaagttggcataaaaaaagccctcgttttctacattggcaaagcccccaaaggcaccaaaaccaattggatcatgcacgagtatcgcctcctcgactcttcccgaaaaaacaccggcaccaagcttgatgactgggttctgtgtcgtatctacaagaagaactcgagtgcacagaaggcggtgcaaaacggcgtcgttccgagcaacgagcacactcaatacagcaacggttcctcttcctcttcttcgtcacaactcgacgacgttctggaatcgctgccagcgattgatgaacggtgtttcccgatgccacgtgtcaacacgctgcagcaacagcagcacgaggagaaggtcaatgttcagaacttgggtgaaggggggttactggattggaccaacccttcggttctgaattcggtcgttgatttcgtatcggggaataataatcataatcaattggtgcaggaccagacgcaaggcatggtgaactacaacgcgtgcaatgacctctatgtccctacgttatgccatgtgggcacgtcagttccgcaaaagatggaggaagaggtgcaaagcggcgtgagaaaccaacgggtccagaacaattcctggtttcttcagaatgatttcacacaggggtttcagaattcggttgacacgtctgggtttaagtacccggttcaaccggtggggttcgggttcaggaattga

SEQ ID NO: 46826 - protein, 345 aa, Glycine max
MGVPEKDPLSQLSLPPGFRFYPTDEELLVQYLCRKVAGHHFSLPIIAEIDLYKFDPWVLPSKAIFGEKEWYFFSPRDRKYPNGSRPNRVAGSGYWKATGTDKIITTEGRKVGIKKALVFYIGKAPKGTKTNWIMHEYRLLDSSRKNTGTKLDDWVLCRIYKKNSSAQKAVQNGVVPSNEHTQYSNGSSSSSSSQLDDVLESLPAIDERCFPMPRVNTLQQQQHEEKVNVQNLGEGGLLDWTNPSVLNSVVDFVSGNNNHNQLVQDQTQGMVNYNACNDLYVPTLCHVGTSVPQKMEEEVQSGVRNQRVQNNSWFLQNDFTQGFQNSVDTSGFKYPVQPVGFGFRN

SEQ ID NO: 46827 - DNA, 1107 bp, Glycine max
  CDS (1)..(1107)
atggagagcaccgaagactcatccacgagttcacaacaacaacaaccgaacctgccacccgggtttcggttccaccccacggacgaggagctcgtggttcattacctcaagaagaaagttgattctgttcctctccctgtttcaatcatcgctgatgttgatctctacaagtttgatccatgggaattaccagccatggcatcgtttggggcggaagagtggtactttttcagcccgagagaaaggaagtacccgaatggcgcaaggccaaacagggctgcaacttcagggtattggaaggccacaggtacagataagcctatatgtagtggaactcaaaaggttggggtgaagaaatctttggttttctatggagggaagccaccaaaaggggtcaaaactgattggatcatgcatgagtaccgtgttgctgaaaacaagcctaacaataggcctcctgggtgtgacttgggccacaagaaaaactccctaaggctggatgattgggtgttatgccggatctacaagaagggtaacacacaaaggtcacatgagagggatgattccatggacgacatgattggagaagtacctccttccatcaacgtgggccacatgaatgcgaggtttcacctttcaaagatgtccacgagctacagtggtgcattgttggaaaatgacagaaacacgttagaaggtgtggttataggcaatggtaatgtcaatggaatcaacactaattcaataaatgccatatcatcatcatcatctcatcatcagtttgcctcctcaaactccaaggcagagcttcttccttttgccccttcaaacaacaacacttctaattcagcctccaaaagaacactctcatcactctattggaatgttgatgatgataatgatgatgatgatcacaaacacttcaatttggacagtaatgggaatgtgagtgttttgaggactgaagagaataataataatactaatggtacttctggctcctttgccactctgcttaaccaacttccacaaacaccttcattgccccaaatagatgggttacttcgaacaccatatcaaatacaagggaccaattggtatggttaa

SEQ ID NO: 46828 - protein, 368 aa, Glycine max
MESTEDSSTSSQQQQPNLPPGFRFHPTDEELVVHYLKKKVDSVPLPVSIIADVDLYKFDPWELPAMASFGAEEWYFFSPRERKYPNGARPNRAATSGYWKATGTDKPICSGTQKVGVKKSLVFYGGKPPKGVKTDWIMHEYRVAENKPNNRPPGCDLGHKKNSLRLDDWVLCRIYKKGNTQRSHERDDSMDDMIGEVPPSINVGHMNARFHLSKMSTSYSGALLENDRNTLEGVVIGNGNVNGINTNSINAISSSSSHHQFASSNSKAELLPFAPSNNNTSNSASKRTLSSLYWNVDDDNDDDDHKHFNLDSNGNVSVLRTEENNNNTNGTSGSFATLLNQLPQTPSLPQIDGLLRTPYQIQGTNWYG

SEQ ID NO: 46829 - DNA, 891 bp, Glycine max
  CDS (1)..(891)
atgggtctgagagacattggtgcttcactgcctcctgggtttcggttttatccgagtgatgaggaattggtctgccattacctctacaaaaagatcgcaaatgaggaagttctgaagggtaccttggtcgaaattgaccttgcatgcgcaataatattaatgcacgcagaggtggctaagctcaatgcgaatgagtggtacttcttcagtttccgggaccgcaaatatgctactgggtttcggaccaaccgggcaactacatcagggtattggaaagctacggggaaggatcgtaaggtggaggatccagccacgcaagaggttgtagggatgaggaaaacactggtgttctacaggaacagagctccaaatggcatcaaaacgggatggatcatgcatgagttccgcttggagaccccacatatgcctccaaaggaggactgggtgttgtgtagagtcttccacaaaagcaaagaagatgacaacagttccaaactcctacagtatgagacgacaccatcatccctaactttgttggcttcgtcatctcccaccaaccaagccatgcctcatggtgttgggtataataaccgacttgccacctctttctctaattcattcatgccaacccaccaatatcatcatcacttcaaccctacccaaaacgctaattctttgatggatctccttcacttctctcgcgaaaccaacaccaacaatactggctttcttactcaaattggtgccaaaggtgatgacgaatatggtttcttatgggacatggatctagaagaaaatagcctagatgatggcgtggcttcaaacttggacgcaataagattcgaggttgataataataatactaataacaacaatatggtattgctataa

SEQ ID NO: 46830 - protein, 296 aa, Glycine max
MGLRDIGASLPPGFRFYPSDEELVCHYLYKKIANEEVLKGTLVEIDLACAIILMHAEVAKLNANEWYFFSFRDRKYATGFRTNRATTSGYWKATGKDRKVEDPATQEVVGMRKTLVFYRNRAPNGIKTGWIMHEFRLETPHMPPKEDWVLCRVFHKSKEDDNSSKLLQYETTPSSLTLLASSSPTNQAMPHGVGYNNRLATSFSNSFMPTHQYHHHFNPTQNANSLMDLLHFSRETNTNNTGFLTQIGAKGDDEYGFLWDMDLEENSLDDGVASNLDAIRFEVDNNNTNNNNMVLL

SEQ ID NO: 46831 - DNA, 1077 bp, Brassica napus
  CDS (1)..(1077)
atggagagtacagattcttccggtggtcctccgccgccgcagcctaaccttcctccaggattccgttttcatccaaccgatgaagagctcgtcgttcactaccttaaacgcaaagccgcctccgctcctttacctgtctccatcatcgctgacgtcgatctctacaagttcgatccatgggaacttcctgctaaggcatcgtttggagagcaggaatggtacttcttcagtcctagggatcggaagtatccgaacggagcgaggccaaacagagcagcaacgtctggttactggaaagctacgggtactgataaaccggtgcttgcctcagacgggaaccaaaaggtcggcgtgaagaaggcactcgtcttctacagtggcaaacctccaaaaggcgttaaaagcgactggatcatgcatgagtaccgtctcatcgacaacaaaccaaacaatagaccaccaggatgtgattacggcaacaagaaaaactccctaaggcttgatgactgggtactatgtcgaatctacaagaagaacaacgcgggacgacacgttgagaacgataaggatcatgatatgatcgactacatcttcaggaaaatcccttcaggactcaaccacaatgtctcaagatcaatgaacttcttcccgggaagattctccagtgcttacgggatgttttccgacaatgatcccggtttgtacgacggaagcagcatgatgtgcagcagcggaaccgatgcagtcaatctcaatgtctgtaatggtaatcccattgccgacgttgttggtaacggtttgaaccctgtttcttcctctggaccgatgatgatgatgatggcgaatctgaaacgagctcttccggttccgtattggcctgtaggggaggaagagcaggaagtatctccaagcaaacggtttcacggcgtaggaggaggaggagactgtacgaacatgtcttcatcgatggtggaggaaccaccgccactcatgcagcagcaaggtggtgtgttaggggatggattattcagagcgacgtcgtaccaactacctggtttaaattggtactcttcttaa

SEQ ID NO: 46832 - protein, 358 aa, Brassica napus
MESTDSSGGPPPPQPNLPPGFRFHPTDEELVVHYLKRKAASAPLPVSIIADVDLYKFDPWELPAKASFGEQEWYFFSPRDRKYPNGARPNRAATSGYWKATGTDKPVLASDGNQKVGVKKALVFYSGKPPKGVKSDWIMHEYRLIDNKPNNRPPGCDYGNKKNSLRLDDWVLCRIYKKNNAGRHVENDKDHDMIDYIFRKIPSGLNHNVSRSMNFFPGRFSSAYGMFSDNDPGLYDGSSMMCSSGTDAVNLNVCNGNPIADVVGNGLNPVSSSGPMMMMMANLKRALPVPYWPVGEEEQEVSPSKRFHGVGGGGDCTNMSSSMVEEPPPLMQQQGGVLGDGLFRATSYQLPGLNWYSS

SEQ ID NO: 46833 - DNA, 1983 bp, Zea mays
  CDS (1)..(1983)
atggtggagatggctgtggtggagctcaggacgctgccgctcggcttccgcttccaccccaccgacgaggagctcgtcacccactacctcaagggcaagatcaccggcaggatcaactccgagtccgaggtcatccccgagatcgacgtctgcaagtgcgagccgtgggacctcccagataagtccctgatccggtccgacgatcccgagtggttcttcttcgcccccaaggaccgcaagtaccccaacggtagcaggtcgaacagggccaccgaggcgggatactggaaggctactggcaaggacaggataatcaagtccaagggcgacaagcgcaagcagcataccatcggtatgaagaagaccctcgtcttccaccgtggtcgtgcccccaagggcgagcgcacggggtggattatgcacgagtaccgcaccaccgagcctgagttcgagtccggcgagcagggtggttatgttctttatcgcctcttccgtaagcaagaggagaaaactgagcgctccagcccagaggaagtggatagaagtggctactcacctactccttctcgttcttcacctgacaacctagaggcgaatgaggaagctaatacaccattaaataaggaatctccagaatctgctctgcatgaaagcccgattgagctgccaaaatctgttgaaaccaatggtggttcaatgacaaggtggctggcggacagaaatggtaacttgatggctaatgcaccagatgtttcccatatacctttccatggacatgctgctgatgtagctaaggttgatccttctgttggtgcttcaggccacttagttaatccccacaatggaaatgatgattataacaaatttgtgtctgatttcacccccattctaccacttgaaaatccattcttcactgatatacaacaaggagcttttggttttgatggcatcatgaatcctcttgatcccctcgatgctttcttgaatcaaacactagttgatcctgatgaacattcatcaacaacatcaaaagttcagtatgattctgacattccaacagaatttgagaaccattggaatatgaaggttgagcctcaagatgatcaatgctggtgggcaaacataggatttgagccagacgaaccaaatcctctgcttccttgtgacaccactgaccaagacatactttctgttgactctggtgctgattccttcaatgagcttttcaatagtatggaagagactggaattactgttaggcctcaacagttggactccactgtgcaaccaaaccatgtgttcgctagccagggcaatgcaacacggaggctgcggctacaggttgagtctagggagatcataactaaagatgagagtgaagatgaagtatcatgtgttctaactccagactgtttgaacgattctgttgaggagtccactgcagagaaggatgtggcttctgatggggatgaggctgagtcaacagggattgttattagaagccatcaccctgctccaagatcaagctcagagagttcattcactcaacagggaactgctatgcaaaggctgcggctacagtcaggccttaacaaaggccagcgtcctagtactgatgattcatcaagctgcattatagacgaaccaggaagtcagcacaaagcagaaaaagcagagattgaagaggatgcgagtacaaacctcactggaagtgctgatgatctacctggtaatatccatgatgatgagcaaaagaacatccctgaacatggtgctgaaatgacttctccagaagccaaatctgttctgaggttgcggaagacttctgaggaaagcaacaaggatgtcaagcaggagagttgtctcgagccacacgtgagagcaccaatgcagaagggaggcttccaatcatacatcatctggctggttcttccggtggctctgctcctgcttctctgtgttgggacatatggatgggtatga

SEQ ID NO: 46834 - protein, 660 aa, Zea mays
MVEMAVVELRTLPLGFRFHPTDEELVTHYLKGKITGRINSESEVIPEIDVCKCEPWDLPDKSLIRSDDPEWFFFAPKDRKYPNGSRSNRATEAGYWKATGKDRIIKSKGDKRKQHTIGMKKTLVFHRGRAPKGERTGWIMHEYRTTEPEFESGEQGGYVLYRLFRKQEEKTERSSPEEVDRSGYSPTPSRSSPDNLEANEEANTPLNKESPESALHESPIELPKSVETNGGSMTRWLADRNGNLMANAPDVSHIPFHGHAADVAKVDPSVGASGHLVNPHNGNDDYNKFVSDFTPILPLENPFFTDIQQGAFGFDGIMNPLDPLDAFLNQTLVDPDEHSSTTSKVQYDSDIPTEFENHWNMKVEPQDDQCWWANIGFEPDEPNPLLPCDTTDQDILSVDSGADSFNELFNSMEETGITVRPQQLDSTVQPNHVFASQGNATRRLRLQVESREIITKDESEDEVSCVLTPDCLNDSVEESTAEKDVASDGDEAESTGIVIRSHHPAPRSSSESSFTQQGTAMQRLRLQSGLNKGQRPSTDDSSSCIIDEPGSQHKAEKAEIEEDASTNLTGSADDLPGNIHDDEQKNIPEHGAEMTSPEAKSVLRLRKTSEESNKDVKQESCLEPHVRAPMQKGGFQSYIIWLVLPVALLLLLCVGTYGWV

SEQ ID NO: 46835 - DNA, 1965 bp, Zea mays
  CDS (1)..(1965)
atggcgctcaggacgctgccgctcggcttccgcttccaccccaccgacgaggagctcgtcacccactacctcaagggcaagatcaccggcaggatcaactccgagtccgaggtcatccccgagatcgacgtctgcaagtgcgagccgtgggacctcccagataagtccctgatccggtccgacgatcctgagtggttcttcttcgcccccaaggaccgcaagtaccccaacggtagcaggtcgaacagggccaccgaggcgggatactggaaggctactggcaaggacaggataatcaaatccaagggcgacaagcgcaagcagcataccatcggtatgaagaagaccctcgtcttccaccgtggtcgtgcccccaagggcgagcgcacggggtggattatgcacgagtaccgcaccaccgagcctgagttcgagtccggcgagcagggtggttatgttctttatcgcctcttccgtaagcaagaggagaaaactgagcgctccagcccagaggaagtggatagaagtggctactcacctactccttctcgttcttcacctgacaacctagaggcgaatgaggaagctaatacaccattaaataaggaatctccagaatctgctctgcatgaaagcccgattgagctgccaaaatctgttgaaaccaatggtggttcaatgacaaggtggctggcggacagaaatggtaacttgatggctaatgcaccagatgtttcccatatacctttccatggacatgctgctgatgtagctaaggttgatccttctgttggtgcttcaggccacttagttaatccccacaatggaaatgatgattataacaaatttgtgtctgatttcacccccattctaccacttgaaaatccattcttcactgatatacaacaaggagcttttggttttgatgacatcatgaatcctcttgatcccctcgatgctttcttgaatcaaacactagttgatcctgatgaacattcatcaacaacatcaaaagttcagtatgattctgacattccaacagaatttgagaaccattggaatatgaaggttgagccacaagatgatcaatgctggtgggcaaacataggttttgagccagacgaaccaaatcctctgcttccttgtgacaccactgaccaagacatactttctgttgactctggtgctgattccttcaatgagcttttcaatagcatggaagagactggaattactgttaggcctcaacagttggactccactgtgcaaccaaaccatgtgttcgctagccagggcaatgcaacacggaggctgcggctacaggttgagtgtagggagatcataactaaagatgagagtgaagatgaagtatcatgtgttctaactccagactgtttgaacgattctgttgaggagtccactgcagagaaggatgtggcttctgatggggatgaggctgagtcaacagggattgttattagaagccatcaccctgctccaagatcaagctcagagaggtcattcactcaacagggaactgctatgcaaaggctgcggctacagtcaggccttaacaaaggccagcgtcctagtactgatgattcatcaagctgcattatagacgaaccaggaagtcagcacaaagcagaaaaagcggagattgaagaggatgcgagtacaaacctcactggaagtgctgatgatctacctggtaatatccatgatgatgagcaaaagaacatccctgaatatggtgctgaaatgacttctccagaagccaaatctgttctgaggttgcggaagacttctgaggaaagcaacaaggatgtcaagcaggagagttgtctcgagccacacgtgagagcaccaatgcagaagggaggcttccaatcatacatcatctggctggttcttccggtggctctgctcctgcttctctgtgttgggacatatggatgggtatga

SEQ ID NO: 46836 - protein, 654 aa, Zea mays
MALRTLPLGFRFHPTDEELVTHYLKGKITGRINSESEVIPEIDVCKCEPWDLPDKSLIRSDDPEWFFFAPKDRKYPNGSRSNRATEAGYWKATGKDRIIKSKGDKRKQHTIGMKKTLVFHRGRAPKGERTGWIMHEYRTTEPEFESGEQGGYVLYRLFRKQEEKTERSSPEEVDRSGYSPTPSRSSPDNLEANEEANTPLNKESPESALHESPIELPKSVETNGGSMTRWLADRNGNLMANAPDVSHIPFHGHAADVAKVDPSVGASGHLVNPHNGNDDYNKFVSDFTPILPLENPFFTDIQQGAFGFDDIMNPLDPLDAFLNQTLVDPDEHSSTTSKVQYDSDIPTEFENHWNMKVEPQDDQCWWANIGFEPDEPNPLLPCDTTDQDILSVDSGADSFNELFNSMEETGITVRPQQLDSTVQPNHVFASQGNATRRLRLQVECREIITKDESEDEVSCVLTPDCLNDSVEESTAEKDVASDGDEAESTGIVIRSHHPAPRSSSERSFTQQGTAMQRLRLQSGLNKGQRPSTDDSSSCIIDEPGSQHKAEKAEIEEDASTNLTGSADDLPGNIHDDEQKNIPEYGAEMTSPEAKSVLRLRKTSEESNKDVKQESCLEPHVRAPMQKGGFQSYIIWLVLPVALLLLLCVGTYGWV

SEQ ID NO: 46837 - DNA, 1134 bp, Zea mays
  CDS (1)..(1134)
atgagcatctcggtgaacgggcagtcgtgcgtgccgccggggttccggttccaccccacggaggaggagctgctcaactactacctccgcaagaaggtggcctcccagcagatcgacctcgatgtcatccgcgacgtcgacctcaacaagctcgagccatgggacatccaagagagatgcaagatcgggtcgggtccccagaacgactggtacttcttcagccacaaggacaagaagtacccgacggggacgcgcaccaaccgcgctacggccgccggcttctggaaggccaccggccgcgacaaggccatctacagcgccgtcaggcgcatgggcatgcgcaagacgctcgtcttctaccggggccgcgcgccgcacggccacaagtcggactggatcatgcacgagtatcgcctcgacgaccctgacgccgcccccgtcgccgccacggtagccgctgctgccgcgtcgtcggacggcgggcaggaggacggctgggtggtgtgcagggtgttccagaagaagcaccaccacaaagagtcgtcaggcagatgccgcagcaagcgcggcagtaaaaacgaacacgggcacggcgaggccaagacggcggcgcaccagcgccacggccgcggcctgcagtactcctccaacgacgacacgctggaccatatgctgggaaggcggtcctgcaaacaggagcacgagctgctgccgccgccggcggctgcgcgggcggcgtccaggtacatccggcccatccagaccgtgctgggcgggcacggattcatgaagctgcccccgctcgagagcccggcggcggcggaggcgctgacgacgccgcacgccgtctctgcagttgacgccaccgccgccggggccctcgacagcctccaccgcgccgggaacgggatcacagactgggtcatgatggaccggatggtggcgttgcacctcaacgggcaggcgcccgccgcggaccagttcggcagctgcttcgacgccggcgcggacggcggcggcctcgcctgcttctactccgctgccgccaacaggctgctcggcggcggcgacgacgacctgtggagcttcacgcgatcgtcgtcgacggagcggctgggccatgtgtcgctttag

SEQ ID NO: 46838 - protein, 377 aa, Zea mays
MSISVNGQSCVPPGFRFHPTEEELLNYYLRKKVASQQIDLDVIRDVDLNKLEPWDIQERCKIGSGPQNDWYFFSHKDKKYPTGTRTNRATAAGFWKATGRDKAIYSAVRRMGMRKTLVFYRGRAPHGHKSDWIMHEYRLDDPDAAPVAATVAAAAASSDGGQEDGWVVCRVFQKKHHHKESSGRCRSKRGSKNEHGHGEAKTAAHQRHGRGLQYSSNDDTLDHMLGRRSCKQEHELLPPPAAARAASRYIRPIQTVLGGHGFMKLPPLESPAAAEALTTPHAVSAVDATAAGALDSLHRAGNGITDWVMMDRMVALHLNGQAPAADQFGSCFDAGADGGGLACFYSAAANRLLGGGDDDLWSFTRSSSTERLGHVSL

SEQ ID NO: 46839 - DNA, 1983 bp, Zea mays
  CDS (1)..(1983)
atggtggagatggctgtggtggagctcaggacgctgccgctcggcttccgcttccaccccaccgacgaggagctcgtcacccactaccttaagggcaagatcaccggcaggatcaactccgagtccgaggtcatccccgagatcgacgtctgcaagtgcgagccgtgggacctcccggataagtccctgatccggtccgacgatcccgagtggttcttcttcgcccccaaggaccgcaagtaccccaacggtagcaggtcgaacagggccaccgaggcgggatactggaaggctactggcaaggacaggataatcaagtccaagggcgacaagcgcaagcagcataccatcggtatgaagaagaccctcgtcttccaccgtggtcgtgcccccaagggcgagcgcacggggtggattatgcacgagtaccgcaccaccgagcctgagttcgagtccggcgagcagggtggttatgttctttatcgcctcttccgtaagcaagaggagaaaactgagcgctccagcccagaggaagtggatagaagtggctactcacctactccttctcgttcttcacctgacaacctagaggcgaatgaggaagctaatacaccattaaataaggaatctccagaatctgctctgcatgaaagcccgattgagctgccaaaatctgttgaaaccaatggtggttcaatgacaaggtggctggcggacagaaatgataacttgatggctactgcaccagatgtttcccatatacctttccacggacatgctgctggtgtagctaaggttgatccttctgttggtgcttcaggccacttagttaatccccacaatggaaatgatgattataacaaatttgtgtctgatttcactcccattctaccacttgaaaatgcattcttcactgatatacaacaaggagcttttggttttgatggcatcatgaatcctcttgatccccttgatgctttcttgaatcaaacacttgttgatcctgatgaacattcatcaacaacatcaaaagttcagtatgattctgacattccaacagaatttgagaaccattggaatatgaaggttgagcctcaagatgatcaatgctggtgggcaaacataggttttgagccagacgaaccaaatcctctgcttccttgtgacaccactgaccaagacatactttctgttgactctggtgctgattccttcaatgagcttttcaatagcatggaagagactggaattactgttaggcctcaacagttggactccactgtgcaaccaaaccatgtgttcgctagccagggcaatgcaacacggaggctgcggctacaggttgagtgtagggagatcataactaaagatgagagtgaagatgaagtatcatgtgttctaactccagactgtttgaacgattctgttgaggagtccactgcagagaaggatgtggcttctgatggggatgaggctgagtcaacagggattgttattagaagccatcaccctgctccaagatcaagctcagagagttcattcactcaacagggaactgctatgcaaaggctgcggctacagtcaggccttaacaaaggccagcgtcctagtactgatgattcatcaagctgcattatagacgaaccaggaagtcagcacaaagcagaaaaagcagagattgaagaggatgcgagtacaaacctcgctggaagtgctgatgatctacctggtaatatccatgatgatgagcaaaagaacatccctgaacatggtgctgaaatgacttctccagaagccaaatctgttctgaggttgcggaagacttctgaggaaggcaacaaggatgtcaagcaggagagttgtctcgagccacacgtgagagcaccaatgcagaagggaggcttccaatcatacatcatctggctggttcttccggtggctctgctcctgcttctctgtgttgggacatatggatgggtatga

SEQ ID NO: 46840 - protein, 660 aa, Zea mays
MVEMAVVELRTLPLGFRFHPTDEELVTHYLKGKITGRINSESEVIPEIDVCKCEPWDLPDKSLIRSDDPEWFFFAPKDRKYPNGSRSNRATEAGYWKATGKDRIIKSKGDKRKQHTIGMKKTLVFHRGRAPKGERTGWIMHEYRTTEPEFESGEQGGYVLYRLFRKQEEKTERSSPEEVDRSGYSPTPSRSSPDNLEANEEANTPLNKESPESALHESPIELPKSVETNGGSMTRWLADRNDNLMATAPDVSHIPFHGHAAGVAKVDPSVGASGHLVNPHNGNDDYNKFVSDFTPILPLENAFFTDIQQGAFGFDGIMNPLDPLDAFLNQTLVDPDEHSSTTSKVQYDSDIPTEFENHWNMKVEPQDDQCWWANIGFEPDEPNPLLPCDTTDQDILSVDSGADSFNELFNSMEETGITVRPQQLDSTVQPNHVFASQGNATRRLRLQVECREIITKDESEDEVSCVLTPDCLNDSVEESTAEKDVASDGDEAESTGIVIRSHHPAPRSSSESSFTQQGTAMQRLRLQSGLNKGQRPSTDDSSSCIIDEPGSQHKAEKAEIEEDASTNLAGSADDLPGNIHDDEQKNIPEHGAEMTSPEAKSVLRLRKTSEEGNKDVKQESCLEPHVRAPMQKGGFQSYIIWLVLPVALLLLLCVGTYGWV

SEQ ID NO: 46841 - DNA, 23 bp, Artificial sequence
  primer
atgccggaaaacatgagcatatc

SEQ ID NO: 46842 - DNA, 21 bp, Artificial sequence
  primer
ctacactgacgtgttggacac

SEQ ID NO: 46843 - protein, 230 aa, Artificial sequence
  consensus sequence
  Variant (10)..(10): Xaa in position 10 is any amino acid
  Variant (14)..(16): Xaa in position 14 to 16 is any amino acid
  Variant (19)..(20): Xaa in position 19 to 20 is any amino acid
  Variant (22)..(31): Xaa in position 22 to 31 is any amino acid
  Variant (32)..(32): Xaa in position 32 is any or no amino acid
  Variant (34)..(36): Xaa in position 34 to 36 is any amino acid
  Variant (39)..(39): Xaa in position 39 is any amino acid
  Variant (41)..(41): Xaa in position 41 is any amino acid
  Variant (46)..(52): Xaa in position 46 to 52 is any amino acid
  Variant (53)..(76): Xaa in position 53 to 76 is any or no amino acid
  Variant (78)..(80): Xaa in position 78 to 80 is any amino acid
  Variant (81)..(87): Xaa in position 81 to 87 is any or no amino acid
  Variant (93)..(94): Xaa in position 93 to 94 is any amino acid
  Variant (96)..(96): Xaa in position 96 is any amino acid
  Variant (102)..(102): Xaa in position 102 is any amino acid
  Variant (109)..(110): Xaa in position 109 to 110 is any amino acid
  Variant (112)..(112): Xaa in position 112 is any amino acid
  Variant (118)..(118): Xaa in position 118 is any amino acid
  Variant (121)..(129): Xaa in position 121 to 129 is any amino acid
  Variant (130)..(134): Xaa in position 130 to 134 is any or no amino acid
  Variant (136)..(137): Xaa in position 136 to 137 is any amino acid
  Variant (144)..(144): Xaa in position 144 is any amino acid
  Variant (149)..(149): Xaa in position 149 is any amino acid
  Variant (151)..(151): Xaa in position 151 is any amino acid
  Variant (153)..(154): Xaa in position 153 to 154 is any amino acid
  Variant (155)..(156): Xaa in position 155 to 156 is any or no amino acid
  Variant (164)..(174): Xaa in position 164 to 174 is any amino acid
  Variant (175)..(221): Xaa in position 175 to 221 is any or no amino acid
  Variant (224)..(224): Xaa in position 224 is any amino acid
  Variant (227)..(227): Xaa in position 227 is any amino acid
  Variant (229)..(229): Xaa in position 229 is any amino acid
PPGFRFHPTXEELXXXYLXXKXXXXXXXXXXXIXXXDLXKXEPWDXXXXXXXXXXXXXXXXXXXXXXXXXXXXXXXGXXXXXXXXXXWYFFSXXDXKYPTGXRTNRATXXGXWKATGXDKXXXXXXXXXXXXXXGXXKTLVFYXGRAPXGXKXXXXWIMHEYRXXXXXXXXXXXXXXXXXXXXXXXXXXXXXXXXXXXXXXXXXXXXXXXXXXXXXXXXXXWVXCRXFXK

SEQ ID NO: 46844 - protein, 34 aa, Artificial sequence
  protein pattern
  Variant (5)..(5): Xaa in position 5 is any amino acid
  Variant (6)..(6): Xaa in position 6 is Lys or Arg
  Variant (8)..(8): Xaa in position 8 is Lys or Arg
  Variant (12)..(12): Xaa in position 12 is Asn or Thr
  Variant (14)..(14): Xaa in position 14 is Ala, Ser, Thr or Val
  Variant (16)..(16): Xaa in position 16 is Pro or Thr
  Variant (19)..(19): Xaa in position 19 is Ala or Val
  Variant (20)..(20): Xaa in position 20 is Ala or Thr
  Variant (21)..(21): Xaa in position 21 is any amino acid
  Variant (22)..(22): Xaa in position 22 is Ala, Gly, Ser, Thr or Val
  Variant (24)..(24): Xaa in position 24 is Phe or Tyr
  Variant (30)..(30): Xaa in position 30 is any amino acid
  Variant (32)..(32): Xaa in position 32 is Lys or Arg
  Variant (33)..(33): Xaa in position 33 is any amino acid
  Variant (34)..(34): Xaa in position 34 is Ile or Val
YFFSXXDXKYPXGXRXNRXXXXGXWKATGXDXXX

SEQ ID NO: 46845 - protein, 21 aa, Artificial sequence
  protein pattern
  Variant (2)..(2): Xaa in position 2 is any amino acid
  Variant (8)..(8): Xaa in position 8 is Asp or Glu
  Variant (12)..(12): Xaa in position 12 is Leu or Val
  Variant (13)..(13): Xaa in position 13 is any amino acid
  Variant (14)..(14): Xaa in position 14 is His or Tyr
  Variant (17)..(17): Xaa in position 17 is Lys or Arg
  Variant (18)..(18): Xaa in position 18 is any amino acid
  Variant (20)..(20): Xaa in position 20 is Ala, Ile or Val
  Variant (21)..(21): Xaa in position 21 is Ala, Asn, Ser or Thr
GXRFHPTXEELXXXYLXXKXX

SEQ ID NO: 46846 - protein, 16 aa, Artificial sequence
  protein pattern
  Variant (5)..(5): Xaa in position 5 is His or Tyr
  Variant (6)..(6): Xaa in position 6 is any amino acid
  Variant (11)..(11): Xaa in position 11 is any amino acid
  Variant (13)..(13): Xaa in position 13 is any amino acid
  Variant (14)..(14): Xaa in position 14 is Lys or Arg
  Variant (15)..(15): Xaa in position 15 is Ser or Thr
  Variant (16)..(16): Xaa in position 16 is Asp, Glu, Gly or Asn
TLVFXXGRAPXGXXXX

SEQ ID NO: 46847 - protein, 14 aa, Artificial sequence
  protein pattern
  Variant (2)..(2): Xaa in position 2 is any amino acid
  Variant (3)..(3): Xaa in position 3 is Asp, Glu or Gln
  Variant (4)..(4): Xaa in position 4 is Ala, Ile or Val
  Variant (6)..(6): Xaa in position 6 is Leu or Val
  Variant (7)..(7): Xaa in position 7 is any amino acid
  Variant (8)..(8): Xaa in position 8 is Lys or Arg
  Variant (9)..(9): Xaa in position 9 is any amino acid
  Variant (13)..(13): Xaa in position 13 is Asp or Glu
  Variant (14)..(14): Xaa in position 14 is Ile or Leu
IXXXDXXXXEPWXX

SEQ ID NO: 46848 - protein, 12 aa, Artificial sequence
  protein pattern
  Variant (2)..(3): Xaa in position 2 to 3 is any or no amino acid
  Variant (6)..(6): Xaa in position 6 is Ile, Leu or Val
  Variant (7)..(7): Xaa in position 7 is Cys or Ser
  Variant (9)..(9): Xaa in position 9 is Ala, Ile or Val
  Variant (11)..(11): Xaa in position 11 is any or no amino acid
EXXWVXXRXFXK

SEQ ID NO: 46849 - protein, 7 aa, Artificial sequence
  protein pattern
WIMHEYR

SEQ ID NO: 46850 - DNA, 1059 bp, Glycine max
  CDS (1)..(1059)
atggcacccagttttgactttgcttctagcctcctttgcacagaggacaacaccgttttcgacgagagccataataatgggggtacgatgatgtcgatgatggggatgtacgaggacacgtggagtcctaggaagcgccactttgatgaagagccagatgagttgccattgctgagtgatgaaagcttggcgatgatggtggaaaaagagtgccaacactggcctggtttgcgttgcttgaataagcttcaaactggggatttggacttcggtgccagaatggaggccgttgattggattctcaaggtccgatcgcattttggatttgggcctctctgtggatatctatctataaattacttggaccgattcctttgtgcatatgaattaccaaagggaagagtttggacaatgcaattattggctgtggcgtgtttatctctagcagccaaattagatgagacagaagttccactctctcttgatttgcaggtgggtgaatcgaagtttttatttgaggctaaaaccatacagagaatggagcttcttgtactaagcacattgaagtggagaatgcaagcaattactcctttcacattccttgattacttcctttgtaagatcaacgatgatcaaagtccattaaggtcttcaattatgcgatccatccaactcatatcgagcactgcaagagggattgacttcttggaattcaaaccatcagagattgcagcagcagtggctatgtatgtcatgggggaaacccaaacagttgacactgggaaagcaatttctgttctgattcaacacgtagaaaaggagagactattgaagtgtgttcaaatgatccaagagttatcatgcaacagtggctctgccaaggattcaagtgcttctgtcacttgcttaccccaaagcccaattggtgtgttggatgctttgtgcttcaactacaaaagtgatgacacaaatgctagttcatgtgttaattcttcacacaatagtcctgttgccaaaaggaggaagttaaacaaaacctgtggagctgaccaattgtag

SEQ ID NO: 46851 - protein, 352 aa, Glycine max
MAPSFDFASSLLCTEDNTVFDESHNNGGTMMSMMGMYEDTWSPRKRHFDEEPDELPLLSDESLAMMVEKECQHWPGLRCLNKLQTGDLDFGARMEAVDWILKVRSHFGFGPLCGYLSINYLDRFLCAYELPKGRVWTMQLLAVACLSLAAKLDETEVPLSLDLQVGESKFLFEAKTIQRMELLVLSTLKWRMQAITPFTFLDYFLCKINDDQSPLRSSIMRSIQLISSTARGIDFLEFKPSEIAAAVAMYVMGETQTVDTGKAISVLIQHVEKERLLKCVQMIQELSCNSGSAKDSSASVTCLPQSPIGVLDALCFNYKSDDTNASSCVNSSHNSPVAKRRKLNKTCGADQL

SEQ ID NO: 46852 - DNA, 1880 bp, Oryza sativa
  CDS (124)..(1275)
gagcgcgcagcgtctctctctctcgctctcgctatctatctctgtccttgtcactgtccgtccttgactcgctagcccaagaagaagaccaaccggagaggggaggggaggggaggcggagagatggctccgagctcgtcgtcctgccacgacgcggccgcgtcgatgctgctctgcgccgaggacaacagcagcatcctgtggctggaggatgaggagggggaggtgggggagaggaggagcggcggttgccggtcgatggtcggggacctcgccgccggcggcggcggcggcagcggcgggggtggagtggaggaggaggaggacatgttcccgcggcagtcggaggagtgcgtggcgagcttggtggagagggagcaggcgcacatgccgagggcggactacggcgagcggctccgcggcggcggcggcgacgtggatctccgcgtccgcagcgaggccatcggctggatttgggaggtttacacttactacaacttcagctctgtcactgcctatctggctgtaaactacctggaccgtttcctgtctcagtacgagctgccggaaggcagggattggatgacacagttgctctcggttgcgtgcttgtctatcgccgccaagatggaggagaccgtcgtcccgcaatgtttggatcttcagattggggaaccacggtttttgttcgaggtggagacgatccatagaatggagcttcttgttctcaccaacctcaattggaggatgcaagccgtgactccattctcctacatcgactacttcctacgagagctcaacagcggcaatgccgcgccgagaagctggctcctgaggtcgtcggagctcatcttgcgcatagcagcaggaactggattcctagagtttagaccctcggagatcgctgcagcggtggctgccacagtggccggagaagccaccggcgtggtagaagaagacatcgcagaggctttcacccatgtagataaggggagggtgttgcaatgccaggaagcgattcaggatcatcactactccatggccaccattaacactgtgcaacctaaacctgcaagcaccaggagaggctcagcctcagcctcctcctcctctgtgcctgagagccctgttgcggtgctggatgctggctgcctcagctacaaaagtgatgatactgatgcagcaactattgcctcacatggaggaggaagaaggaagagttgctttgatagctccccggtcactagcaagaagaggaggaagcttagcaggtgactgaccagtcaaagtgccaaatgatagatcactctctctgtagtctgtacaccactcatctcgacaaaggcaaagtcaattggtttcgattgcaacgactgttagaaagaaagaacactggaagggggccaaaagggagggaattttgacatgacgagagagagctagctagcaagaagttgctgatgaataaagaggtgaggttgacaacacctaattgctaagcttttgcaagccagcaagccatggtgatgagaggtgcccccaaagaacaaagaaaagctttgtagcaacataaaagcttgatgagtttcaaaaaaaaaagaagaaaaaaaacataaaagctacatgagatgatcaagacaaaggatggtgaggggctttaggcaacaagtccaagaactaggcatgcactgacctggctgtgtagtattcttttgttcactagctctagttgcattagttgcagtattgttttcttttttccatttcatttgtaaggagaaaattagaggcggcagcactcctttttgtgatcagcaatgatgatcatccacatgaataaaataacatggtgtaaccagaaaagaaaattaacaagaccc

SEQ ID NO: 46853 - protein, 383 aa, Oryza sativa
MAPSSSSCHDAAASMLLCAEDNSSILWLEDEEGEVGERRSGGCRSMVGDLAAGGGGGSGGGGVEEEEDMFPRQSEECVASLVEREQAHMPRADYGERLRGGGGDVDLRVRSEAIGWIWEVYTYYNFSSVTAYLAVNYLDRFLSQYELPEGRDWMTQLLSVACLSIAAKMEETVVPQCLDLQIGEPRFLFEVETIHRMELLVLTNLNWRMQAVTPFSYIDYFLRELNSGNAAPRSWLLRSSELILRIAAGTGFLEFRPSEIAAAVAATVAGEATGVVEEDIAEAFTHVDKGRVLQCQEAIQDHHYSMATINTVQPKPASTRRGSASASSSSVPESPVAVLDAGCLSYKSDDTDAATIASHGGGRRKSCFDSSPVTSKKRRKLSR

SEQ ID NO: 46854 - DNA, 1596 bp, Glycine max
  CDS (46)..(1113)
tttttttgtcccaaaaataataaactgttaattttttttccacaaatggcacccagttttgattgcgtttcgagccttctctgtgccgaagacaacagtatttttgacgaaaacgattatgggggttcggtggaggttttggaggacgcgtggcaggatcctagatatcgtcgaaaccttagtcaaagtgagaacttggatgtcccaaatgggttttttccattgcagagtgatgagtgcttgagactgatggtggagaaggaatgggatcacttgcctaatggtgattatgtgaataggctgaggagtggggatttggattttggggccagaaaagaggccattgattggattgaaaaggttcaacagcactttggttttggacccctctgtgcatatctatccataaactacttggaccgtttcctttctgcatatgaattaccaaagcacagagcttggacaatgcaattgttggctgtggggtgcttatctctggcagccaaaatggaagagactgatgtccctttctctcttgatttgcaggtgggtgaatctaagtatatatttgaggctaaaacaatacagagaatggagcttctggtgctgagcacattgagatggagaatgcaggcaattaccccattttccttcattgaccatttcctttacaagatcaatgatgatcaaagtccaattggagcttcaattttgcaatccatccagcttatactgagcactgtaagaggaattgacttcttagaattcagaccctcagagattgcagcagcagtggcaatatctgtggtgggggagggccaaacagtgcacactgagaaagcaatttctgttctgattcagcttgtggaaaaggagagggtcttgaagtgtgttaaaatgatccaagagctggcatcaaatagtggtggttctgccaagggtgctagtgcttctgtttctgtccctagcgtgcccgaaagcccactaggggtgttggtcactgcatgcttcagctacaaaagtgatgacacaaatgctgcttcatatgcaaattcttcacataacattagtccagatgctaaaaggaggaagctaaacaaaacctttggataatagtcattgtggcctgtgattttcaacgtcattcctaggatgcctttacttaaaaaaataagatgttatgtgctttgaaggtgccccctcaagggaatacccaatgaaggaagtaggaatgtagatagggaaagtgaaaaaataaaaaaccatgcataaaagggtgccaaaaagataaaggtggatcgtgactagtgggagatttttaagggatggaatcaacaaatttcatgctccaagccggatgtgaccactcaacaccagctgttaaatattttataggtctttttaacagctataaaagaggtagtgaaagaggagggaataagaaagaaggactagtgtatttgtatgtgtaagtacattttgtctttttacttttaaatgagggagttaaatagaaacccataaggcagaaaaaaaaaaaaaacaaaacaaaataagatgcagagctactagtattgagaaatatttgcggcattc

SEQ ID NO: 46855 - protein, 355 aa, Glycine max
MAPSFDCVSSLLCAEDNSIFDENDYGGSVEVLEDAWQDPRYRRNLSQSENLDVPNGFFPLQSDECLRLMVEKEWDHLPNGDYVNRLRSGDLDFGARKEAIDWIEKVQQHFGFGPLCAYLSINYLDRFLSAYELPKHRAWTMQLLAVGCLSLAAKMEETDVPFSLDLQVGESKYIFEAKTIQRMELLVLSTLRWRMQAITPFSFIDHFLYKINDDQSPIGASILQSIQLILSTVRGIDFLEFRPSEIAAAVAISVVGEGQTVHTEKAISVLIQLVEKERVLKCVKMIQELASNSGGSAKGASASVSVPSVPESPLGVLVTACFSYKSDDTNAASYANSSHNISPDAKRRKLNKTFG

SEQ ID NO: 46856 - DNA, 1077 bp, Zea mays
  CDS (1)..(1077)
atggtgccgggctatgactgcgccgcctccgtgctgctgtgcgcggaggacaacgctgctattctcggcctggacgacgatggggaggagtcctcctgggcggccgccgctacgccgccacgtgacaccgtcgccgccgccgccgccaccggggtcgccgtcgatgggattttgacggagttccccttgctctcggatgactgcgttgcgacgctcgtggagaaggaggtggagcacatgcccgcggaggggtacctccagaagctgcagcgacggcatggggacctggatttggccgccgtcaggaaggacgccatcgattggatttggaaggtcattgagcattacaatttcgcaccgttgactgccgttttgtctgtgaactacctcgatagattcctctccacgtatgagttccctgaaggcagagcttggatgactcagctcttggcagtggcttgcttgtctttggcttcgaaaatcgaagagacttttgtgccactccccttggatttgcaggtagcggaggcaaagtttgtttttgagggaaggaccataaaaaggatggagcttctggtgctaagcaccttaaagtggaggatgcatgctgttactgcttgctcatttgttgaatactttcttcataaattgagtgatcatggtgcaccctccttgcttgcacgctctcgctctttggaccttgtcttgagcaccgctaaaggtgctgaattcgtggtattcagaccctccgagattgctgccagtgttgcacttgctgctatcggcgaatgcaggagttctgtaattgagagagctgctagtagctgcaaatatttggacaaggagagggttttaagatgccatgaaatgattcaagagaagattactgcgggaagcattgtcctaaagtctgctggatcatcaatctcctctgtgccacaaagcccaataggtgtcctggacgctgcagcctgtctgagtcaacaaagcgatgacgctactgtcgggtctcctgcagtatgttaccatagttcttccacaagcaagaggagaaggatcactagacgtctactctaa

SEQ ID NO: 46857 - protein, 358 aa, Zea mays
MVPGYDCAASVLLCAEDNAAILGLDDDGEESSWAAAATPPRDTVAAAAATGVAVDGILTEFPLLSDDCVATLVEKEVEHMPAEGYLQKLQRRHGDLDLAAVRKDAIDWIWKVIEHYNFAPLTAVLSVNYLDRFLSTYEFPEGRAWMTQLLAVACLSLASKIEETFVPLPLDLQVAEAKFVFEGRTIKRMELLVLSTLKWRMHAVTACSFVEYFLHKLSDHGAPSLLARSRSLDLVLSTAKGAEFVVFRPSEIAASVALAAIGECRSSVIERAASSCKYLDKERVLRCHEMIQEKITAGSIVLKSAGSSISSVPQSPIGVLDAAACLSQQSDDATVGSPAVCYHSSSTSKRRRITRRLL

SEQ ID NO: 46858 - DNA, 1491 bp, Cucurbita maxima
  CDS (297)..(1340)
aaaagcctcgcctttttctctccttcttaatctccggcggtcttttccggcgccatcttgcaggaacgggggcggagggacggccagaaatcgccgacttaaaaaaagttgaaaagaatttaaagaagacgaccaagaacaagcccatctgcctctgcccctctgcaacgcaatagcttttttgttcttatttcccaatcaatttctccgtctaaaaagatcaacagcgatttttttccacagtttatttgtaatcggctgtttctggcctctgttccgctctgctttttgcttcaatggcgcctagttttgaccttgcagttaccaatcttttatgcgctgaagaaaattgtattttcgatgataacgatgatgacgagtgtctggtcgctccttatgttcttacgagtaatgggtttcagagttggcgccacggcggtggtcacggcggcgatgggttgccgtttacaagcgatgaatgtttgattgaaatggtggagaaggaaacccaccacttgcctgttgatgggtatctcatgaaattgcaaaacggcgagttggatgtcggggctagaaaagatgctgtcgattggattgaacaggtgagtgctcgtttcaattttggtcctctctgcacatacttagccgtaaactacatggatcgattcctctccgcttacactctaccaaaaggtaaagcttggacaatgcagctactggcagtggcatgtctgtctcttgcagccaaattggaggagactgaagtcccaatctcgttggatttacaggtgggtggatctaaatttgtgtttgaagcaagaaccattgaaagaatggagcttttagtgttgacaacattggggtggagaatgcaagccgttacgccgttctcgtttatcgatcattacctctgtaagatccatcacgacgacaagacatcgatcgcccgttcgattcatttactattgaacataattcaagggatcgagttcttggaattcaaaccatctgagattgcagcagcagtggcaatatcagtagctggagaaggtgaagagacagcaattcctcttctaattcagcagaaactccacatggaaagagtagtgaagtgcattaagttagtgaaggagatgtcggggaagacggaggaggaggagtcgaggtcgatgtcggaggggccgcagagcccgagcggggtattgaacgtgaggtgcttaagctataaaagcaatgaaagtacagcagttgggtcatgtgcaaattcttcttcacatcataacagttcaaatggttcaaagaggaggagattgaacagaccctgtgaagtggagctttagtttagaacaaataaataaaagggtgatgggaagtgtgatcttccagtcctaaagtaaattttttgtgaggattttgaaaaacaggataattataatatataaaaaatatatatatatatataaattttggaattgtttaataaaaaaaaaa

SEQ ID NO: 46859 - protein, 347 aa, Cucurbita maxima
MAPSFDLAVTNLLCAEENCIFDDNDDDECLVAPYVLTSNGFQSWRHGGGHGGDGLPFTSDECLIEMVEKETHHLPVDGYLMKLQNGELDVGARKDAVDWIEQVSARFNFGPLCTYLAVNYMDRFLSAYTLPKGKAWTMQLLAVACLSLAAKLEETEVPISLDLQVGGSKFVFEARTIERMELLVLTTLGWRMQAVTPFSFIDHYLCKIHHDDKTSIARSIHLLLNIIQGIEFLEFKPSEIAAAVAISVAGEGEETAIPLLIQQKLHMERVVKCIKLVKEMSGKTEEEESRSMSEGPQSPSGVLNVRCLSYKSNESTAVGSCANSSSHHNSSNGSKRRRLNRPCEVEL

SEQ ID NO: 46860 - DNA, 1690 bp, Sicyos angulatus
  CDS (129)..(1286)
cttttccccaatctctctctctctctctgttttcccccttttctctctgcacagttccggcggccatggccggcgctctgagccgctccgtttcccccttctgagccccctattcgaagcttcaatcgatggccatgcatcggtttgaacaatctgaccatgaagctcaaacccatttgatttcgctcgattctctgtattgcgaggaggagaaatgggaagatggtgaagatggtgtagatgatgaaattgaacaagcccatgaaataaaccagacccatcttttttctttggggttttttgaggaaaatctctttgaagaagatgagcggcttcgatccctgttgtctaaggaaacagagcagctagaacagagcaatctggaccttgaagctctgttaatggatccttctgtatctgccgctcgttcttcggctgtggagtggatgctcaaagtcaaatcccattatgggttctccactctcactgcaattatggcggtttcttatttcgacaggtttctcttgagctttcattataagagtgacaagccgtggatgaaccagcttgtggctgttacttgtctatcgctggcggctaaggtggaggagattcatgttcctcttctgttggatcttcaagttgaggatgctgagtatgtgtttgaggctaaaactattcagagaatggagcttcttgtgctctcaactcttcaatggaggatgcattttgtgaccccattttcttttcttgatcatattgtaaagaggcttggatttaaggccaatcttcagttggagtttttaaggtgttctgagcaccttctcctttctatgctctcagattcaagatttgttggttatcttccatctgtgttggcaactgcaacaatgatgaaagttatagatcatattgaaccacatgagtcattagaacaccaagaccagcttttgggtgtcctcaaaatgagcaaggaaaaagtgcaatgttgttacaatcttgttgtggagcattcaaaggcttatggcaataatggcttttatcatctcaacaatccctacaagcgcaagcatgaacatcatcaccaagctccttatagcccaagtggtgtgattgatgctggtttcagctcagacagctccaatgattcttgggcactgagagcatcatcatcagtttgttcatcacctgaatcttctttcaagaagaccaaaactgaagagccaaacctgaaatttcatcctcttaacagggtctttttggacattgttggcagcccttcttaataattcttcattgatatgccctcctcctttcctcttcaaagtactaggaaatgataatgtttataaatgctgctccatttctcagttggggaaacttttcttccattgttgtctaattgcccataatgcccttggcattagaatggggaagaaggaagaagagagcactgatggagatttgatgggaactttcacaagaacagaagtgaccagaagaaatgggcattggagaagacaaaaaagtatgcagtctggctttctactctctaaaaaaactgtatacatttctgtcatttcccatcctatttgatttcatatcatcatatcactttcctttttgttttggacaaaactcatatattattattaaataaaagcacagcatttctttttcaaaaaaaaaa

SEQ ID NO: 46861 - protein, 385 aa, Sicyos angulatus
MAMHRFEQSDHEAQTHLISLDSLYCEEEKWEDGEDGVDDEIEQAHEINQTHLFSLGFFEENLFEEDERLRSLLSKETEQLEQSNLDLEALLMDPSVSAARSSAVEWMLKVKSHYGFSTLTAIMAVSYFDRFLLSFHYKSDKPWMNQLVAVTCLSLAAKVEEIHVPLLLDLQVEDAEYVFEAKTIQRMELLVLSTLQWRMHFVTPFSFLDHIVKRLGFKANLQLEFLRCSEHLLLSMLSDSRFVGYLPSVLATATMMKVIDHIEPHESLEHQDQLLGVLKMSKEKVQCCYNLVVEHSKAYGNNGFYHLNNPYKRKHEHHHQAPYSPSGVIDAGFSSDSSNDSWALRASSSVCSSPESSFKKTKTEEPNLKFHPLNRVFLDIVGSPS

SEQ ID NO: 46862 - DNA, 1664 bp, Lolium perenne
  CDS (245)..(1282)
tctcctctctcctctctctccccccacatcttgtctttccctttgccacttcccaagacacacgccgatacagtagagagagagcggcgccttctcctccattggcgcatcttcatctaggccacagccggagggaaagagcagcaacctttaggccccaagaacgccgatccttgcgaaagaaccaaatactactccccaaccccaagtgatagcggcggcggctgtttcttgcgatcttgagatgggtatcctctgcttcggtgcttcctccaccctgctctgcggggaggacaggaacagcgtcctcggcctgggcggctgcggcggcgacggcgacggcgaggtggtggaggcggggagcggcctggatttcttggaggccggcgctctgttcccagtggactgtgacgaggtcgtgggggtgctggtgctcaaggagatcgatcatcagcccaagggcggctatgtggagagattggagcaaggaggattcgagtcttcctggaggaaagatgccatggattggatttgcaaggtccattcctactacaattttggaccactcagcctctgcctctcggtgaactacctggatcggttcctctccacgtttaatctccctcatgacaaatcttggatgcaacagttgatgtcagttgcctgcctatctcttgctgtcaagatggaggagactgtggcccctcttcctgtagaccttcaggtctgtggcgcgaagaacatgtttgaagcaaagaacattaagaggatggagctcgttgtgatggagaccctgaattggagattgcacgccgtgaccccattctctttcatctgctacttcttggacaagttcaccgaagggaagccgccgagttacatgctggcctcacggtgcgccgagctcattgttggcactgtgaaagactacagattcttgtcattcagaccttctgagattgctgccgcagtggttctattggcgctcgttgagaatcaggttattggcttcagcagtgccattgcagcatctgaaatccctgtaaataaggagatgattatgagatgctatgagctgttggtgaggatgagagggaacttgagtgcaagcctttcagcgccgcagagcccgatcggtgtgctggatgcagcatgcttcagctttaggagcgatgacacaacaccaggatcatcgccatcaaacaataacaacagcggcaacaacgatcaggcctctgctccggcttcgaagaagagaaggctaagcacatcaccaatctgatacaacgtacatatatattactcggcactgctcccggcttgttcattcgattatcatcttatccccaaagcccatcagtcatcagggtaacaagttgtggtgcaatagtaattatagtgagcattgtgccgattagagaaatgtgggcagcaataaggttagtaccggcttcttgaactctgaaagaggagaggagggtgtgtgcgttgatgggaggagggagtcttcttcctcttacaattttgtctcccccttcttcattttaattatttatttatttttcttttttccttctctgggggctactccaggagatcattgtggatatgagatggaagatgtgagaaaatcagcaaaattggattttcgtttaaaaaaaaaa

SEQ ID NO: 46863 - protein, 345 aa, Lolium perenne
MGILCFGASSTLLCGEDRNSVLGLGGCGGDGDGEVVEAGSGLDFLEAGALFPVDCDEVVGVLVLKEIDHQPKGGYVERLEQGGFESSWRKDAMDWICKVHSYYNFGPLSLCLSVNYLDRFLSTFNLPHDKSWMQQLMSVACLSLAVKMEETVAPLPVDLQVCGAKNMFEAKNIKRMELVVMETLNWRLHAVTPFSFICYFLDKFTEGKPPSYMLASRCAELIVGTVKDYRFLSFRPSEIAAAVVLLALVENQVIGFSSAIAASEIPVNKEMIMRCYELLVRMRGNLSASLSAPQSPIGVLDAACFSFRSDDTTPGSSPSNNNNSGNNDQASAPASKKRRLSTSPI

SEQ ID NO: 46864 - DNA, 1128 bp, Citrus sinensis; identical to SEQ ID NO: 24313
  CDS (1)..(1128)

SEQ ID NO: 46865 - protein, 375 aa, Citrus sinensis; identical to SEQ ID NO: 24314

SEQ ID NO: 46866 - DNA, 1686 bp, Oryza sativa subsp
  CDS (1)..(1686)
atggggttcctctgccgccgccgcagcagcgctgcaccggcggagtccttctccctgctgtgcgaggaggacagcgagagcgtcttcggcagcgacgacgacggtgtggaggagacagcgacgatggcgccggagttggggaagatgatgagccttggcttctctgcgtctcaccatcttggggatggtggtggtggtggtgaggagctcgttggatctttcatggagaaagaggtggagcagatggttgagactgcgagaggagagtacctgacgaagctgagcaatggaggcatagagctctcctgcaggattgctgccattgattggatttgcaaggttcaggcttactacagttttggaccattgtgtgcttaccttgctgtcaactatctggataggttcctctcctcggtagagttctcagtaacaaatgacatgccctggatgcagcagctgctgatagttgcttgcctatctcttgctgccaagatggaggagactgcagctcccggcactctagaccttcaggtttgcaatccagaatacgtattcgacaaagagactatccataggatggagatcattgtgctaaccactctgaaatggagaatgcaagctgtgacccctttcacttacattggtcacttcttggacaagatcaatgagggaaatcggataaccagtgaactgatatctcgatgcaccgagatcatactcagcaccatgaaagcaactgtgttcctgagattcagaccttctgagattgccacagctgtagctctatctgtagttgctgacggaggccgcgttcttgactttggcggtgttcttgaatcttctaaactccctgtagataaggacaatgtggggagatgccatcaagcaatgcaagagatggcattggtgatgcaaaacagcactgcaagtccatctggggagtgtgtgtccctgcaaagtgggcccagggatgagctagagatgggatgggcgccgtttgctatcaccatcagcgagaaagaggagagcgagcggagtgaaacaaaatatatattgacaacaagtgcagagttgatatcatttctcatgataaggcaacataaattaagggattcagttcattttccagaaactagatttacattgaatgcagtaatgttgacaactttgaacagcatacctaacttttcaggaaagaaaggtcaatcccttggtcgtcctagcactttcaatcagccaatcaggggatcatactctgaatcagccaaaaatcagagtctcatccctccacaaatctgctccccacgtgttcatctacctagcgactcgcaagatctgaaccgcgccgtggtggctgcaatggagtggcagcgtagtggcgataggcagcaacagccagaaaggagaagcgagggtgtaggaccggagcggcggtggtcagcggtggcacgcgatggtggtggaggaggcacgccggcgaccgccgtcgtcgagcctccacggtcgttgtcgccgagacccccgcagtcgccaagccgagtccccgcggccgcggtcgtcgtcgccgtcgccgagcccgccgcggccgccatcatcgagcccgctgcggtcgccgtcgacgtcgctgagctcgccgcggccacggtcgctgtcgtcgagcccgccggtgtctaccgctgctcctga

SEQ ID NO: 46867 - protein, 561 aa, Oryza sativa subsp
MGFLCRRRSSAAPAESFSLLCEEDSESVFGSDDDGVEETATMAPELGKMMSLGFSASHHLGDGGGGGEELVGSFMEKEVEQMVETARGEYLTKLSNGGIELSCRIAAIDWICKVQAYYSFGPLCAYLAVNYLDRFLSSVEFSVTNDMPWMQQLLIVACLSLAAKMEETAAPGTLDLQVCNPEYVFDKETIHRMEIIVLTTLKWRMQAVTPFTYIGHFLDKINEGNRITSELISRCTEIILSTMKATVFLRFRPSEIATAVALSVVADGGRVLDFGGVLESSKLPVDKDNVGRCHQAMQEMALVMQNSTASPSGECVSLQSGPRDELEMGWAPFAITISEKEESERSETKYILTTSAELISFLMIRQHKLRDSVHFPETRFTLNAVMLTTLNSIPNFSGKKGQSLGRPSTFNQPIRGSYSESAKNQSLIPPQICSPRVHLPSDSQDLNRAVVAAMEWQRSGDRQQQPERRSEGVGPERRWSAVARDGGGGGTPATAVVEPPRSLSPRPPQSPSRVPAAAVVVAVAEPAAAAIIEPAAVAVDVAELAAATVAVVEPAGVYRCS

SEQ ID NO: 46868 - DNA, 1071 bp, Oryza sativa subsp; identical to SEQ ID NO: 24319
  CDS (1)..(1071)

SEQ ID NO: 46869 - protein, 356 aa, Oryza sativa subsp; identical to SEQ ID NO: 24320

SEQ ID NO: 46870 - DNA, 1296 bp, Oryza sativa subsp
  CDS (1)..(1296)
atggctccgagctcgtcgtcctgccacgacgcggccgcgtcgatgctgctctgcgccgaggacaacagcagcatcctgtggctggaggatgaggagggggaggtgggggagaggaggagcggcggttgccggtcgatggtcggggacctcgccggcggcggcggcggcggcgggggtggagtggaggaggaggaggacatgttcccgccgcagtcggaggagatgaggagggggaggtgggggagaggaggagcggcggttgccggtcgatggtcggggacctcgccgccggcggcggcgtgcggccgcggcgggggtggagtggcggacgaggaggacatgttcccgcggcagtcggaggagtgcgtggcgagcttggtggagagggagcaggcgcacatgccgagggcggactacggcgagcggctccgcggcggcggcggcgacgtggatctccgcgtccgcagcgaggccatcggctggatttgggaggtttacacttactacaacttcagctctgtcactgcctatctggctgtaaactacctggaccgtttcctgtctcagtacgagctgccggaaggcagggattggatgacacagttgctctcggttgcgtgcttgtctatcgccgccaagatggaggagaccgtcgtcccgcaatgtttggatcttcagattggggaaccacggtttttgttcgaggtggagacgatccatagaatggagcttcttgttctcaccaacctcaattggaggatgcaagccgtgactccattctcctacatcgactacttcctacgaaagctcaatggcggcaatgccgcgccgagaagctggctcctgaggtcgtcggagctcatcttgcgcatagcagcaggaactggattcctagagtttagaccctcggagatcgctgcagcggtggctgccacagtggccggagaagccaccggcgtggtagaagaagacatcgcagaggctttcacccatgtagataaggagagggtgttgcaatgccaggaagcgattcaggatcatcactactccatggccaccattaacactgtgcaacctaaacctgcaagcaccaggagaggctcaggctcagcctcagcctcagcctcctcctctgtgcctgagagccctgttgcggtgctggatgctggctgcctcagctacaaaagtgatgatactgatgcagcaactattgcctcacatggaggaggaagaaggaagagttgctttgatagctccccggtcactagcaagaagaggaggaagcttagcaggtga

SEQ ID NO: 46871 - protein, 431 aa, Oryza sativa subsp
MAPSSSSCHDAAASMLLCAEDNSSILWLEDEEGEVGERRSGGCRSMVGDLAGGGGGGGGGVEEEEDMFPPQSEEMRRGRWGRGGAAVAGRWSGTSPPAAACGRGGGGVADEEDMFPRQSEECVASLVEREQAHMPRADYGERLRGGGGDVDLRVRSEAIGWIWEVYTYYNFSSVTAYLAVNYLDRFLSQYELPEGRDWMTQLLSVACLSIAAKMEETVVPQCLDLQIGEPRFLFEVETIHRMELLVLTNLNWRMQAVTPFSYIDYFLRKLNGGNAAPRSWLLRSSELILRIAAGTGFLEFRPSEIAAAVAATVAGEATGVVEEDIAEAFTHVDKERVLQCQEAIQDHHYSMATINTVQPKPASTRRGSGSASASASSSVPESPVAVLDAGCLSYKSDDTDAATIASHGGGRRKSCFDSSPVTSKKRRKLSR

SEQ ID NO: 46872 - DNA, 1068 bp, Medicago truncatula
  CDS (1)..(1068)
atgattgaagagcaattgccggcaattctcatgccactgtccagcacctccgactgcgagctcctctgcggggaggactcgtcggaggtcctcaccggagatttaccggaatgctcctccgacctggattcatcatcatcatcgcagttgccgtcgtcgtcattatttgccgaggaagaggaggagtcgattgctgttttcatcgagcacgagttcaagtttgttcctggtttcgactacgtctcaagattccaatctcgctctctcgaatccagcaccagagaagaagccattgcatggattctcaaggtacatgagtattatggatttcagccgttaacggcgtacctctccgttaactatatggatcggtttttggattctcgacctttaccggaatcaaatggatggccactgcaacttttatctgttgcatgtttgtctttagcagcaaagatggaggaaccactggttccttctctcttagactttcagattgaaggtgccaaatacatatttcaaccaaggacgattcttagaatggagctgcttgttctgactattttggattggaggctgagatcaatcaccccacttagtttcctcagtttctttgcgtgcaagctagattcaactggaactttcacccacttcataatttcacgtgctacagaaatcatcttatctaatatccaagatgctagctttcttacttacaggccatcatgcattgctgcagctgccatactctctgcagctaatgaaattcctaattggtcttttgttaatcctgagcatgctgaatcatggtgtgaaggactaagcaaagaaaaaattatagggtgctatgaattgattcaagaaattgtaagtagcaataaccaaagaaatgcccctaaagtgttgccacagttgcgagttacagctcggaccagaaggtggtccactgtctcgtcgtcgtcatcatctccatcttcctcctcttcaccctctttctcgttgtcttataaaaagaggaaattaaatagctgtttctgggtagatgttgacaaaggaaactcagagtga

SEQ ID NO: 46873 - protein, 355 aa, Medicago truncatula
MIEEQLPAILMPLSSTSDCELLCGEDSSEVLTGDLPECSSDLDSSSSSQLPSSSLFAEEEEESIAVFIEHEFKFVPGFDYVSRFQSRSLESSTREEAIAWILKVHEYYGFQPLTAYLSVNYMDRFLDSRPLPESNGWPLQLLSVACLSLAAKMEEPLVPSLLDFQIEGAKYIFQPRTILRMELLVLTILDWRLRSITPLSFLSFFACKLDSTGTFTHFIISRATEIILSNIQDASFLTYRPSCIAAAAILSAANEIPNWSFVNPEHAESWCEGLSKEKIIGCYELIQEIVSSNNQRNAPKVLPQLRVTARTRRWSTVSSSSSSPSSSSSPSFSLSYKKRKLNSCFWVDVDKGNSE

SEQ ID NO: 46874 - DNA, 1005 bp, Vitis vinifera
  CDS (1)..(1005)
atggctcagtctccagaccacttctccgcccccaccgccgccgctagcttgtactgcgccgaggacgtcgaggacgtggtttcctgggattccgatacgtggatctccgatccaggatcgtcgccgttggtttacgcccattctccgccgttcgatgaatcgaccatcgagcggttcttcggctccgagccggaccatcgtcccatggaggactacctctgccggtgccgagaccggtcggtggacgtcacctcccggcaggactccattaactggatcctaaaggtgcatgcatactaccacttcagaccagtaacggcgattctctccgtcaactacttggaccgttttctctctcgtcatgctcttccgcaaggcaatgggtggccgtttcagctgttatctgtggcatgtttgtctttggcagcgaaaatggaggaaactcatgtacccctactacttgacctccaaatgtttcagaccaagttcgtgtttgaacccaaaactattcagagaatggagctatgggtcatggccaatctcaattggagattacgctctgtcactcccttcgatttcatcgattacttcgcctccaagctcccctgctcttccgcttccaggcacgaccttcttaccagggtcttctccgtttctgccgatctcattctcaacaccacccgtgtcgtcgatttcttggggttttcaccgtccgttattgcagcggctgccgtgatttccgcctccggcaagagggaagtggtgagaagctgtcaccaactaatggaggagtacctgatcgacacgtgtccatcggctccgctcaaagacctccgacctgagccgccggctccagctagtccagtcggcgtgctggatgcggctgcctgtgggagctgcgaaacgcgttccgagaatcctggactcagcgaagccaatccaccacagccaccgccgccgaacaaacggccccgattctctgctccgggtgtacagcaaccgtag

SEQ ID NO: 46875 - protein, 334 aa, Vitis vinifera
MAQSPDHFSAPTAAASLYCAEDVEDVVSWDSDTWISDPGSSPLVYAHSPPFDESTIERFFGSEPDHRPMEDYLCRCRDRSVDVTSRQDSINWILKVHAYYHFRPVTAILSVNYLDRFLSRHALPQGNGWPFQLLSVACLSLAAKMEETHVPLLLDLQMFQTKFVFEPKTIQRMELWVMANLNWRLRSVTPFDFIDYFASKLPCSSASRHDLLTRVFSVSADLILNTTRVVDFLGFSPSVIAAAAVISASGKREVVRSCHQLMEEYLIDTCPSAPLKDLRPEPPAPASPVGVLDAAACGSCETRSENPGLSEANPPQPPPPNKRPRFSAPGVQQP

SEQ ID NO: 46876 - DNA, 1119 bp, Vitis vinifera
  CDS (1)..(1119)
  misc_feature (511)..(511): r is g or a
  misc_feature (777)..(777): r is g or a
  misc_feature (810)..(810): y is t or c
  misc_feature (835)..(835): r is g or a
  misc_feature (882)..(882): s is g or c
atggccctgcaagaacaagagactctgtcgcagaacgctccattctttcttgatggtctctactgtgaagaagagcgttttggggacgatgatgatggggaagtagaagaagcgagtgagattgagaaatgtgaccgtgagaaaaaacaatctctttttcctttgactttgcttgaacacgacctgttttgggaagatgatgaactttgctctctaatctcaaaagaagaacaggcccatcattgttacagtggcataatctcagatgggtttttaacggtggctcgtactaaggctgttgagtggatgctgaaggtcaatgctcactatgggttttctgctctgactgcagttcttgctgttaactactttgataggtttctgtcgagttcgtgttttcagagagataagccctggatgagtcaactcgctgctgtcacttgtctctctttggctgcaaaggtggacgagaccgatgttcctcttctcttggacctgcaggtggaggagrcaaaatatgtgtttgaagcgaagacgattcagaggatggaacttctggtgctctctagtcttcagtggaagatgaatccagtgaccccaatttcgttttttgatcacattataaggaggcttggattgaagacccacttgcattgggagtttctggagaggtgtgagcgccttctcctctctgtcattgctgattcgaggttcttgtgttatcttccttccaccttagctactgcaaccatgctgcatataatcacagaggttgarccttgtaatccattggaataccagaatcagctyctgagtgtactcaaaatcagtaagracgatgtggatgactgctataaacttatcctggaatttttgggtaascatgggcatacccaaaaccagacccacaagcgcaagcatctgtccctgcccagcagcccaagtggcatctttgatgcgccctttagctgtgatagctccagtgattcatgggctatggcgacatcaatttcatcatcttcccagcctcttttcaaaaagagcagagcccaggaccagcagatgcgacttccttcactgaatcgagtgtctgttgatgtgcttagcagccctcgttaa

SEQ ID NO: 46877 - protein, 372 aa, Vitis vinifera
  misc_feature (171)..(171): The Xaa at location 171 stands for Ala, or Thr.
  misc_feature (294)..(294): The Xaa at location 294 stands for Asn, or Lys.
MALQEQETLSQNAPFFLDGLYCEEERFGDDDDGEVEEASEIEKCDREKKQSLFPLTLLEHDLFWEDDELCSLISKEEQAHHCYSGIISDGFLTVARTKAVEWMLKVNAHYGFSALTAVLAVNYFDRFLSSSCFQRDKPWMSQLAAVTCLSLAAKVDETDVPLLLDLQVEEXKYVFEAKTIQRMELLVLSSLQWKMNPVTPISFFDHIIRRLGLKTHLHWEFLERCERLLLSVIADSRFLCYLPSTLATATMLHIITEVEPCNPLEYQNQLLSVLKISKBDVDDCYKLILEFLGXHGHTQNQTHKRKHLSLPSSPSGIFDAPFSCDSSSDSWAMATSISSSSQPLFKKSRAQDQQMRLPSLNRVSVDVLSSPR

SEQ ID NO: 46878 - DNA, 1260 bp, Vitis vinifera
  CDS (1)..(1260)
atggctcagcctcaagaacagaaaacacaccaacagccgcacaacctcccattccttttggacactctttactgcgaagagagccactgggaggaagaagtgagagaggagggtttcttagaagaggaagaagaagagagctattacggtgatggcagtaaaccaaacgctccaccgttattggaaccggacctcttatgcgaagacgaagagctcgtctctttgttctcaaaagaagagaaaaatgacctccatagtaaccccgaaagcaacccattagcggctggagctagaagcgaggccgtggagtggatgctgagggtcaatgcccactactctttctctgctctcactgcagtcctggctgttaattattttgataggtttctcttcagctgcgatgttcagggagaaaagccatggatgacccaactcgctgctgtggcttgtctctcccttgctgctaaggtggaagagacccaagtgccccttttactagacttgcaagtggaggagacgatgtatgtgttcgaggcaaagaccattcagaggatggagattatggtgctctccacgcttcgatggaagatgaaccctgtgaccccgctttcatttcttgattatattacgaggaggcttggattgaaaaatcatctctgttgggaatttctcaagaggtgtgagcgcgtccttctctctgttctttctgattgtaggttcgggtgttatcttccttctgtaatcgccaccgccataatgctgcatgtcatcgatagcgtagaaccctgcattcgtgcccaataccagagccagctactgggtattctcggaattgataaggacaaagtagaggattgcagtcagctcatcctggatatagcatcgagtgcccgttgtcaccatcacaataaacgcaagttttcctccacaccgggcagtccaaatggcgttatggatggatggttcagctgcgacagctcaaatgattcgtgggctgtagcatcctcggtttcttcctcgccttcctcatcggagcatttgtccaagaagagtagaggtcaggagcagcatctgcagactctcaaccaagctactgctgatgccccgacgaaagggatgaagttctttgtggattggggcgcatctgagaaagggaaaagcaaagatgaaaaatgggtggatcaaccaaaagaaagaacaggattttatgccggattagcaaaggaggtgctggagaagattaaagagattttggattaa

SEQ ID NO: 46879 - protein, 419 aa, Vitis vinifera
MAQPQEQKTHQQPHNLPFLLDTLYCEESHWEEEVREEGFLEEEEEESYYGDGSKPNAPPLLEPDLLCEDEELVSLFSKEEKNDLHSNPESNPLAAGARSEAVEWMLRVNAHYSFSALTAVLAVNYFDRFLFSCDVQGEKPWMTQLAAVACLSLAAKVEETQVPLLLDLQVEETMYVFEAKTIQRMEIMVLSTLRWKMNPVTPLSFLDYITRRLGLKNHLCWEFLKRCERVLLSVLSDCRFGCYLPSVIATAIMLHVIDSVEPCIRAQYQSQLLGILGIDKDKVEDCSQLILDIASSARCHHHNKRKFSSTPGSPNGVMDGWFSCDSSNDSWAVASSVSSSPSSSEHLSKKSRGQEQHLQTLNQATADAPTKGMKFFVDWGASEKGKSKDEKWVDQPKERTGFYAGLAKEVLEKIKEILD

SEQ ID NO: 46880 - DNA, 1155 bp, Pisum sativum
  CDS (1)..(1155)
atggcaatccatcatcaccaccaccatcatcaacaactacaccacaactctcttcttgatgctctttactgcgatgaagaaaaactcgaagaagaacaagaagacgtttcatctcaacaaagtgatgtcacaacaaacaatgacaacaacatcctagactccacttccctgttccctcttcttctcctggaacaaaacctcttctctcaagatgaagaactcaccacacttttctccaaagaaaaaacccaacaagaaacgtactacgaggatctgaaaaatgtcgtggattttgtttctctctctcaacctcgtcgtgaagctgttcaatggatgcttaaagtcaatgctcattacgccttttcacctctcactgcaacactcgctgttacttactttgataggttccttctaaccttccatttccaaaaagataagccatggatgattcagcttgttgctgttacttgcatctctttagctgctaaagttgaagaaactcaagttcctctcctcttagacctacaagtgcaagatactaaatatgtgtttgaagcaaaaactattcagagaatggagcttttgattctgtcaacactgaaatggaagatgcatcctgtgacaccacactcttttctagatcatataataacaaggcttggtttgaaaactaatcttcattgggagtttttaagacgctgtgagaatcttcttctatctgtacttttagattcaagatttgttggttgtgttccctctgtgttggctactgctacaatgctgcatgtgatagaccagattgaagagagtgatgataatggtgtggactacaaaaatcagcttcttagtattctcaaaatcaacaaggagaaagtggatgaatgttataatgctattgttgaggttactaatgaaaataattatggtcataaacgaaaatatgaacaaatccctggaagtccaagtggcgtaattgatgctgtttttagttctgatggttccaatgattcatggaaagtgggttcatcctcgtattcaacctcagagcctgtttttaagaaaacaaaaactcaagggcaaaataggaatttgtcacctcttaatagggtcattgttggaattcttgccactgctagtgctactacctctccttaa

SEQ ID NO: 46881 - protein, 384 aa, Pisum sativum; identical to SEQ ID NO: 24324

SEQ ID NO: 46882 - DNA, 1119 bp, Chenopodium rubrum
  CDS (1)..(1119)
atggcaccaagttttgatcttttatgcgcagaggataactcaagcatttttgatgaagttgatgataattattatggggttgttgacgatgatgtccttcagatttgtaacttgcaacaacaacatgggaatctacgaaactttgatgattttacattaatattactaataataatcaaggaacacaactttgaggctttaatttctgggttttttgtggcaaatcatgagtgtttggcttccttgtttgacaatgaaagacaacattttctgggtcttgattatttgaagagattccgaaatggggatttggatttgggtgctagaaatctggttattgattggattcataaggttcaatcccactacaattttgggccactttgtgtttatctatctgtaaactacttggatcgcttcctttcggcttatgaattacctggcaaagcttggatgatgcaattgcttggggttgcttgtttatctctagctgccaaggtggatgaaactgatgttcccctcatcttagatttacaagtgagtgaaagtaagtttgtatttgaagcaaaaacaatccaaagaatggaacttttagtgttgagcactttgaagtggagaatgcaatcagtgacaccattttctttcatagactatttcctttataaactgagtggagataaaatgccatcaaaaagcctaatttttcaagccatccaactcatcctaagcacaatcaaaggaattgacttgatggaattcagaccttcagaaatagcagcagcagtggcaatttctgtaacacagcaaacccaaatagtagaattcactgataaagcattctcttttcttactgatcatgtggaaaaggagagattgatgaaatgtgttgagataatgcatgatttgagaatgagcagtagatcaaatggtgcattagcttcaacatctgtgccacagagtccaattggggtgcttgatgcttcagcatgcttaagctataaaagtgatgatacatcaacaactccatctggatcttgtggaaattctgctcatagtagccctgcttctgctccaccacccaagagaaggaagctagacaggacttctcagatcagttag

SEQ ID NO: 46883 - protein, 372 aa, Chenopodium rubrum; identical to SEQ ID NO: 24326

SEQ ID NO: 46884 - DNA, 1122 bp, Nicotiana tabacum
  CDS (1)..(1122)
atggcaatagaacacaatgagcaacaagaactatctcaatcttttcttttagatgctctttactgtgaagaagaagaagaaaaatggggagatttagtagatgatgagactattattacaccactctcttcagaagtaacaacaacaacaacaacaacaacaaagcctaattctttattacctttgcttttgttggaacaagatttattttgggaagatgaagagcttctttcacttttctctaaagaaaaagaaacccattgttggtttaacagttttcaagatgactctttacactgttctgcccgtgttgattctgtggaatggattttaaaagtgaatggttattatggtttctctgctttgactgccgttttagccataaattactttgacaggtttctgactagtcttcattatcagaaagataaaccttggatgattcaacttgctgctgttacttgtctttctttagctgctaaagttgaagaaactcaagttcctcttcttttagattttcaagtggaggatgctaaatatgtgtttgaggcaaaaactattcaaagaatggagcttttagtgttgtcttcactaaaatggaggatgaatccagtgaccccactttcatttcttgatcatattataaggaggcttgggctaagaaataatattcactgggaatttcttagaagatgtgaaaatctcctcctctctattatggctgattgtagattcgtacgttatatgccgtctgtattggccactgcaattatgcttcacgttattcatcaagttgagccttgtaattctgttgactaccaaaatcaacttcttggggttctcaaaattaacaaggagaaagtgaataattgctttgaactcatatcagaagtgtgttctaagcccatttcacacaaacgcaaatatgagaatcctagtcatagcccaagtggtgtaattgatccaatttacagttcagaaagttcaaatgattcatgggatttggagtcaacatcttcatattttcctgttttcaagaaaagcagagtacaagaacagcaaatgaaattggcatcttcaattagcagagtttttgtggaagctgttggtagtcctcattaa

SEQ ID NO: 46885 - protein, 373 aa, Nicotiana tabacum; identical to SEQ ID NO: 24328

SEQ ID NO: 46886 - DNA, 1110 bp, Nicotiana tabacum
  CDS (1)..(1110)
atggcaatagaaaacaatgagcaacaagaactatctcaatctttccttttagatgctctatactgtgaagaagaagaagaaaaatggggagatttattagatgatgagactattattacaccactctcttcagaactaacaacaacaacaaagcctaattctttattgcctttgcttttgttggaacaagatttgttttgggaagatgaagagcttctttcacttttctctaaagaaaaagaaacccattgttggtttaacagttttcaagatgaccctttactctgttcagctcgtgtagatgctgtggaatggattttaaaagtgaatggttattatggtttctctgctttgactgccattttagcaatcaattactttgacaggtttttgactagtcttcattatcagaaagataagccttggatgattcaacttgctgctgttacttgtctttctttagctgctaaagttgaagaaactcaagttcctcttcttttagactttcaagtggaggatgctaaatatgtgtttgaggcaaaaactattcaaagaatggagcttttggtgttgtcttcactaaaatggaggatgaatccagtgaccccactttcatttcttgatcatattataaggaggcttgggctaaagaataatgttcactgggaatttcttagaagatgtgaaagtctccttctctctattatggctgattgtagattcgtacgttatatgccgtctgtattagccactgcaattatgctccacgttattcatcaagttgagccttgtaattctgttgaataccaaaatcaacttcttggggttctcaaaattagcaaggagaaagtgaataattgctttgaactcatctcagaagtttgttctaagcccatttcacacaaacgcaaatatgagaatccaagtagtagcccaagtggtgtaattgatccaatttacagctcagaaagttcaaatgattcgtgggatttggagtcaacatcttcatattttcctgttttcaagaaaagcagagtacaagaacagcaaatgaaattggcatcttcaattagcagagtttttgtggaagctgttggcagtcctcattaa

SEQ ID NO: 46887 - protein, 369 aa, Nicotiana tabacum; identical to SEQ ID NO: 24330

SEQ ID NO: 46888 - DNA, 1119 bp, Camellia sinensis; identical to SEQ ID NO: 24331
  CDS (1)..(1119)

SEQ ID NO: 46889 - protein, 372 aa, Camellia sinensis; identical to SEQ ID NO: 24332

SEQ ID NO: 46890 - DNA, 1116 bp, Camellia sinensis; identical to SEQ ID NO: 24333
  CDS (1)..(1116)

SEQ ID NO: 46891 - protein, 371 aa, Camellia sinensis; identical to SEQ ID NO: 24334

SEQ ID NO: 46892 - DNA, 1068 bp, Zea mays; identical to SEQ ID NO: 24335
  CDS (1)..(1068)

SEQ ID NO: 46893 - protein, 355 aa, Zea mays; identical to SEQ ID NO: 24336

SEQ ID NO: 46894 - DNA, 1161 bp, Medicago sativa
  CDS (1)..(1161)
atggctatccatcatcatcatcacaatcaccaacaacttcaacaacacacttcttctctttttgatgcactttactgtgatgaagaagaaaaatgggaagatgatgatgaaggagaagttgtagatgaaggagcacaaagtgatgtcacaacaacaaactatgatatattggactctacttcccttttacctctgcttttgttagaacagaacttgttcaatgaagatgaagaactcaacactcttttctccaaagagataactcaacaagaaacatattacgaggatctgaaaaatgtgatcaactttgactcactctctcaaccacgtcgtgaagctgttgaatggatgcttaaagtcaatgctcattatggtttctctgctctcactgcaacacttgctgttaactatcttgataggtttcttttaagcttccatttccaaaaagagaaaccatggatgattcagcttgttgctgttacttgcatctctttagctgctaaagttgaagaaactcaagttcctcttctcttagaccttcaagtgcaagatactaaatatgtgtttgaggcaaagactattcagagaatggagctattgattctgtcaacactgaaatggaagatgcatccagtgacaacacactcttttctagatcacattataagaaggcttggattgaaaactaatcttcattgggagtttcttaggcgctgtgagaatcttcttctatctgtacttttagattcaagatttgttggttgtgttccttctgtgttggccactgctacaatgttgcatgttatagaccagattgaacagagtgatgataatggtgtggattacaaaaatcagcttcttaatgttctcaaaatcagcaaggagaaagttgatgaatgttataatgcgattcttcatcttacaaatgcaaataattatggtcataaacgaaaatatgaagaaatccctggtagtccaagtggcgtaattgatgctgtttttagttctgatggttctaacgattcgtggacagtgggagcatcatcatattcaacctcagagcctgtgtttaagaagaccaagaatcaaggacaaaatatgaatttgtcaccgattaacagggtcattgtcggaattcttgccactgcaacctctccttaa

SEQ ID NO: 46895 - protein, 386 aa, Medicago sativa; identical to SEQ ID NO: 24338

SEQ ID NO: 46896 - DNA, 1119 bp, Scutellaria baicalensis; identical to SEQ ID NO: 24339
  CDS (1)..(1119)

SEQ ID NO: 46897 - protein, 372 aa, Scutellaria baicalensis; identical to SEQ ID NO: 24340

SEQ ID NO: 46898 - DNA, 1104 bp, Nicotiana tabacum; identical to SEQ ID NO: 24341
  CDS (1)..(1104)

SEQ ID NO: 46899 - protein, 367 aa, Nicotiana tabacum; identical to SEQ ID NO: 24342

SEQ ID NO: 46900 - DNA, 1077 bp, Saccharum officinarum
  CDS (1)..(1077)
atggtgccgggcgatgactgcgccgcctccgtgctgctgtgcgcggaggacaacgctgctgttctcggcctggacgaggagggggacgagtcctcttgggcggccgccgctacgccgccgcgcgacaccgtcgtcgtcgccgccgccaccggggtcgccgtccacgggttcctgatggagctccccttgctctcggatgactgcgttgctgcgctcgtggagaaggaggtggagcacatgcccgcggaggggtacccccagaagcttcagcgacggcatggggacctggatttggccgccgtcaggaaggacgccgtcgattggatttggaaggtcattgagcattacaatttcgcaccgttgactgcagttttgtctgtgaactacctcgatagattcctctccacgtatgagtttcctgaagacagagcttggatgactcagctcttggcagtggcatgcttgtctttggcttcgaaaatggaagagacttttgtgccactccccttggatttgcaggtagccgagacaaagtttgtttttgagggaaggactataagaaggatggagcttcatgtgctaaacaccttaaagtggaggatgcatgctgttactgcttgctcatatgttaaatattttcttcataagttgagtgatcatggtgcaccctccttgctcgcgcgctctcgttcttccgatcttgtcttgagcactgctaaaggtgctgaatttgtggtattcagaccctcagagattgctgccagtgttgctcttgctgcaatgggggaatgcagaagttctgtaattgagagagctgctagtagttgcaagtatttgaacaaggagagggttttaagatgccatgaaatgattcaagagaagattactatgggaagcattgtcctaaagtctgccggatcatcaatttcctctgtaccacaaagccccattggtgtactggatgctgctgcctgcctgagtcaacaaagcgatgatgctactggtggatctcctgcagtatgttaccatagttcttcgacgagcaagaggagaaggattagtaggcgcctactctaa

SEQ ID NO: 46901 - protein, 358 aa, Saccharum officinarum
MVPGDDCAASVLLCAEDNAAVLGLDEEGDESSWAAAATPPRDTVVVAAATGVAVHGFLMELPLLSDDCVAALVEKEVEHMPAEGYPQKLQRRHGDLDLAAVRKDAVDWIWKVIEHYNFAPLTAVLSVNYLDRFLSTYEFPEDRAWMTQLLAVACLSLASKMEETFVPLPLDLQVAETKFVFEGRTIRRMELHVLNTLKWRMHAVTACSYVKYFLHKLSDHGAPSLLARSRSSDLVLSTAKGAEFVVFRPSEIAASVALAAMGECRSSVIERAASSCKYLNKERVLRCHEMIQEKITMGSIVLKSAGSSISSVPQSPIGVLDAAACLSQQSDDATGGSPAVCYHSSSTSKRRRISRRLL

SEQ ID NO: 46902 - DNA, 1032 bp, Saccharum officinarum; identical to SEQ ID NO: 24343
  CDS (1)..(1032)

SEQ ID NO: 46903 - protein, 343 aa, Saccharum officinarum; identical to SEQ ID NO: 24344

SEQ ID NO: 46904 - DNA, 1191 bp, Glycine max; identical to SEQ ID NO: 24347
  CDS (1)..(1191)
  misc_feature (117)..(117): n is a, g, c or t

SEQ ID NO: 46905 - protein, 396 aa, Glycine max; identical to SEQ ID NO: 24348
  misc_feature (39)..(39): The Xaa at location 39 stands for Asp, or Glu.

SEQ ID NO: 46906 - DNA, 1062 bp, Triticum aestivum
  CDS (1)..(1062)
atggttccgtccgggtacgactgcgccgcctccgtcctgctctgcgccgaggacaacgccgccatcctcggcctcgacgacgacgaggaagactgctcctgggcggcggcggccgccaccccgccgcgcatcgccgccgatgccgccgcggcggcggaggggttcctggtggaccaccccgtgcagtccgatgagtgcgtggcggcgctcgtcgagacggagaaggagcacatgcccgccgacgggtacccccagatgctgctgcgccggcccggggccctggatttggccgccgtcaggagggacgccatagattggatttgggaggtcattgagcatttcaatttcgcgccgttgactgcggtcctgtctgtcaactaccttgataggttcctctccgtctatccccttcctgaaggcaaagcttgggtgacacagctcttggcagtggcttgcttgtccctcgcttcaaagatggaggagacctatgtgccgctccccgtcgacctgcaggtggttgaggcaaattctgcgttcgaggggaggaccataaaaaggatggagcttttggtgctcagcaccttaaaatggaggatgcaagctgttactgcttgctcatttattgactacttcctgcgcaaattcaatgatcatgacgcgccctccatgctcgcattctcccgctcgaccgacctcatcctgagcacagctaaaggagctgattttttggtgttcagaccttcagagattgctgcaagtgtcgcacttgccgcatttggggagcgcaatacttcagtagtcgagcgggctacaactacttgcaagttcataaacaaggagcgagtgttaagatgctacgaactgattcaagacaaggtagcaatgggaaccattgtcctaaagtcagctggatcatcaatgttctctgtgccgcaaagcccgataggcgtgtcggatgctgctgcatgtctcagccaacagagtgatgatactgctgttggatctccagcaacatgctaccaagcctcttcggcaagcaaaaggaggagaattggcagatga

SEQ ID NO: 46907 - protein, 353 aa, Triticum aestivum
MVPSGYDCAASVLLCAEDNAAILGLDDDEEDCSWAAAAATPPRIAADAAAAAEGFLVDHPVQSDECVAALVETEKEHMPADGYPQMLLRRPGALDLAAVRRDAIDWIWEVIEHFNFAPLTAVLSVNYLDRFLSVYPLPEGKAWVTQLLAVACLSLASKMEETYVPLPVDLQVVEANSAFEGRTIKRMELLVLSTLKWRMQAVTACSFIDYFLRKFNDHDAPSMLAFSRSTDLILSTAKGADFLVFRPSEIAASVALAAFGERNTSVVERATTTCKFINKERVLRCYELIQDKVAMGTIVLKSAGSSMFSVPQSPIGVSDAAACLSQQSDDTAVGSPATCYQASSASKRRRIGR

SEQ ID NO: 46908 - DNA, 1053 bp, Euphorbia esula
  CDS (1)..(1053)
atggcaaatcattctccattatttctctatgatgctctttactgctcagaagaagataactgggaaggagaagttgttgatatttttcatgaacaagaagatcaaggagaaaacacctctgtctttccccaaaattcttccccagtagacttaaattgggaagaagatgagcttacgtctgtattttctaaacaagagcaaaaccaactatataaaaaactagaaatcaacccatgtctagctaaatctcgccgtgatgctgtggattggatgatgaaagtcaatgcccattactctttcactgctttgacttcagttttggccgttaattttcttgatagattcctttttagcttcgatcttcaaacggagaagccatggatgacccagctcacagctgtagcttgtctctccttagcagcaaaagtagaagagacacaagtcccacttttattggaccttcaggtggtggacagtaagtatgtgtttgaggctaaaactatacaaagaatggagcttttggtgctttctactcttcaatggagaatgaaccctgtaactccattatcatttattgattacatgacaagaaggcttggttttaaggattatctttgctgggaatttatccggagatgcgagcttattgttctctctataatctcagatatgagatttataccttatctccctagtgaaattgcttccgcaataatgctacatgtgattaatggtatagaacccagtcttggagatgaattcgaaacccagctattcgggattcttggaattgataaggagaaggtgaataattgcagagaaatgataatcgagttaggatcaagatattacggcaaccaatcaaacaaaagaaaatacgggtcggatccgggtagtccaaattgcgtaatggatgtctcatttagttcagataattcaaacgattcttgggcagtcggatctaaatcatcatcagtgtcttcctcacccgcggcgaagaaactcagggcagtttcagggatgaaccatgaaaatgcgataatactttcctaa

SEQ ID NO: 46909 - protein, 350 aa, Euphorbia esula; identical to SEQ ID NO: 24352

SEQ ID NO: 46910 - DNA, 1068 bp, Euphorbia esula
  CDS (1)..(1068)
atggaagacagcactcagatttcattgatttttgatgggttgtactgcgaagaacaaggcattggtgaagattttgacgatgggaatgaagattatgtgaaaaaggagttatctttatcttctgttttgcttgagcaggacttgttttggaccgatgatgagttgttaaatctgatttcaaaagaaaaagagactcattttagttttggggatttttcctctcatgggtctttaatggtggctcgtaaagaggcaatagattggattttgagggtaaaagggttttatggattcaatgctttgagctgtgttcttgctgttaattattttgatagattcatttcgagtttagtttttacaagagataaaccatggatgggtcaacttgctgctgttgcttgtttatctttggctgctaaaatggaggagactcaagttcctcttcttctagatttacaagtggaagaatcaaagtatgtgtttgaggcaaagactataaagagaatggagcttcttgtgctctctactcttcaatggaggatgaatcctgtgaccccaatttgctactttgatcacattataaggaggctaggacttaaaaaccatctgcattgggaatttttgaggagatgtgagcttttacttctctctgtcatttctgattcaagattcatgagttatgcaccttctatattagcaacttcaattatgatccatgtgattaaggaggttgacccatttagtcaaatggaataccagaaccagcttttggatgtgatcaaaatcaacaaggaggaagtgaaccagtgttacaagctcatcttggagctatcgggtaagcaagatcaagggtacaaacgcaagtatccctcaagacccgggagcccaaatggtgtgattgatgcctattttagtggagatagctcgaatgattcgtggggagtttcttcctcaatctcatcatcaccatcgattcctcgatttaaaaggatcaaatcccaggatcaacagatgaggttgccttcaataaaccgtatgtttgtggatgtgcttagtagtcctcattga

SEQ ID NO: 46911 - protein, 355 aa, Euphorbia esula; identical to SEQ ID NO: 24354

SEQ ID NO: 46912 - DNA, 1116 bp, Populus alba
  CDS (1)..(1116)
atgtctttcttacaacaacaagagactcataatcaaagcccagcattggctcttgacgggctttactgtgaagaggatggatttggagaggattattcttgtggtttggatgatgaaactagccaggtttatgatcaaaatgtgaaaaaggagcaaaatttatcttctgttttgcttgagcaagacttgttttgggaagatagcgagttactgtctttaatctccaaagagaaagagacccatgttgtttttgatagtgtaggatctagagatggatctttaatggtggttcgtagagaggcagttgagtggtttttgagggtaaaggcacattatgggttcagtgctttgactggtgttcttgctgtgaactactttgataggttcatttcaagttcaaggtttcgaagagataagccatggatgggtcaacttgctgctgtggcttgtttgtctctggctgctaaagtggaggaaacccaagtgcctcttcttttagacttgcaagtggaggatgcaaagtacgtttttgaagccaagaccataaagagaatggagctgtgggtgctgtcaactcttcattggaggatgaatcctgtaacctcaatttctttctttgatcacattataaggagacttggattaaagacccacatgcattgggagtttttatggaggtgtgagcgattgcttctttctgtcatttctgattcaaggttcatgagttatcttccttctatattagcaactgcgacaatgttgcatgttatcaaggaggttgagccacgtaatcaactgcaataccaaactcagctcatggctgtgctaaaaaccaatgaggatgaagtgaatgagtgttacaggctcattttagagcaaccaggcagccaaaaccaacgccacaagcgcaagtacctgtccacacccagcagcccaaatggtgtcatcgatgcatctttcagctctgagaactcaaatgattcgtgggctgtggcatcatcaatctcatcatcatcatcagtgcctcaattcaaaagaagcagggcccaggttcagcagatgcgattgccttcactaaatcgtatgtgcgtggatgtgcttagcagtcctcattag

SEQ ID NO: 46913 - protein, 371 aa, Populus alba; identical to SEQ ID NO: 24356

SEQ ID NO: 46914 - DNA, 1083 bp, Physcomitrella patens
  CDS (1)..(1083)
atgtctcccagtgttgattgcttggcaagcttgtattgtgcggaggatgtgagtggcacggcgtggaatgagagtgagatgtgtggcgccgcggacagagtgtttgagtctcagcctgctgtgtttatggatttccccgtggaggatgatgaggccattgccactctgctcatgaaagaggcgcaattcatgcccgaggctgattacctggagaggtaccagtctcggaaattgagccttgaggctcgtctggctgctattgagtggattttgaaggtccactctttttacaactacagtcccttgactgtagctttagcggtgaattacatggaccgttttttgtcgcgttattactttccggaaggaaaggagtggatgctgcagcttctgtcagtggcgtgcatatctctcgctgcgaaaatggaggaatccgacgtgccgatactgctcgattttcaggtcgaacaggaggaacacatatttgaagcccacactattcagaggatggaactcttagtcttgtccactctagagtggcggatgagtggagtgacgcctttctcgtatgtagattattttttccacaagcttggtgttagtgacttgctgctgagagctcttctctctcgagttagcgaaattattttgaaatccattcgtgttacaacttccctccaataccttccctcggttgtcgcggcggcatctattatctgcgcactggaagaagtgacaactattcgcacgggagatctacttcgaacattcaacgagttgttagttaatgtggaatctgtgaaggactgttacatcgatatgaggcaatctgagataggtccttactgtgtccgcatgggtctgaagaggaagatattgcacgcatcggaaccccaaagtcccgttggagtattggaggcagccgatgtgagcagccccagtgggactgtgcttggattctcttctcgcgagtccagtccagatgtgacggattcaccgccttcaactaattcccagcgcaagcgtcgcaagttgtgtcttcacaatgagagttgtctccacgtagagagcgccagcctataa

SEQ ID NO: 46915 - protein, 360 aa, Physcomitrella patens; identical to SEQ ID NO: 24358

SEQ ID NO: 46916 - DNA, 1074 bp, Helianthus tuberosus
  CDS (1)..(1074)
atggccattttatcaccatattcatcttctttcttagacacactcttttgcaatgaacaacaagatcatgaatatcatgaatatgagtatgaagatgaatttacacaaaccaccctcacagattcatctgatctccatcttccccccctggaccaactagatttgtcatgggaacatgaagagcttgtgtccttgttcacaaaagaacaagagcagcaaaaacaaaccccttgtactctctcttttggcaaaactagtccctcagtttttgctgctcgtaaagaggctgtagattggatccttaaggtcaaaagttgttatggattcacacctcttacagccattttagccatcaattatcttgataggtttctttctagcctccattttcaagaagataaaccttggatgattcaacttgttgctgttagttgtctctctttagctgctaaagttgaagaaactcaagtgccactcttactagatcttcaagtagaggacactaagtacttgtttgaggctaaaaacatacaaaaaatggagcttttggtgatgtcaactttgaaatggaggatgaacccagtgacaccaatctcatttcttgatcacattgtaagaaggcttggattaactgatcatgttcattgggattttttcaagaaatgtgaagctatgatcctttgtttagtttcagattcaagattcgtgtgttataaaccatccgtgttggccacagctacaatgcttcacgttgtagatgaaattgatcctcccaattgtattgactacaaaagtcaacttctggatcttctcaaaaccactaaggacgacataaacgagtgttacgagctcattgtcgagctagcttacgatcatcacaacaaacgaaaacatgatgcaaacgagacaacaaccaatccggttagtccagctggcgtgatcgatttcacttgtgatgaaagttcaaatgagtcatgggaacttaatgctcatcatttccgcgagccttcattcaagaaaacaagaatggattcaacaattcgggttcgggtttggttcacttataagctttaa

SEQ ID NO: 46917 - protein, 357 aa, Helianthus tuberosus; identical to SEQ ID NO: 24360

SEQ ID NO: 46918 - DNA, 1131 bp, Populus tremula x Populus tremuloides
  CDS (1)..(1131)
atggcatcaatgtataacccagaaacgagtgcggtacaagaccaacaacaaaaccctacattactttatgatgctctctattgttctgaagagaattgggtggaagaagttagagaggactggtttcaagatgaactagaaggagagagctattgtagcaacaatagcaataaactaaacacttttccaatattgctagaacaggacttaagctgggaagacgaggagctttcctctttgtttgccaaggaggagcaaaatcagctgtgcaaagacttagaaaccaacccgtctttggctagggctcgctgtgaggctgtagagtggattctaaaggtcaatgaacactactctttcaccgctctaactgcagttttggcagtgaactatcttgataggtttttattcagtgtccaccttcagaaagagaagccatggatggcccaacttgcagctgtgtcttgcctctcacttgctgccaaagtggaggagacgcaagtgccccttctattggattttcaggtggaggacagtaaatacgtgttcgaggccaaaactatccagagaatggagatcctggtgctttctactcttaaatggaagatgaatccagtaaccccaatatcgtttcttgattacatcactagaaggcttggcctagaacactatctttgtttggaatttctcaagaggtgtgagcgcatggtcctctctatcttggcagattctaggtctatgccttatgttccttctgtaatggccgctgccacgatgctctatgttattgataacatagaacccagtcttgcagcagaataccaaagccagctgttgagcattcttggaatcgataaagacaaggtagaggattgcagcaagttcttaatggaatttgctctaagagaccattttaagcttctctcaaacaaacgcaagttttgttcacttccaggcagtcctagcggtgtggttgatgtgtcttttagctcagacagctcaaatgattcatggtctgtggcatcatccgtgtcttcatcaccaaagcctctgtccaagaagagtagggcactgcagagtctaaacaacgcaacaacttcagatttttctcagcattcctcgccagtgccttaa

SEQ ID NO: 46919 - protein, 376 aa, Populus tremula x Populus tremuloides; identical to SEQ ID NO: 24362

SEQ ID NO: 46920 - DNA, 1149 bp, Daucus carota
  CDS (1)..(1149)
atgagattcactagggtttacacagaggttttcaatatgacagaccatagcctcctctgcacagaaaccaataacttgtgttttgatgatcttgaggctagagatgatcaggacccgagaatagattgtgaaaatgtggtgggtaatgaatcagaagctttgatttgtgccgtcccattacagagagatgaagattttgtgtttgtgtttgagagcaaggtgaatttttgcccagaggtgattttctccacagatagaagtggtgagcttgatttgtgtgtcagaaaagaggcccttgattggatttataaggctcatgctcattacaattttggagcattgagtgtttgcttagcagtgaattatttggatcgctttctttctctttatgaattgccgagtggaaaaaagtggactgtccaattgttagctgttgcctgtttatcactggcagcaaaaatggaggaggttaatgtgccactaactgttgatttacaggtggctgatcctaagttcgtgttcgaggcgaaaacgattaaaagaatggagcttttggtgttgagcaccttgaaatggagaatgcaagcctgcaccccttgttcattcatagattacttccttcgaaaaatcaacaatgctgatgcgcttccatcggggtctctgatcgataggtcgattcagttcattttgaaaacgatgaaaggtattgattttctggaattcaggccctcagaaatttcagcagctgtggcaatttgtgtaacaagagaagcacaaacactagacattaataaggcaatgtctaatatcatacctgttgaaaaggatagagtattcaagtgtattgaaatgattcaagatctgacattggttactgagactagtaatgtagctagtggtagaacaagagcacaagtgccacaaagtcctgttggggtgttggatgctgcatgcttgagctataagagtgatgagagaacagttgggtcatgtcctaattcttctttacatactgagactagtccacacactaaaaggaggaagctgattgagatcatgaaatgtggattttactctatcactcagtttcagatttttagtgaatgggagttttggtgtggctgcctttgcaagcgaccacctttatga

SEQ ID NO: 46921 - protein, 382 aa, Daucus carota; identical to SEQ ID NO: 24364

SEQ ID NO: 46922 - DNA, 1143 bp, Lagenaria leucantha
  CDS (1)..(1143)
atgaagaagatggctttgcactcaaataaacacagaacccaacgcctccataactctctcttcttcttcgacttcctccactgcactgaacaacaacaccttcaaacagagcatcccattttccttaacaatgggggcaccaacgacttccctcttttccaacaaacaaccacccatttccttgtttacgaagacgaggagctcaatcatttgttgtccaaagaaaaggaccaaaatctccaaaccggtgctgttttgaaaaccttggttcaaacagataatgctctgtctctcgctagaacagaggccatcgactggttgcttaaagttaatgccttttatggtttctcctctctcacagctctcttagccattaattacctcgatagaatcctctctgggccctattttcaaagagataagccatggatgcttcagcttgctgctgtaacttgcatctctttagctgctaaagtcgaagaaattcgtgtccctcttcttctagacctccaggtggaagattcaaagtacatttttgaagcgaaaacgatacagaggatggagcttttagtgcttactgctctgcaatggaagatgcacccagtggcccctgtttcgtttcttggcattatcacaaaaggacttggaatgaagaatcagtacattcaaagagagtttcttagacgctgtgagcgtattcttctctctctcgtctctgattcgagatcggtggggattcttccttctataatggcggtatcagcaatggtgagcgttgttgaagagatgggaaactgtaacccattggaggagtttcaggatcagcttcttaatgccctcaaaataaataaggggagagtgaaggagtgttgtaaagtgataatggaggcaaaaataaaaggatcagggaagaggaagcatgtggaggaggaagcagaagcagaagcagaatcagaatcatcagaagcagaaacagagggagaagcagaagcagaagcagggagcccaaatggagtaatggaggctaatttcagctgtgaaagctccaacgattcgtgggaaatggggacgattgtgtcagaatacacacatttttcttcttcttcttcttcttcttccaaaagaatcagacccactcgatga

SEQ ID NO: 46923 - protein, 380 aa, Lagenaria leucantha; identical to SEQ ID NO: 24366

SEQ ID NO: 46924 - DNA, 1059 bp, Lagenaria leucantha
  CDS (1)..(1059)
atggtaccaccgtatgcgcttgattctctttattgttcagaagaccactgggagaacgacgacgaagaagaagaaaggggttttcatgagcaaccttattctaatttaacaaccgaatcaagttctccgattctggcagtggcagagcaggatctgttttgggaaaacgatgaattaatttctctgttctcaagagagaagcctaatgaactgtttaaaaccattcagattgacccttctcttgctgccgcccgacgaagcgccgtcgggtggatgctgaaggttaatgcccattattctttctctgctctcactgcggttctcgccgtcgattatttggatcggtttctgtcctgttttcattttcaaagagacaagccatggatgtctcagcttgctgctgttgcttgtatctctcttgctgccaaagtagaggagacccaagtccctcttttattggacctacaagtggaagacagtagatatctatttgaagccaagacaattaagaaaatggagcttcttgtgctctctacgcttcaatggcggatgaatcctgttaccccattttcttttgtggattatatctcaaggaggcttggattcaaggaacatatctgctgggaaattctttggcagtgtgagcgaactattctctctgttattttagagtcagattttatgtcctttcttccttctgtaatggccaccgctacaatgctgcacgttttcaaagctatggaagaacccaccctcagcgttgaatacgattcccagcttcttaacatcctcggaatcgacaaggggaatgtggaagaatgctgtaagctgatctcaaatgcatcaagaagaaacggcaaccaattcaagaaacgtaaaattgggtcgattccgggtagcccgaacggcgtgatggacgtgtcattcagctccgatagctcgaacgactcgtggtcagtggcctcgtcagtttcatcttcgccagagccattaacgaagaagaacagagccaatggatcaatgtctggagattgcgaaacattcagaaccctctcttaa

SEQ ID NO: 46925 - protein, 352 aa, Lagenaria leucantha; identical to SEQ ID NO: 24368

SEQ ID NO: 46926 - DNA, 927 bp, Helianthus annuus
  CDS (1)..(927)
atggccattttatcacgatattcatcttcgaacacactcttctgcattgaagaacaagttcatgaagatgaagatgagttaacacatcaagattcctctgcaatccatccattagacctacaagatttgtgttgggaacatgaagaacttgtctctcttttcacaaaagaagaagaacaacaaaagcaaaccccttggccttcttcttgtactttgtcttttcgtaaagaggctgtggattggatccttaaagtcaaaggttgtcatggattcacacctctaacagccattttagccatcaattatcttgatcggtttctgtccagtctccattttcagaaagctaacacaccttggatgattcaccttgttgctgttacttgtctttctttggctgctaaaattcaagaaactcatgtgcctttgctcttagatcttcagctagaggagagtaagttcttgtttgaggccaagaacatacaaaagacggagcttttggtgatgtcaacactgaaatggaggatgaacctagtgacaccaatctcatttcttgatcacattgtaagaaggcttggattatcaaatcatcttcattgggatttcttcaagaaatgtgaagctatgattctttacctagtggctgattcaagatttgtgtgctataaaccatctgtgttggcaaccgctacaatgctttgtgttgtagaggaaatcgacccgaccaattccattggctacaaaagtcaacttctggatcttctcaaaaccactaaggaccacataaatgagtgttacaagcttgttatggatctatcctatgataatcacaacaaaggaaagcgtgatgaaaacgagagaacaatttatccggttagtccagctggttttattggttttatgtgccacgaaagttcaaatgattcatga

SEQ ID NO: 46927 - protein, 308 aa, Helianthus annuus; identical to SEQ ID NO: 24370

SEQ ID NO: 46928 - DNA, 1173 bp, Zea mays; identical to SEQ ID NO: 24371
  CDS (1)..(1173)

SEQ ID NO: 46929 - protein, 390 aa, Zea mays; identical to SEQ ID NO: 24372

SEQ ID NO: 46930 - DNA, 1077 bp, Zea mays
  CDS (1)..(1077)
atggtgccgggctatgactgcgccgcctccgtgctgctgtgcgcggaggacaacgctgctattctcggcctggacgacgatggggaggagtcctcctgggcggccgccgctacgccgccacgtgacaccgtcgccgccgccgccgccaccggggtcgccgtcgatgggattttgacggagttccccttgctctcggatgactgcgttgcgacgctcgtggagaaggaggtggagcacatgcccgcggaggggtacctccagaagctgcagcgacggcatggggacctggatttggccgccgtcaggaaggacgccatcgattggatttggaaggtcattgagcattacaatttcgcaccgttgactgccgttttgtctgtgaactacctcgatagattcctctccacgtatgagttccctgaaggcagagcttggatgactcagctcttggcagtggcttgcttgtctttggcttcgaaaatcgaagagacttttgtgccactccccttggatttgcaggtagcggaggcaaagtttgtttttgagggaaggaccataaaaaggatggagcttctggtgctaagcaccttaaagtggaggatgcatgctgttactgcttgctcatttgttgaatactttcttcataaattgagtgatcatggtgcaccctccttgcttgcacgctctcgctcttcggaccttgtcttgagcaccgctaaaggtgctgaattcgtggtattcagaccctccgagattgctgccagtgttgcacttgctgctatcggcgaatgcaggagttctgtaattgagagagctgctagtagctgcaaatatttggacaaggagagggttttaagatgccatgaaatgattcaagagaagattactgcgggaagcattgtcctaaagtctgctggatcatcaatctcctctgtgccacaaagcccaataggtgtcctggacgctgcagcctgtctgagtcaacaaagcgatgacgctactgtcgggtctcctgcagtatgttaccatagttcttccacaagcaagaggagaaggatcactagacgtctactctaa

SEQ ID NO: 46931 - protein, 358 aa, Zea mays; identical to SEQ ID NO: 24374

SEQ ID NO: 46932 - DNA, 1080 bp, Solanum lycopersicum
  CDS (1)..(1080)
atggttttccctttagattcccagctccaaaatcctatttctgctcttcttgatggcctttactgtgaggaagatcgattcttggatgatgatttaggggaatggtctagtttagatgtcggaaatgaaaatgttaaaaagactctgcctttattagaatgtgacatgttttgggaacatgatgagcttgccacacttttatctaaggaaaatgagtttcatttgggttttcaatctttaatctcagatgggtctttaatgggggctagaaaagaggctttggattggatgttgagggtcattgcttactatggctttactgctaccactgctgttttagctgtgaactattttgataggtttgtgtctggatggtgctttcagaaagataagccttggatgagtcagcttgctgctgttgcctgtctttccattgctgctaaagtggaggagacccaagttccccttttgttagacctacaagttgctgattctagatttgtgtttgaggcaaagactatacagagaatggaactcttggtgctttctactcttaagtggaaaatgaatctggtgacaccattatctttcattgatcatattatgaggagatttggattcatgagcaacctgcatatggattttcttaagaagtgtgaacgcctcattcttgatatcatcactgattctaggctcttgcattatcctccatctgttattgcaactgcatcgatgttttatgtgatcaatgacattgagcctagcaatgctatggaataccaaaatcagctcatgagtgttcttaaagtcagaaaggacatctttgaggaatgccatgatcttattcttgagctaatggacactgcctgttacaagctctgccaaagcctcaagcgcaaacatcattcagtacctggtagtccaagtggtgttattgatgcatattttagtagtgagagctcgaatgaatcatggtcagtagcatcttcgatttcatcctcacctgagcctcagtataagagaaacaaaactcaagatcagcgaatgacactagctccactgggtagtaatcttcactga

SEQ ID NO: 46933 - protein, 359 aa, Solanum lycopersicum; identical to SEQ ID NO: 24376

SEQ ID NO: 46934 - DNA, 1011 bp, Solanum lycopersicum
  CDS (1)..(1011)
atgtctcaccattatcaagaacaagaacaactagaagcacaaaagattccatttttattagattcactttactgtgaagaaaataatatactcactgaagtatcaatagagacagagagtttttcttcacatgatttgttatgggaagaagaagaacttacctctctgttttctaaagaaacagagtatgaaataagctacaatgtgttagaaaaaaaccagtcttttatttcatcaagaagagaatcagttgaatggatactcaaaacaactgcttattactctttttctgctcaaactggatttcttgcagttaattactttgatagatttctgttatttagttttaatcagtctctgaatcataagccatggatgaatcaacttgttgctgttacttgtctttcattagctgctaaagttgaagaaactgatgttcctctgcttcttgaccttcaagttgaggaatcaggatttttgtttgaatctaaaacaatacagagaatggagatgttgattctgtctacacttaaatggaagatgaatccagtaaccccattttcatttcttgattttataactagaagacttggattgaagcactgtctatctttggaatttctgaggagatgtgagaaagtgcttctttacacaattactgatgatagattcattggttaccttccttctgcaatggcatctgccacaatgttgcatgttcttgataggcttaagccttgcattggagaaaagtaccaagatcaacttttgggcattcttggaattgtcaaggagaaggtggaaggatgttacaggctaatacaagaagtggcttgcaacattgactttggttcaaataagagaaagtttgggacattaccagggagtccaacaggggttatggatatgtcatttagctcagattactccaatgactcatggtcagtggctacatcagttacttcatcacctgagccattgtccaagaagattagggagtcaaatgaatga

SEQ ID NO: 46935 - protein, 336 aa, Solanum lycopersicum; identical to SEQ ID NO: 24378

SEQ ID NO: 46936 - DNA, 1095 bp, Solanum lycopersicum
  CDS (1)..(1095)
atggcaatagagaataatgatcaatctttttttttagatgtgctttactgtgaagaagaagaagaaaaatggggtgatttgttagaggatgaagaaggggttattattaacccattgttgttatcttccgaaggaacaacaaaaactaattctttattattattacctctgcttctgttggaacaagatttgttttgggaagatgaagagcttctttcacttttcgttaaagaaaaagaaactcgttgttgttttgaaagttttgggagtgacccttttctctgttcagctcgtgttgatgttgttgaatggattcttaaagtgaatgctcattatgatttctcagcattgactgccattttagccattaattatcttgacaggtttctttctagccttcaatttcagaaagataagccatggatgactcaacttgctgctgtcacttgtctttctttagcggctaaagttgaagaaactcaagttccccttcttcttgacttccaagtggaggatgcaaaatatgtgtttgaggcaaagactatacaaagaatggagcttctggtactgtcatcactgaaatggaggatgaatccagtgaccccactttcatttcttgatcatattataagaaggcttgggctaaagaacaatgttcattgggaatttctcagaagatgtgaaagtcttcttctatctgtcatgattgattgtagatttgtacgttatatgccttctgtattggctactgcaattatgcttcatgttattcatcaaattgagccttgtaatgctattgactatcaaaatcaacttcttggggttctcaaaattagcaaggagaatgtgaataattgctatgaactcatatccgaagtgtcatcaaagcctattacatcacacaaacgcaaatatgatgaaaatcccagtagtccaagtggtgtaatagatccaatttacacttcagaaagttcaaatgattcatgggatttagatttgccttcgttcaagaaaagcaaagttcaagaacagcaaatgaaaatgtcatcatcattgagcagagtttttgtggaagctgttggtagtcctcattaa

SEQ ID NO: 46937 - protein, 364 aa, Solanum lycopersicum; identical to SEQ ID NO: 24380

SEQ ID NO: 46938 - DNA, 1086 bp, Antirrhinum majus
  CDS (1)..(1086)
atgttgttttcacattctcaacaaacccatctccaaaatccaatctttgatgctcttctctgtaacgaggagcatttcgatgaagatttggatcttgggtccgggttaaaagacccgggttttataaatcagattcatcataatcaaaaaaaagaagaaccatttactacttttctgtttgagcacgaccttttgtgggaagatgacgagcttgttaatctcttgtctaaggagaaagaacaagaacaacaagcccatttggggtacgatgatgtaatggactctgatgggtttttgaaaagggtgagaaatgaagggattaagtggatgttgaaggtgattggacactatgggttcaatgcgatgactgctgttttagctgtgaattattatgatagatttattacaaacgttgggtttcaaaaggataagccttggatgagtcaattggctgctgttgcttgtctttctgtaaaagtggaggagactcaagtgcctctgttgctggattttcaagtagaggaatcaaagtatgtgtttgaggcaaagactatacagaggatggagcttttggtgctcactactttgaaatggaagatgaaccctgtgacgcctatctcgttctttgaccacattgtgaggaggtttgagttgatgaacaatgtgcaatgcgagtttatgaagaggtgtgagagtgtcattctctccatcatcaccgattatcgatttgtgcgctatcttccttctgttgttgctgctgcaaccatgatatatgtaatcaaagagctttatccttgtgatgcattggaataccagaatgagtttgtgactgtgctgagaactagcaaggaaaagactgatgattgccatatgctaatcactgaagtaatcaacaatcaaagctacatcctttgtcacaagcgcaagtacggttccataccaagcagtccaaatggtgtgatcgatgcctatttcagctctgatggctctaacgattcgtggtcagcagtgtcatccgtttcatcatcaccagagcccgtgtttaagagaatcagagccattgggggggctaatcctcctcattga

SEQ ID NO: 46939 - protein, 361 aa, Antirrhinum majus; identical to SEQ ID NO: 24382

SEQ ID NO: 46940 - DNA, 993 bp, Antirrhinum majus
  CDS (1)..(993)
atgtcactgtcgtgctccgattgcttctccgatcttctctgcggcgaggattcaaatattatattctccggcggcggagatgacctgccggaatatacttccgacgtggaatctattccgacggacgtcgatgaatctatcgccggacttttagaagacgagagagatctcgccggagttaactctagctcctctaatcaatccgttgattcttctactagaacagaatctaccgcatggatcctcaaggtgcaacgttattacggttttcagccgttaacggcgtatctcgccgttagctacttcgatcgttttctaaacgcccatcacttgccgaagttgaatgggtggccaatgcaactattgtccgttgcgtgcttgtcattagctgctaagatggaggaatctctggttccttctcttttggatcttcaggtggaaggagcaaactttatttttgaaccaagaaatatccaaagaatggagcttcttgtgcttagggttttagattggagacttcggtcaatatctccattttgttatctcagctttttcgcactcaaaatcgacccaactggaacctatacaggtttcctgacgtcaagggctaaagaaattattctctcaaccgttcaagagaccagtttgattgagtataggccatcatgcattgctgctgcaacaatgctttcatcggcaaatgatctgccaaaattttctttcatcactgctcaacatgctgaggcatggtgtgatggacttcacaaagataatattgctagttgcatcaaactgattcaaggagtggagtcaaacaataggccaaaaaagcagcccaaggttttaccacagctccgagtcatgactcgggcgagtttggcctcgagtgaatcgtcatcatctacctcgtcctcgccctcttataaaaggaggaaattaaataatagctctcgggcggatgatgacaaagagagctctgattatggggtctaa

SEQ ID NO: 46941 - protein, 330 aa, Antirrhinum majus
MSLSCSDCFSDLLCGEDSNIIFSGGGDDLPEYTSDVESIPTDVDESIAGLLEDERDLAGVNSSSSNQSVDSSTRTESTAWILKVQRYYGFQPLTAYLAVSYFDRFLNAHHLPKLNGWPMQLLSVACLSLAAKMEESLVPSLLDLQVEGANFIFEPRNIQRMELLVLRVLDWRLRSISPFCYLSFFALKIDPTGTYTGFLTSRAKEIILSTVQETSLIEYRPSCIAAATMLSSANDLPKFSFITAQHAEAWCDGLHKDNIASCIKLIQGVESNNRPKKQPKVLPQLRVMTRASLASSESSSSTSSSPSYKRRKLNNSSRADDDKESSDYGV

SEQ ID NO: 46942 - DNA, 1107 bp, Nicotiana tabacum
  CDS (1)..(1107)
atgggaatacaacacaatgagcataatcaagaccaaacccaatctttccttttagatgctctttactgtgaagaagaaagatgggaagaaacaattgaagatgagattttagaaaaagaagcaacactaccacttcctctgcctttactagaacaagacttgttttgggaagatgaagagctactctctcttttcacaaaagaaaaagaaacaatttccaactttgaaactattaaaacagaccctttactttgtttatctcgtaaagaagctgtgaaatggattcttaaagtaaatgctcattatggattctcaacattcactgctattcttgctattaattactttgataggtttctttcaagtcttcattttcagaaagataagccttggatgattcaacttgtagctgttacttgtctttctttggctgctaaagttgaagaaactcaagttcctcttcttttggacttccaagtggaggatgcaaaatatgtgtttgaggccaaaactattcaaagaatggagcttttggtattgtcctctttaaagtggaggatgaatcctgtaaccccactttcatttgttgatcatataataagaagacttgggctaaagagccatatacactgggaatttctcaagcagtgtgagagaattcttcttttggtcatagctgattgtagattcttaagttatatgccttctgtattggctactgctactatgcttcacgttattcatcaagttgagccttgtaatgctgctgactaccaaaatcaacttcttgaggttctcaacattagcaaggagaaggtgaatgattgctatgaacttataacagaggtgtcttacaactctatttcacacaagcgcaagtatgagagtccaataaatagcccaagtgctgttattgatacattttacagctctgaaaactcaaatgaatcatgggatttgcaaacttcttcctctattccatccacttattcacctcgtgatcaatttttgcctttgtttaagaaaagcagagttcaagaacagcaaatgagattgacatctttaagcagagtttttgtggattatgctgttggcagccctcgctaa

SEQ ID NO: 46943 - protein, 368 aa, Nicotiana tabacum; identical to SEQ ID NO: 24384

SEQ ID NO: 46944 - DNA, 1137 bp, Medicago sativa; identical to SEQ ID NO: 24385
  CDS (1)..(1137)

SEQ ID NO: 46945 - protein, 378 aa, Medicago sativa; identical to SEQ ID NO: 24386

SEQ ID NO: 46946 - DNA, 1104 bp, Nicotiana tabacum
  CDS (1)..(1104)
atggttttccctttagatactcagctcctaaatccaatctttgatgtcctttactgtgaggaagatcgattcttggacgatgatgatttaggagaatggtctagtactttagaacaagtaggaaataatgtgaaaaagactctacctttattagaatgtgacatgttttgggaagatgaccagcttgtcactcttttaactaaggaaaaagagtctcatttgggttttgattgtttaatctcagatggagatgggtttttagtggaggttagaaaagaggcattggattggatgttgagagtcattgctcactatggtttcactgctatgactgctgttttagctgtgaattattttgataggtttgtatctggactctgctttcagaaagataagccttggatgagtcaacttgctgctgtggcttgtctttctattgctgctaaagtggaagagacccaagtcccccttctcttagacctccaagtggctgattcaagatttgtgtttgaggcaaagactattcagagaatggaactcttggtgctctccactcttaagtggaaaatgaatccagtgacaccactatctttcattgatcatatcatgaggagatttggattcatgaccaatctacatttggattttcttaggagatgtgaacgcctcattcttggtattatcactgattctaggctcttgcattatcctccatctgttattgcaactgcagtagtgtatttcgtgatcaatgagattgagccttgcaatgcaatggaataccagaatcagctcatgactgttcttaaagtcaaacaggatagttttgaagaatgccatgatcttattctagagctaatgggcacttctggctacaatatctgccaaagcctcaagcgcaaacatcaatctgtacctggcagtccaagtggagttatcgatgcatattttagttgcgacagctctaatgattcgtggtcggtagcatcttcaatttcatcgtcaccagaacctcagtataagaggatcaaaactcaggatcagacaatgacactggctccactgagttctgtttctgtcgttgtgggcagtagtcctcgttga

SEQ ID NO: 46947 - protein, 367 aa, Nicotiana tabacum; identical to SEQ ID NO: 24388

SEQ ID NO: 46948 - DNA, 1122 bp, Nicotiana tabacum
  CDS (1)..(1122)
atggcaatagaacacaatgagcaacaagaactatctcaatcttttcttttagatgctctttactgtgaagaagaagaagaaaaatggggagatttagtagatgatgagactattattacaccactctcttcagaagtaacaacaacaacaacaacaacaacaaagcctaattctttattacctttgcttttgttggaacaagatttattttgggaagatgaagagcttctttcacttttctctaaagaaaaagaaacccattgttggtttaacagttttcaagatgactctttactctgttctgcccgtgttgattctgtggaatggattttaaaagtgaatggttattatggtttctctgctttgactgccgttttagccataaattactttgacaggtttctgactagtcttcattatcagaaagataaaccttggatgattcaacttgctgctgttacttgtctttctttagctgctaaagttgaagaaactcaagttcctcttcttttagattttcaagtggaggatgctaaatatgtgtttgaggcaaaaactattcaaagaatggagcttttagtgttgtcttcactaaaatggaggatgaatccagtgaccccactttcatttcttgatcatattataaggaggcttgggctaagaaataatattcactgggaatttcttagaagatgtgaaaatctcctcctctctattatggctgattgtagattcgtacgttatatgccgtctgtattggccactgcaattatgcttcacgttattcatcaagttgagccttgtaattctgttgactaccaaaatcaacttcttggggttctcaaaattaacaaggagaaagtgaataattgctttgaactcatatcagaagtgtgttctaagcccatttcacacaaacgcaaatatgagaatcctagtcatagcccaagtggtgtaattgatccaatttacagttcagaaagttcaaatgattcatgggatttggagtcaacatcttcatattttcctgttttcaagaaaagcagagtacaagaacagcaaatgaaattggcatcttcaattagcagagtttttgtggaagctgttggtagtcctcattaa

SEQ ID NO: 46949 - protein, 373 aa, Nicotiana tabacum; identical to SEQ ID NO: 24390

SEQ ID NO: 46950 - DNA, 1065 bp, Nicotiana tabacum; identical to SEQ ID NO: 24391
  CDS (1)..(1065)

SEQ ID NO: 46951 - protein, 354 aa, Nicotiana tabacum; identical to SEQ ID NO: 24392

SEQ ID NO: 46952 - DNA, 1020 bp, Arabidopsis thaliana; identical to SEQ ID NO: 24393
  CDS (1)..(1020)

SEQ ID NO: 46953 - protein, 339 aa, Arabidopsis thaliana; identical to SEQ ID NO: 24394

SEQ ID NO: 46954 - DNA, 1092 bp, Oryza sativa subsp
  CDS (1)..(1092)
atgatgtacaagcatgtcggagacgacgcacgcgggtcctccgcgggcgtagtgtgctgcgtggatgtcgtcgacgacgacgtcgacgcgctgctgtgcggcgaggacgccggcgagctggagcgcgagggcgagccggcgcaggggtcgtcgccgtcgtcgtcattgtcgtgcgccgccgcggccgccgcagccgctgacgacgacgacgaagacgaagacgaacacggcgtccatggcgaggtggtgcaggtgactccaggcggggaggagcactgctacgactacgactacgacgtcgacgtgcccgtcggtgccgagctcgtcatgcctgcttgctcgccgccgaggacagccgtccaccggcccggctggtcggagtccgtctcctggatcctcaaggtccggtcagtccacggcttccagccggcgacggcgtacctcgccgtgagctacatggataggttcatgtcgtctcgcagcttgccggatcatggttgggcatcccaattgctatgtgtggcttgcttgtctctggctgccaagatggaggagtcctctgccccacccctccttgaccttcagattgaaggaacaagattcatttttgaacctcggacgatccagaggatggagctcatcgtcctcgtggagttggattggaggctccggtcagtgacgcctttcgcctttgttgatttcttcgcttgtaaggttggctcctctggaagaagctcaaggatcttggcattgcgtgcttgccaaataattctcagtgcaattcatgagctcgagttcctgaaccactgcgcctcatcaatggcggcagcggcggtgctattcgcagtaaatgagtcgcctgcagccatgtcgcacaggagcagcgtcagctctgaatcagctgcctcgtggtgcattggcctgactgaggagaggatcagcagttgctatcagctgctgcagcgagctctgaatgctactgcgaggaagaggaagcgacatccgatgatacttgcagcttgttcatcagtaacaagttcatcttcccggagcaaaaggcgcaaacttgatggccattttggagaagattga

SEQ ID NO: 46955 - protein, 363 aa, Oryza sativa subsp
MMYKHVGDDARGSSAGVVCCVDVVDDDVDALLCGEDAGELEREGEPAQGSSPSSSLSCAAAAAAAADDDDEDEDEHGVHGEVVQVTPGGEEHCYDYDYDVDVPVGAELVMPACSPPRTAVHRPGWSESVSWILKVRSVHGFQPATAYLAVSYMDRFMSSRSLPDHGWASQLLCVACLSLAAKMEESSAPPLLDLQIEGTRFIFEPRTIQRMELIVLVELDWRLRSVTPFAFVDFFACKVGSSGRSSRILALRACQIILSAIHELEFLNHCASSMAAAAVLFAVNESPAAMSHRSSVSSESAASWCIGLTEERISSCYQLLQRALNATARKRKRHPMILAACSSVTSSSSRSKRRKLDGHFGED

SEQ ID NO: 46956 - DNA, 1086 bp, Arabidopsis thaliana
  CDS (1)..(1086)
atggctgagaatcttgcttgtggtgaaaccagcgagtcatggatcattgacaacgacgatgatgatatcaactatggcggcggatttacgaacgagattgattacaatcaccaactttttgctaaagacgacaactttggcggcaacggatcaattccgatgatgggttcttcttcatcgtccttgagtgaagacagaatcaaagagatgttggtgagagagattgagttttgccctggaactgattatgttaagagattgctttctggtgatttggatttgtctgttcgaaaccaagctcttgattggattctaaaggtttgtgctcattaccattttggacatctgtgcatatgcctatccatgaactacttggatcggttcttaacatcctatgaattgccgaaagacaaggattgggctgctcagttactagctgtgtcttgcttatcattagcatccaaaatggaagaaactgatgtgcctcacattgttgatttacaggtggaagatcccaagtttgtttttgaggccaaaacaataaaaaggatggagcttttggttgtcaccactttgaattggagattgcaagctctaactccattctccttcattgattatttcgttgacaagatcagtggtcacgtgtcggagaatttgatctatagatcgtcaagattcatcttaaacaccaccaaagcaattgaattcttagacttcaggccttctgagatagctgcagctgctgcagtgtctgtttccatttcaggagaaacagaatgcattgatgaggaaaaggcactgtctagtctcatatatgtaaaacaggagagggtgaagagatgtttgaatctgatgagaagtctcactggggaggagaatgtgcggggaactagtttatcgcaggagcaggcgcgagttgcggtaagagctgtacctgcaagtccagttggagtgttggaagcaacatgtttgagctataggagtgaagagagaacagttgagtcatgtacaaattcctcacagagtagtccagacaacaacaacaacaacaacaacagcaacaagaggaggagaaaacaatga

SEQ ID NO: 46957 - protein, 361 aa, Arabidopsis thaliana
MAENLACGETSESWIIDNDDDDINYGGGFTNEIDYNHQLFAKDDNFGGNGSIPMMGSSSSSLSEDRIKEMLVREIEFCPGTDYVKRLLSGDLDLSVRNQALDWILKVCAHYHFGHLCICLSMNYLDRFLTSYELPKDKDWAAQLLAVSCLSLASKMEETDVPHIVDLQVEDPKFVFEAKTIKRMELLVVTTLNWRLQALTPFSFIDYFVDKISGHVSENLIYRSSRFILNTTKAIEFLDFRPSEIAAAAAVSVSISGETECIDEEKALSSLIYVKQERVKRCLNLMRSLTGEENVRGTSLSQEQARVAVRAVPASPVGVLEATCLSYRSEERTVESCTNSSQSSPDNNNNNNNSNKRRRKQ

SEQ ID NO: 46958 - DNA, 1131 bp, Arabidopsis thaliana; identical to SEQ ID NO: 24311
  CDS (1)..(1131)

SEQ ID NO: 46959 - protein, 376 aa, Arabidopsis thaliana; identical to SEQ ID NO: 24312

SEQ ID NO: 46960 - DNA, 1104 bp, Arabidopsis thaliana
  CDS (1)..(1104)
atggctttggagaaagaggaagaagcgtcacaaaacggtgcgttttgtgtccttgatgggctctattgcgaggaagaaaccgggtttgtggaggacgatcttgatgacgatggagatttagattttctcgagaaatctgatgagagtgttgtaaagtttcagtttttacctcttttggatatgttcttatgggatgacgatgagattctgagtttgatttcaaaggaaaacgaaacgaatccatgttttggggaacaaatcttagatggctttttggtttcttgtaggaaagaggctttagattgggttcttagggttaaatctcattatgggtttacttcattgacggctatacttgctgtgaactacttcgataggtttatgacaagtataaagcttcagactgataagccatggatgtctcagcttgttgctgtggcttctttgtctttagctgctaaagttgaagagattcaagttccattgctcttagacctccaagtggaagaagcaagatatctctttgaagctaagacgattcaaagaatggagcttttgattctttctactcttcaatggagaatgcaccctgtgactccaatctctttctttgatcacattatccggcgatttggctctaaatggcaccagcaattagacttctgtaggaagtgtgagcgtcttctgatctctgttattgctgatacgaggtttatgaggtacttcccttctgtcttagctactgcaataatgatccttgtcttcgaggaattgaagccatgtgatgaagttgaataccaatctcaaataacgactctactcaaagtcaatcaggagaaagtaaatgaatgctatgaactgttgttggagcacaatccaagcaagaagaggatgatgaatttggttgatcaggacagtccaagtggtgtattagactttgatgacagctcaaatagctcctggaatgtctccactactgcttcagtgtcctcatcatcttcgtctccagagcctctgctcaagagaagaagagttcaggagcagcaaatgagattgccctcaataaaccgtatgtttctcgatgtgcttagtagtcctcgctag

SEQ ID NO: 46961 - protein, 367 aa, Arabidopsis thaliana; identical to SEQ ID NO: 24398

SEQ ID NO: 46962 - DNA, 1086 bp, Arabidopsis thaliana; identical to SEQ ID NO: 24399
  CDS (1)..(1086)

SEQ ID NO: 46963 - protein, 361 aa, Arabidopsis thaliana; identical to SEQ ID NO: 24400

SEQ ID NO: 46964 - DNA, 927 bp, Arabidopsis thaliana; identical to SEQ ID NO: 24401
  CDS (1)..(927)

SEQ ID NO: 46965 - protein, 308 aa, Arabidopsis thaliana; identical to SEQ ID NO: 24402

SEQ ID NO: 46966 - DNA, 897 bp, Arabidopsis thaliana
  CDS (1)..(897)
atggctgaatttatggaaccaaatcttgtatccaattttgatgatgagaagagcaattctgtcgacacaagatcgatttttcagatgggttttcctctggagagcgaagagatcgttagagagatgattgagaaagagagacaacactcaccgagagatgattacctcaagagactgagaaacggagatttggatttcaatgtcagaatccaagcccttggttggatttggaaggcctgtgaggaacttcaatttggaccattgtgtatatgtctagcaatgaactacttggatcgtttcttatctgttcatgacttacctagtggaaaagcttggactgtacaattgttggctgttgcttgtttatcattggcagctaaaatagaggaaactaatgttccagagttaatgcagctgcaggttggagctcccatgttcgtgtttgaggctaaatcagttcaaaggatggaacttttggtgttgaacgtattaagatggaggttacgggcagtgacaccgtgctcttacgttagatacttcctgagtaagatcaatggctatgatcaagaaccacatagcagattggtaactagatcactacaagtgatagccagcacaaccaaaggtattgacttcttggagtttagagcttcagagattgctgctgcagttgctctttctgtttctggagaacactttgacaaattctccttctcttcttccttctcaagccttgaaaaggagagagtgaagaagattggtgaaatgatagagagagacggatcaagttcaagttcacaaacaccaaataatacagtcttacaatttaagagtcgtcgttattctcattctctttctactgcttctgtttcctcctccctcacttctctttcttaa

SEQ ID NO: 46967 - protein, 298 aa, Arabidopsis thaliana
MAEFMEPNLVSNFDDEKSNSVDTRSIFQMGFPLESEEIVREMIEKERQHSPRDDYLKRLRNGDLDFNVRIQALGWIWKACEELQFGPLCICLAMNYLDRFLSVHDLPSGKAWTVQLLAVACLSLAAKIEETNVPELMQLQVGAPMFVFEAKSVQRMELLVLNVLRWRLRAVTPCSYVRYFLSKINGYDQEPHSRLVTRSLQVIASTTKGIDFLEFRASEIAAAVALSVSGEHFDKFSFSSSFSSLEKERVKKIGEMIERDGSSSSSQTPNNTVLQFKSRRYSHSLSTASVSSSLTSLS

SEQ ID NO: 46968 - DNA, 1218 bp, Oryza sativa
  CDS (1)..(1218)
atggggttcctctgccgccgccgcagcagcgctgcaccggcggagtccttctccctgctgtgcgaggaggacagcgagagcgtcttcggcagcgacgacgacggtgtggaggagacagcgacgatggcgccggagttggggaagatgatgagccttggcttctctgcgtctcaccatcttggggatggtggtggtggtggtgaggagctcgttggatctttcatggagaaagaggtggagcagatggttgagactgcgagaggagagtacctgacgaagctgagcaatggaggcatagagctctcctgcaggattgctgccattgattggatttgcaaggttcaggcttactacagttttggaccattgtgtgcttaccttgctgtcaactatctggataggttcctctcctcggtagagttctcagtaacaaatgacatgccctggatgcagcagctgctgatagttgcttgcctatctcttgctgccaagatggaggagactgcagctcccggcactctagaccttcaggtttgcaatccagaatacgtattcgacgcagagactatccataggatggagatcattgtgctaaccactctgaaatggagaatgcaagctgtgacccctttcacttacattggtcacttcttggacaagatcaatgagggaaatcggataaccagtgaactgatatctcgatgcaccgagatcatactcagcaccatgaaagcaactgtgttcctgagattcagaccttctgagattgccacagctgtagctctatctgtagttgctgacggaggccgcgttcttgactttggcggtgttcttgaatcttctaaactccctgtagataaggacaatgtggggagatgccatcaagcaatgcaagagatggcattggtgatgcaaaacagcactgcaagtccatctgattcgttgtgctacgatatgaccaatccagtactagattgccatattttaagacgaagggagtgtgtgtccctgcaaagtgggcccagggatgagctagagatgggatgggcgccgtttgctatcaccgtcagcgagaaagaggagagcgagcggaggtgcgacgatggctggcggcgaggaggagaagcggcgcaatattgtgagcaggcggacgaacagaggaggagcacggatgggcgagcaggggtgcggttggaggagcaggccggcggcgagtag

SEQ ID NO: 46969 - protein, 405 aa, Oryza sativa
MGFLCRRRSSAAPAESFSLLCEEDSESVFGSDDDGVEETATMAPELGKMMSLGFSASHHLGDGGGGGEELVGSFMEKEVEQMVETARGEYLTKLSNGGIELSCRIAAIDWICKVQAYYSFGPLCAYLAVNYLDRFLSSVEFSVTNDMPWMQQLLIVACLSLAAKMEETAAPGTLDLQVCNPEYVFDAETIHRMEIIVLTTLKWRMQAVTPFTYIGHFLDKINEGNRITSELISRCTEIILSTMKATVFLRFRPSEIATAVALSVVADGGRVLDFGGVLESSKLPVDKDNVGRCHQAMQEMALVMQNSTASPSDSLCYDMTNPVLDCHILRRRECVSLQSGPRDELEMGWAPFAITVSEKEESERRCDDGWRRGGEAAQYCEQADEQRRSTDGRAGVRLEEQAGGE

SEQ ID NO: 46970 - DNA, 1071 bp, Oryza sativa; identical to SEQ ID NO: 24395
  CDS (1)..(1071)

SEQ ID NO: 46971 - protein, 356 aa, Oryza sativa; identical to SEQ ID NO: 24396

SEQ ID NO: 46972 - DNA, 1065 bp, Oryza sativa
  CDS (1)..(1065)
atgggggcgccggcgaccgccgccagcggcggcggcgacgacgacgacagagacgtcgtgttcgagtacctcctttgcacggaggaggacgccgcctcggccgggtccttcttccagcagctacagggcccggcgcccgccgtgtcgtcgtcgccatcaacgacgacggcgacggcgccggctgctgctggtagctgcgatgatggcggagaggaggaggaggaggaggtgtggacggtcgacgtcgtcgcggagctcatcggcggcgaggccgagcgctcgcactcgccgcgggcggactaccccggccgcctccggtccggccgccccgccgacctcgccgcccgcgccgactccgtcgcgtggatcctgaaggtgagagagttgtacggtatgcttccggtgacggcctacctcgccgtcagctacatggaccgcttcctctccctccaccgtctcccgggtaatggatgggcaatgcagctgcttgcagtcacctgcctctcccttgccgccaagatggaggaaactctagtgccatccatcctagatttacagatggaggatgcaagatacatatttgagcatcggacaatttttcggatggagcttctagtccttgatgcgctagattggaggcttcgatcgataacacccttcactttcatgtacttgtttgctgacaaggtcgatccaaatggcaagcacatcagggaattgatccatcaagccactcaagtaacattagccacaattcatgacactgagttcttggatcactgcccatcatccatcgcagcagcagcagtgctatgcgcctccagtgagatcatgcaacttgtgtccattgatcatggaactctggttagctggcgcattattggccttgacgaggaagcaatcatcaggtgctaccggctaatgcagcaattgatatctagtaacaatgttgggagagaatcgacagagataacaatggcgacgacgacgacgacggcgacaactgctgtgagctcagaggaggttgtgtcctcttctcccccatcaaagaggaggaagatgtga

SEQ ID NO: 46973 - protein, 354 aa, Oryza sativa
MGAPATAASGGGDDDDRDVVFEYLLCTEEDAASAGSFFQQLQGPAPAVSSSPSTTTATAPAAAGSCDDGGEEEEEEVWTVDVVAELIGGEAERSHSPRADYPGRLRSGRPADLAARADSVAWILKVRELYGMLPVTAYLAVSYMDRFLSLHRLPGNGWAMQLLAVTCLSLAAKMEETLVPSILDLQMEDARYIFEHRTIFRMELLVLDALDWRLRSITPFTFMYLFADKVDPNGKHIRELIHQATQVTLATIHDTEFLDHCPSSIAAAAVLCASSEIMQLVSIDHGTLVSWRIIGLDEEAIIRCYRLMQQLISSNNVGRESTEITMATTTTTATTAVSSEEVVSSSPPSKRRKM

SEQ ID NO: 46974 - DNA, 1152 bp, Oryza sativa
  CDS (1)..(1152)
atggctccgagctcgtcgtcctgccacgacgcggccgcgtcgatgctgctctgcgccgaggacaacagcagcatcctgtggctggaggatgaggagggggaggtgggggagaggaggagcggcggttgccggtcgatggtcggggacctcgccgccggcggcggcggcggcagcggcgggggtggagtggaggaggaggaggacatgttcccgcggcagtcggaggagtgcgtggcgagcttggtggagagggagcaggcgcacatgccgagggcggactacggcgagcggctccgcggcggcggcggcgacgtggatctccgcgtccgcagcgaggccatcggctggatttgggaggtttacacttactacaacttcagctctgtcactgcctatctggctgtaaactacctggaccgtttcctgtctcagtacgagctgccggaaggcagggattggatgacacagttgctctcggttgcgtgcttgtctatcgccgccaagatggaggagaccgtcgtcccgcaatgtttggatcttcagattggggaaccacggtttttgttcgaggtggagacgatccatagaatggagcttcttgttctcaccaacctcaattggaggatgcaagccgtgactccattctcctacatcgactacttcctacgaaagctcaacagcggcaatgccgcgccgagaagctggctcctgaggtcgtcggagctcatcttgcgcatagcagcaggaactggattcctagagtttagaccctcggagatcgctgcagcggtggctgccacagtggccggagaagccaccggcgtggtagaagaagacatcgcagaggctttcacccatgtagataaggggagggtgttgcaatgccaggaagcgattcaggatcatcactactccatggccaccattaacactgtgcaacctaaacctgcaagcaccaggagaggctcagcctcagcctcctcctcctctgtgcctgagagccctgttgcggtgctggatgctggctgcctcagctacaaaagtgatgatactgatgcagcaactattgcctcacatggaggaggaagaaggaagagttgctttgatagctccccggtcactagcaagaagaggaggaagcttagcaggtga

SEQ ID NO: 46975 - protein, 383 aa, Oryza sativa
MAPSSSSCHDAAASMLLCAEDNSSILWLEDEEGEVGERRSGGCRSMVGDLAAGGGGGSGGGGVEEEEDMFPRQSEECVASLVEREQAHMPRADYGERLRGGGGDVDLRVRSEAIGWIWEVYTYYNFSSVTAYLAVNYLDRFLSQYELPEGRDWMTQLLSVACLSIAAKMEETVVPQCLDLQIGEPRFLFEVETIHRMELLVLTNLNWRMQAVTPFSYIDYFLRKLNSGNAAPRSWLLRSSELILRIAAGTGFLEFRPSEIAAAVAATVAGEATGVVEEDIAEAFTHVDKGRVLQCQEAIQDHHYSMATINTVQPKPASTRRGSASASSSSVPESPVAVLDAGCLSYKSDDTDAATIASHGGGRRKSCFDSSPVTSKKRRKLSR

SEQ ID NO: 46976 - DNA, 1071 bp, Oryza sativa; identical to SEQ ID NO: 24403
  CDS (1)..(1071)

SEQ ID NO: 46977 - protein, 356 aa, Oryza sativa; identical to SEQ ID NO: 24404

SEQ ID NO: 46978 - DNA, 1029 bp, Oryza sativa; identical to SEQ ID NO: 24407
  CDS (1)..(1029)

SEQ ID NO: 46979 - protein, 342 aa, Oryza sativa; identical to SEQ ID NO: 24408

SEQ ID NO: 46980 - DNA, 1068 bp, Brassica napus; identical to SEQ ID NO: 24409
  CDS (1)..(1068)

SEQ ID NO: 46981 - protein, 355 aa, Brassica napus; identical to SEQ ID NO: 24410

SEQ ID NO: 46982 - DNA, 990 bp, Brassica napus; identical to SEQ ID NO: 24411
  CDS (1)..(990)

SEQ ID NO: 46983 - protein, 329 aa, Brassica napus; identical to SEQ ID NO: 24412

SEQ ID NO: 46984 - DNA, 927 bp, Brassica napus
  CDS (1)..(927)
atggcagacaatctagaactgagtcttttatgtacagagatcaccaacgttggtgatgaagacaacctcataattcttgacaaagctccgatcgtttttcctgaaatctcgatttctcagatgggttttccatcggagagcgatgagttcatcagagagatgatggagaaggagaagcagcttttgccaagtgatgattacatcagcagactcagaagtggtgattttgatttgaatgtcagaagaagagaagctcttaattggattttgaaggcttgtgaggaacaccagtttggaccaatgtgtatttgcttatctatgaactacttggatcggttcttatcggttcatgatttccctagtggcaacacttgggcagtgcagttgttggctgtggcttgtttatccttggcagccaaaattgaagaaactgaagtcccaatgctaatagatcttcaggctggacaccctcagtttgtgtttgaggctaaatcagtccaaaggatggagcttttggtgttgaacagattggaatggaggttgagagcgataactccctgctcatacataagatatttcttgaggaagatgagtaaatgtgatcaagaaccatccagcacattgatatccagatcattacaagtgatagccagcaaaaccaaaggtattgactttttggagtttagaccttctgaagttgctgctgcagttgcactttctgtttctggagaactgtacacagtacactttgacaactcttccttctctcctcttttctcactacttcaaaaggagagagtgaagaagattggggaaatgatagagcgttgtgagtcgcaaacacccaatggggttctagaagtatcagcttgttgtttcagctctaagactcatgattcctcttctccccatacacatctttcctaa

SEQ ID NO: 46985 - protein, 308 aa, Brassica napus
MADNLELSLLCTEITNVGDEDNLIILDKAPIVFPEISISQMGFPSESDEFIREMMEKEKQLLPSDDYISRLRSGDFDLNVRRREALNWILKACEEHQFGPMCICLSMNYLDRFLSVHDFPSGNTWAVQLLAVACLSLAAKIEETEVPMLIDLQAGHPQFVFEAKSVQRMELLVLNRLEWRLRAITPCSYIRYFLRKMSKCDQEPSSTLISRSLQVIASKTKGIDFLEFRPSEVAAAVALSVSGELYTVHFDNSSFSPLFSLLQKERVKKIGEMIERCESQTPNGVLEVSACCFSSKTHDSSSPHTHLS

SEQ ID NO: 46986 - DNA, 1104 bp, Brassica napus; identical to SEQ ID NO: 24413
  CDS (1)..(1104)

SEQ ID NO: 46987 - protein, 367 aa, Brassica napus; identical to SEQ ID NO: 24414

SEQ ID NO: 46988 - DNA, 1050 bp, Glycine max; identical to SEQ ID NO: 24415
  CDS (1)..(1050)

SEQ ID NO: 46989 - protein, 349 aa, Glycine max; identical to SEQ ID NO: 24416

SEQ ID NO: 46990 - DNA, 1038 bp, Zea mays
  CDS (1)..(1038)
atgggaatcctctgcctcggtgcttcctccacactgctctgcggggaggacaggaacaacgtactcggcctcggctgcggcaacgagctggtggaggtggggagcggccatgacggcttggactccgtcgtcggcgccgtgttccccgtggacacagatgaggccgtgcgggcgttgttggagaaggagacggaccacaagcctcaagacggctatgcggagaggctggagcgcggcggattggagtactcctggaggagagacgccatggattggatttgcaaggtccattcgtactacaggtttggaccactcagtctttaccttgctgtgaattacctggatagattcctctcctcatatgatctcccacacgataagccttggatgcgacagttgttgtcagttgcttgcctagcactcgctgtcaagatggaggagaccgtgctccctcttcctgtggaccttcaggtctgcgatgtgaaatttgagttcgaagcaaggactattgggaggatggagcttcttgtgctggccaccctgaaatggagaatgcaggctgtgacccccttcactttcatcagctacttcctcgacaagttcaatggtgggaagccgccgagtttggcactagcgtcacggtgcaccgatatcataattggcacactcaaaggctctacattcttgtcattcagaccatctgagattgccgcggcctcagctctagcagcagtttttgagaatcaggttgttggctcctcgagtgctctttcagcatctgaagtccctataaataaggtgatgattgctagatgctatgagctgttgcaagagcaagcgctggtgaggaagacagggcacgtcaatggaagcccttcagtgccgcagagcccgattggcgtgctggatgcaacatgcttcagctttaggagtgaagatgcaagactagtatcatcgcaatcaaacaacatcagtagtagtagtagtaacgacaatcaagtttctaagaggagaaggctaagcatatcaccaatttga

SEQ ID NO: 46991 - protein, 345 aa, Zea mays
MGILCLGASSTLLCGEDRNNVLGLGCGNELVEVGSGHDGLDSVVGAVFPVDTDEAVRALLEKETDHKPQDGYAERLERGGLEYSWRRDAMDWICKVHSYYRFGPLSLYLAVNYLDRFLSSYDLPHDKPWMRQLLSVACLALAVKMEETVLPLPVDLQVCDVKFEFEARTIGRMELLVLATLKWRMQAVTPFTFISYFLDKFNGGKPPSLALASRCTDIIIGTLKGSTFLSFRPSEIAAASALAAVFENQVVGSSSALSASEVPINKVMIARCYELLQEQALVRKTGHVNGSPSVPQSPIGVLDATCFSFRSEDARLVSSQSNNISSSSSNDNQVSKRRRLSISPI

SEQ ID NO: 46992 - DNA, 1059 bp, Brassica napus; identical to SEQ ID NO: 24417
  CDS (1)..(1059)

SEQ ID NO: 46993 - protein, 352 aa, Brassica napus; identical to SEQ ID NO: 24418

SEQ ID NO: 46994 - DNA, 1002 bp, Brassica napus; identical to SEQ ID NO: 24419
  CDS (1)..(1002)

SEQ ID NO: 46995 - protein, 333 aa, Brassica napus; identical to SEQ ID NO: 24420

SEQ ID NO: 46996 - DNA, 1068 bp, Brassica napus
  CDS (1)..(1068)
atggctgaggttgacaataatctcgcctgtggagaaaccaccgattcatggatcactgatgaaaccaactgtgacggcggattcacgaacgatgaactttttagtaaagacgataactttaacggaaacggatcaaacccgatgatgggttctcctccgtcgccatcgctgagagaagaaagaatcagagagatgatggagcgagaggttgagttcttgccaggagctgattacctcaagaggctgcgttctggggattgggagttacgtcttaaaaaccaagctctggattggattttaaaggtttgtgctcattacaatttcggaacactctgcatatgtctatccatgaactacttggatcggttcttaacatcctatgagctgccaagagacaagtcatgggctgttcagttgctagctgtctcttgcttatcattagcagctaaaatggaagaatcagatgtgcctcaaactgttgagttacaggtgggagatcccaagtttgtttttgaggccaaaacggttaaaaggatggaacttttggtactcaacactttgaatcggagactgcaagctctaactccattctccttcattgaccatttcattcacaagaccaaaggtcacgtctcacagaattccatctatagatcctcacaggtcatcttgaacaccacaaaagcaattgaattcttagacttcaggccttctgagatagctgcagcagcggcaaggtctgcttccatttcaggagaaataaagtgcattgatgacgataagacaatgtctaatctcacatatgtaaaacaggagagagtgaaggtatgtttgaatctgatgagaaacctcacaggggacaatgtgaccggagctgctaaattatcgccacagcaaccgagattaacggcaagagtggtgccagtgagtccaattggagtgttggaagcaacatgtttgagctataagagtgatgagagaacagtcgagtcatgtacaaattcctcacagagcagtccagacacaaacaacaacaacaatagcaacaagaggaggagaaaacaatga

SEQ ID NO: 46997 - protein, 355 aa, Brassica napus
MAEVDNNLACGETTDSWITDETNCDGGFTNDELFSKDDNFNGNGSNPMMGSPPSPSLREERIREMMEREVEFLPGADYLKRLRSGDWELRLKNQALDWILKVCAHYNFGTLCICLSMNYLDRFLTSYELPRDKSWAVQLLAVSCLSLAAKMEESDVPQTVELQVGDPKFVFEAKTVKRMELLVLNTLNRRLQALTPFSFIDHFIHKTKGHVSQNSIYRSSQVILNTTKAIEFLDFRPSEIAAAAARSASISGEIKCIDDDKTMSNLTYVKQERVKVCLNLMRNLTGDNVTGAAKLSPQQPRLTARVVPVSPIGVLEATCLSYKSDERTVESCTNSSQSSPDTNNNNNSNKRRRKQ

SEQ ID NO: 46998 - DNA, 1083 bp, Glycine max
  CDS (1)..(1083)
atgaatgcggaacctccgctgccgccggcgctcctcatgtcggtttcctgcctctccgactacgacctcctctgtggcgaggacacctccggagtcctctccggagagtcgccggagtgctcctcatccgacatcggctcctcaccacttccgccgtcacctccgccgtcgccgacgatgacggaggattgttattccatcgcgagcttcatcgagcacgagcgcaacttcgtccccggattcgagtacctgtcgaggttccaatctcgctccctcgacgccaacgccagagaagaatccgttgcatggattctcaaggtacacgcgtattatggctttcagcctttgacggcgtacctcgccgtcaactatatggatcggtttttggattctagccagttgccggaaacaaatgggtggcctctgcaacttctatctgttgcatgcttgtctttggcagcaaaaatggaggaacctcttgttccatctctcttggaccttcagatagaaggtgccaagtacatatttgaaccgagaacaattcgtaggatggagctacttgttctgggtgtcttggattggaggctaagatcagtaaccccactttgcttcctcgctttctttgcgtgcaaagcagattcaactggaacttttacccggttcctcatttccagggcaacagaaatcatcgtatctaatatccaagaggctagctttcttgcttacaggccatcatgcattgctgctgcagccatactcactgcagctaatgaaattcctaattggtctgtggttaagcccgaaaaagctgagtcatggtgccagggaataagaaaagaaaaagtaatagggtgctaccagttgatgcaagaacttgtgattaacaataaccaaaggaaactccctactaaagtgttgccgcagctgcgagtaacaactcggacccgaatgaggtcaagtactgtctcatcattctcatcaacatcatcatcatcctcttcaacctccttctccttgtcttgtaagaggaggaaattaaataatcgtttgtgggtagatgatgagaaaggaaactccgagtaa

SEQ ID NO: 46999 - protein, 360 aa, Glycine max
MNAEPPLPPALLMSVSCLSDYDLLCGEDTSGVLSGESPECSSSDIGSSPLPPSPPPSPTMTEDCYSIASFIEHERNFVPGFEYLSRFQSRSLDANAREESVAWILKVHAYYGFQPLTAYLAVNYMDRFLDSSQLPETNGWPLQLLSVACLSLAAKMEEPLVPSLLDLQIEGAKYIFEPRTIRRMELLVLGVLDWRLRSVTPLCFLAFFACKADSTGTFTRFLISRATEIIVSNIQEASFLAYRPSCIAAAAILTAANEIPNWSVVKPEKAESWCQGIRKEKVIGCYQLMQELVINNNQRKLPTKVLPQLRVTTRTRMRSSTVSSFSSTSSSSSSTSFSLSCKRRKLNNRLWVDDEKGNSE

SEQ ID NO: 47000 - DNA, 1152 bp, Glycine max; identical to SEQ ID NO: 24421
  CDS (1)..(1152)

SEQ ID NO: 47001 - protein, 383 aa, Glycine max; identical to SEQ ID NO: 24422

SEQ ID NO: 47002 - DNA, 1068 bp, Glycine max
  CDS (1)..(1068)
atggcacccagttttgattgtgtttcgagccttctctgtgtggaagacaacagtatttttgacgaaaacgattatggtggttcggtggaggtgttggaggacgcgtggcaggatcctagatatcgtcgaaaccttagtcaaagtgagaacttggatgtcccaaatgggtggtttcagttgcagagtgatgagtgtttgagactgatggttgaaaaggaatgggatcacttgcctaatggtgattataggaataagctgaggagtggggatttggactttgaggccagaaaagaggccattgattggattgaaaaggttcaagagcactttggttttggacctgtctgtgcatatctatccataaactacttggaccgtttcctttctgcatatgaattaccaaagcatagagcttggacaatgcaattgttggctgttgggtgcttatctctggcagccaaaatggaagagactgatgttcctttgtctcttgatttgcaggtgggtgaatctaagtatatatttgaggctaaaacaatacagagaatggagcttctggtgctgagcacattgaggtggagaatgcaggcaattaccccattttccttcattgaccatttcctttacaagatcaatgatgatcaaagtccaattggagcttcaattttgcaatccatccagcttatactgagtactgtaagaggaattgacttcttagagttcagaccctcagagattgcagcagcagtggcaatatctgtggtgggggagggccaaacagtgcacactgagaaagcaatttctgttctgattcagcttgtggaaaaggagagggtcttgaagtgtgttaaaatgatccaagagctggcatcaaatagtggtggttctgccaagggtgctagtgcttctgtttctgtccctagcgtgcccgaaagcccactaggggtgttggtcactgcatgcttcagctacaaaagtgatgacacaaatgctgcttcatatgcaaattcttcacataacattagtccagatgctaaaaggaggaagctaaacaaaacctttggataa

SEQ ID NO: 47003 - protein, 355 aa, Glycine max
MAPSFDCVSSLLCVEDNSIFDENDYGGSVEVLEDAWQDPRYRRNLSQSENLDVPNGWFQLQSDECLRLMVEKEWDHLPNGDYRNKLRSGDLDFEARKEAIDWIEKVQEHFGFGPVCAYLSINYLDRFLSAYELPKHRAWTMQLLAVGCLSLAAKMEETDVPLSLDLQVGESKYIFEAKTIQRMELLVLSTLRWRMQAITPFSFIDHFLYKINDDQSPIGASILQSIQLILSTVRGIDFLEFRPSEIAAAVAISVVGEGQTVHTEKAISVLIQLVEKERVLKCVKMIQELASNSGGSAKGASASVSVPSVPESPLGVLVTACFSYKSDDTNAASYANSSHNISPDAKRRKLNKTFG

SEQ ID NO: 47004 - DNA, 1152 bp, Glycine max; identical to SEQ ID NO: 24423
  CDS (1)..(1152)

SEQ ID NO: 47005 - protein, 383 aa, Glycine max; identical to SEQ ID NO: 24424

SEQ ID NO: 47006 - DNA, 1116 bp, Glycine max; identical to SEQ ID NO: 24425
  CDS (1)..(1116)

SEQ ID NO: 47007 - protein, 371 aa, Glycine max; identical to SEQ ID NO: 24426

SEQ ID NO: 47008 - DNA, 1083 bp, Glycine max
  CDS (1)..(1083)
atgaatgcggaacctccgctgccgccggcgctcctcatgtcggtttcctgcctctccgactacgacctcctctgtggcgaggacacctccggagtcctctccggagagtcgccggagtgctcctcatccgacatcggctcctcaccacttccgccgtcacctccgccgtcgccgacgatgacggaggattgttattccatcgcgagcttcatcgagcacgagcgcaacttcgtccccggattcgagtacctgtcgaggttccaatctcgctccctcgacgccaacgccagagaagaatccgttgcatggattctcaaggtacacgcgtattatggctttcagcctttgacggcgtacctcgccgtcaactatatggatcggtttttggattctagccagttgccggaaacaaatgggtggcctctgcaacttctatctgttgcatgcttgtctttggcagcaaaaatggaggaacctcttgttccatctctcttggaccttcagatagaaggtgccaagtacatatttgagccgagaacaattcgtaggatggagctacttgttctgggtgtcttggattggaggctaagatcagtaaccccactttgcttcctcgctttctttgcgtgcaaagtagattcaactggaacttttatccggttcctcatttccagggcaacagaaatcatcgtatctaatatccaagaggctagctttcttgcttactggccatcatgcattgctgctgcagccatactcactgcagctaatgaaattcctaattggtctgtggttaagcccgaaaatgctgagtcatggtgcgagggactaagaaaagaaaaagtaatagggtgctaccagttgatgcaagagcttgtgattaacaataaccaacggaaactccctactaaagtgttgccgcagctgcgagtaacaactcggacccgaatgaggtcaagtactgtctcatcattctcatcaacatcatcatcatcctcttcaacctccttctccttgtcttgtaagaggaggaaattaaataatcgtttgtgggtagatgatgagaaaggaaactccgagtaa

SEQ ID NO: 47009 - protein, 360 aa, Glycine max
MNAEPPLPPALLMSVSCLSDYDLLCGEDTSGVLSGESPECSSSDIGSSPLPPSPPPSPTMTEDCYSIASFIEHERNFVPGFEYLSRFQSRSLDANAREESVAWILKVHAYYGFQPLTAYLAVNYMDRFLDSSQLPETNGWPLQLLSVACLSLAAKMEEPLVPSLLDLQIEGAKYIFEPRTIRRMELLVLGVLDWRLRSVTPLCFLAFFACKVDSTGTFIRFLISRATEIIVSNIQEASFLAYWPSCIAAAAILTAANEIPNWSVVKPENAESWCEGLRKEKVIGCYQLMQELVINNNQRKLPTKVLPQLRVTTRTRMRSSTVSSFSSTSSSSSSTSFSLSCKRRKLNNRLWVDDEKGNSE

SEQ ID NO: 47010 - DNA, 1200 bp, Glycine max; identical to SEQ ID NO: 24427
  CDS (1)..(1200)

SEQ ID NO: 47011 - protein, 399 aa, Glycine max; identical to SEQ ID NO: 24428

SEQ ID NO: 47012 - DNA, 1038 bp, Zea mays
  CDS (1)..(1038)
atgggaatcctctgcctcggtgcttcctccacactgctctgcggggaggacaggaacaacgtactcggcctcggctgcggcaacgagctggtggaggtggggagcggccatgacggcttggactccgtcgtcggcgccgtgttccccgtggacacagatgaggccgtgcgggcgttgttggagaaggagacggaccacaagcctcaagacggctatgcggagaggctggagcgcggcggattggagtactcctggaggagagacgccatggattggatttgcaaggtccattcgtactacaggtttggaccactcagtctttaccttgctgtgaattacctggatagattcctctcctcatatgatctcccacacgataagccttggatgcgacagttgttgtcagttgcttgcctagcactcgctgtcaagatggaggagaccgtgctccctcttcctgtggaccttcaggtctgcgatgtgaaatttgagttcgaagcaaggactattgggaggatggagcttcttgtgctggccaccctgaaatggagaatgcaggctgtgacccccttcactttcatcagctacttcctcgacaagttcaatggtgggaagccgccgagtttggcactagcgtcacggtgcaccgatatcataattggcacactcaaaggctctacattcttgtcattcagaccatctgagattgccgcggcctcagctctagcagcagtttctgagaatcaggttgttggctcctcgagtgctctttcagcatctgaagtccctataaataaggtgatgattgctagatgctatgagctgttgcaagagcaagcgctggtgaggaagacagggcacgtcaatggaagcccttcagtgccgcagagcccgattggcgtgctggatgcaacatgcttcagctttaggagtgaagatgcaagactagtatcatcgcaatcaaacaacatcagtagtagtagtagtaacgacaatcaagtttctaagaggagaaggctaagcatatcaccaatctga

SEQ ID NO: 47013 - protein, 345 aa, Zea mays
MGILCLGASSTLLCGEDRNNVLGLGCGNELVEVGSGHDGLDSVVGAVFPVDTDEAVRALLEKETDHKPQDGYAERLERGGLEYSWRRDAMDWICKVHSYYRFGPLSLYLAVNYLDRFLSSYDLPHDKPWMRQLLSVACLALAVKMEETVLPLPVDLQVCDVKFEFEARTIGRMELLVLATLKWRMQAVTPFTFISYFLDKFNGGKPPSLALASRCTDIIIGTLKGSTFLSFRPSEIAAASALAAVSENQVVGSSSALSASEVPINKVMIARCYELLQEQALVRKTGHVNGSPSVPQSPIGVLDATCFSFRSEDARLVSSQSNNISSSSSNDNQVSKRRRLSISPI

SEQ ID NO: 47014 - DNA, 924 bp, Zea mays
  CDS (1)..(924)
atggcgacggaggagtgggagctgcgggaggaggacgcctacgcctacgagttcgagttcgacctcgagaaccccttcaccagccccgccgacgagccgatcgccagtctcctcgacgccgagggccaccacgcgccctctatctccgccgcggcctcggccacccgccgcgccgccgccgccttcatctccaaggtgcgtttcggcggcgagctcgccgtgcacccgcgcgtcgcctacctcgcgctcaactacgtggatcgcttcctctccaagaggcaattggcgtgcgagcagcagccgtgggcgccgcgcctgctcgccatcagctgcctctccctcgccgccaagatgcagcgcgtcgcaacattctccaccgccgacatccagagggacgaagacttcatgttcgacgcggtgaccatccgtcgcatggagcgcgtggtgcttggcgcgcttgagtggcgcgcgcgctccgtcacgccgctcgccttcctcggcttcttcctctccgcatgctatccgccgccgcagcaccccccacaggtagccgctgtcaaggcgcgcgccgtcgacctccttctccacgctcagcctgaggtgaagatggcggagttctcaccctccgtggtggcggcggcagcgctgctggccgccgccggagaggtcgccgccgcgaacctccacgcgttccaagccagcttggccgcctgtccctttgtaaatagcgagaagctgcgggagtgcggtgaggtgctggcagcggcgggcggcgtcgggcgggggcgagccgctccgagcgcggacacgcctgtgacggtgctcggtcaccagcgcagcgccagctccgcctcggagaccgactggattaacggcggcgacgcgaagaaacgctgcatgggcccaccatcgcaatgggggtag

SEQ ID NO: 47015 - protein, 307 aa, Zea mays
MATEEWELREEDAYAYEFEFDLENPFTSPADEPIASLLDAEGHHAPSISAAASATRRAAAAFISKVRFGGELAVHPRVAYLALNYVDRFLSKRQLACEQQPWAPRLLAISCLSLAAKMQRVATFSTADIQRDEDFMFDAVTIRRMERVVLGALEWRARSVTPLAFLGFFLSACYPPPQHPPQVAAVKARAVDLLLHAQPEVKMAEFSPSVVAAAALLAAAGEVAAANLHAFQASLAACPFVNSEKLRECGEVLAAAGGVGRGRAAPSADTPVTVLGHQRSASSASETDWINGGDAKKRCMGPPSQWG

SEQ ID NO: 47016 - DNA, 1083 bp, Zea mays; identical to SEQ ID NO: 24429
  CDS (1)..(1083)

SEQ ID NO: 47017 - protein, 360 aa, Zea mays; identical to SEQ ID NO: 24430

SEQ ID NO: 47018 - DNA, 1167 bp, Zea mays; identical to SEQ ID NO: 24431
  CDS (1)..(1167)

SEQ ID NO: 47019 - protein, 388 aa, Zea mays; identical to SEQ ID NO: 24432

SEQ ID NO: 47020 - DNA, 22 bp, Artificial sequence
  primer
atggcacccagttttgactttg

SEQ ID NO: 47021 - DNA, 20 bp, Artificial sequence
  primer
ctacaattggtcagctccac

SEQ ID NO: 47022 - protein, 422 aa, Artificial sequence
  consensus sequence
  Variant (2)..(2): Xaa in position 2 is any amino acid
  Variant (4)..(4): Xaa in position 4 is any amino acid
  Variant (6)..(29): Xaa in position 6 to 29 is any amino acid
  Variant (30)..(114): Xaa in position 30 to 114 is any or no amino acid
  Variant (116)..(132): Xaa in position 116 to 132 is any amino acid
  Variant (133)..(165): Xaa in position 133 to 165 is any or no amino acid
  Variant (167)..(168): Xaa in position 167 to 168 is any amino acid
  Variant (170)..(172): Xaa in position 170 to 172 is any amino acid
  Variant (174)..(176): Xaa in position 174 to 176 is any amino acid
  Variant (177)..(178): Xaa in position 177 to 178 is any or no amino acid
  Variant (180)..(180): Xaa in position 180 is any amino acid
  Variant (182)..(183): Xaa in position 182 to 183 is any amino acid
  Variant (185)..(187): Xaa in position 185 to 187 is any amino acid
  Variant (189)..(190): Xaa in position 189 to 190 is any amino acid
  Variant (193)..(193): Xaa in position 193 is any amino acid
  Variant (197)..(206): Xaa in position 197 to 206 is any amino acid
  Variant (207)..(215): Xaa in position 207 to 215 is any or no amino acid
  Variant (217)..(217): Xaa in position 217 is any amino acid
  Variant (218)..(218): Xaa in position 218 is any or no amino acid
  Variant (221)..(222): Xaa in position 221 to 222 is any amino acid
  Variant (224)..(224): Xaa in position 224 is any amino acid
  Variant (232)..(232): Xaa in position 232 is any amino acid
  Variant (235)..(236): Xaa in position 235 to 236 is any amino acid
  Variant (239)..(241): Xaa in position 239 to 241 is any amino acid
  Variant (245)..(245): Xaa in position 245 is any amino acid
  Variant (247)..(251): Xaa in position 247 to 251 is any amino acid
  Variant (252)..(252): Xaa in position 252 is any or no amino acid
  Variant (255)..(256): Xaa in position 255 to 256 is any amino acid
  Variant (259)..(259): Xaa in position 259 is any amino acid
  Variant (267)..(268): Xaa in position 267 to 268 is any amino acid
  Variant (270)..(270): Xaa in position 270 is any amino acid
  Variant (272)..(275): Xaa in position 272 to 275 is any amino acid
  Variant (279)..(279): Xaa in position 279 is any amino acid
  Variant (281)..(304): Xaa in position 281 to 304 is any amino acid
  Variant (305)..(311): Xaa in position 305 to 311 is any or no amino acid
  Variant (313)..(319): Xaa in position 313 to 319 is any amino acid
  Variant (321)..(324): Xaa in position 321 to 324 is any amino acid
  Variant (327)..(328): Xaa in position 327 to 328 is any amino acid
  Variant (330)..(330): Xaa in position 330 is any amino acid
  Variant (332)..(349): Xaa in position 332 to 349 is any amino acid
  Variant (350)..(369): Xaa in position 350 to 369 is any or no amino acid
  Variant (371)..(380): Xaa in position 371 to 380 is any amino acid
  Variant (381)..(416): Xaa in position 381 to 416 is any or no amino acid
  Variant (419)..(420): Xaa in position 419 to 420 is any amino acid
  Variant (421)..(421): Xaa in position 421 is any or no amino acid
LXCXEXXXXXXXXXXXXXXXXXXXXXXXXXXXXXXXXXXXXXXXXXXXXXXXXXXXXXXXXXXXXXXXXXXXXXXXXXXXXXXXXXXXXXXXXXXXXXXXXXXXXXXXXXXXXXEXXXXXXXXXXXXXXXXXXXXXXXXXXXXXXXXXXXXXXXXXXXXXXXXXXAXXWXXXVXXXXXYXFXXLXXXLXXNYXDRFXXXXXXXXXXXXXXXXXXXWXXQLXXVXCLSLAAKXEEXXVPXXXDLQXVXXXXXXFEXXTIXRMELLVLXXLXWXXXXVTPXSXXXXXXXXXXXXXXXXXXXXXXXXXXXXXXXLXXXXXXXFXXXXPSXXAXAXXXXXXXXXXXXXXXXXXXXXXXXXXXXXXXXXXXXXXCXXXXXXXXXXXXXXXXXXXXXXXXXXXXXXXXXXXXXXXXXXXXXXSPXXXV

SEQ ID NO: 47023 - protein, 39 aa, Artificial sequence
  protein pattern
  Variant (2)..(8): Xaa in position 2 to 8 is any amino acid
  Variant (10)..(10): Xaa in position 10 is Glu or Gln
  Variant (11)..(11): Xaa in position 11 is any amino acid
  Variant (12)..(12): Xaa in position 12 is Glu, His, Lys or Arg
  Variant (13)..(13): Xaa in position 13 is Ala, Asn, Ser or Thr
  Variant (14)..(14): Xaa in position 14 is Ile or Val
  Variant (15)..(15): Xaa in position 15 is any amino acid
  Variant (19)..(19): Xaa in position 19 is any or no amino acid
  Variant (21)..(21): Xaa in position 21 is any amino acid
  Variant (22)..(22): Xaa in position 22 is any or no amino acid
  Variant (24)..(25): Xaa in position 24 to 25 is any amino acid
  Variant (27)..(27): Xaa in position 27 is any amino acid
  Variant (29)..(29): Xaa in position 29 is Lys or Arg
  Variant (30)..(30): Xaa in position 30 is Leu, Met or Val
  Variant (31)..(33): Xaa in position 31 to 33 is any amino acid
  Variant (34)..(34): Xaa in position 34 is Ala, Ser or Thr
  Variant (35)..(35): Xaa in position 35 is Ala, Pro, Ser or Thr
  Variant (36)..(36): Xaa in position 36 is any amino acid
  Variant (37)..(37): Xaa in position 37 is Ala, Cys, Asp, Ser or Thr
  Variant (38)..(38): Xaa in position 38 is Phe or Tyr
  Variant (39)..(39): Xaa in position 39 is Phe, Ile, Leu, Met or Val
QXXXXXXXFXXXXXXRMEXLXXLXXLXWXXXXXXXXXXX

SEQ ID NO: 47024 - protein, 12 aa, Artificial sequence
  protein pattern
  Variant (3)..(3): Xaa in position 3 is any amino acid
  Variant (4)..(4): Xaa in position 4 is Ala or Ser
  Variant (5)..(5): Xaa in position 5 is Leu or Val
  Variant (6)..(6): Xaa in position 6 is Ala, Gly, Ser or Thr
  Variant (7)..(7): Xaa in position 7 is Cys or Ser
  Variant (8)..(8): Xaa in position 8 is Ile, Leu or Val
  Variant (12)..(12): Xaa in position 12 is Ala, Ser, Thr or Val
QLXXXXXXSLAX

SEQ ID NO: 47025 - protein, 17 aa, Artificial sequence
  protein pattern
  Variant (2)..(2): Xaa in position 2 is Ala, Gly, Asn, Gln, Ser or Thr
  Variant (3)..(4): Xaa in position 3 to 4 is any amino acid
  Variant (5)..(5): Xaa in position 5 is Cys, Ser or Thr
  Variant (6)..(7): Xaa in position 6 to 7 is any amino acid
  Variant (9)..(9): Xaa in position 9 is Ala or Ser
  Variant (10)..(10): Xaa in position 10 is Ile, Met or Val
  Variant (13)..(13): Xaa in position 13 is any amino acid
  Variant (17)..(17): Xaa in position 17 is Ile, Leu, Met or Val
FXXXXXXLXXNYXDRFX

SEQ ID NO: 47026 - DNA, 552 bp, GLYCINE MAX
  CDS (1)..(552)
atggcgaagcccgagaaccgcactaacttagcttcgtgtttcgtggccaccgttttcttgatcttccttctcattgtggtcttcatcgtttacttcactgtgttcaagccgcagtaccccaaaatcgccgtgagcgccatccagatcccttccttctccgccactaacggcaccgtcaacttcaccttctcccagtacgcctccgttaggaaccctaaccgaggcaccttctcccactacgacagctcgctccagcttctctactacggcagacaggtcggcttcatgttcgttccggccggaaagatcgccgccggcaggactcagtacatggccgccaccttcaccgttcagtcctttcccttgggcctggggcccacctccgtggatgggcctagtagtgtggggcccacgatggagatggagtcgaggatagagatggcggggcgcgtgagagtgttacaccttttcagtcatcacgtggaggccaaagctcaatgcagggtcgccatcgccatcaacgatggatcggtgttaggttttcggtgctaa

SEQ ID NO: 47027 - protein, 183 aa, GLYCINE MAX
MAKPENRTNLASCFVATVFLIFLLIVVFIVYFTVFKPQYPKIAVSAIQIPSFSATNGTVNFTFSQYASVRNPNRGTFSHYDSSLQLLYYGRQVGFMFVPAGKIAAGRTQYMAATFTVQSFPLGLGPTSVDGPSSVGPTMEMESRIEMAGRVRVLHLFSHHVEAKAQCRVAIAINDGSVLGFRC

SEQ ID NO: 47028 - DNA, 651 bp, Zea mays
  CDS (1)..(651)
atggccagatcagcgccggggctgccgccgcagcactatgccgccgcgggcgccggccgccgctcctcctcctcacccgcggcgtcttgcatcttggcggtcctcttcctcctcctagccgcctgcgtcgcggcggtgctgctgttcgtgttcttccgcccgcgcgcgccggccatcgccgtgacggccgtgcagctccccgctttcgccgtggccaacggcaccgtcgccttcaccttccagcagctggcttccgtgcgcaaccccaaccggtccccgctcacgcactacgacagctccctccacgtcgcctacgccggcggcgaggtcggctccatgtacatcccggcaggccagatcgacggcggccgcacgcagtacatggccaccagcttcaccgtccccgccttcgccgtctcggccacgggcgccgccgcgcagccgaccaccatctccgtcccggcgtccggcccgtccccgcacgtcactgcggctctagtgcagccgccggtgatggaggtggactcgctgctgcgggtcaagggcaaggtcaccgttctcaaggtgttaacccaccacgtcgaggcggccaaggtgtgccgcattggcgtctcgccggccgacggccgcgtgctcggcttccgatgctga

SEQ ID NO: 47029 - protein, 216 aa, Zea mays
MARSAPGLPPQHYAAAGAGRRSSSSPAASCILAVLFLLLAACVAAVLLFVFFRPRAPAIAVTAVQLPAFAVANGTVAFTFQQLASVRNPNRSPLTHYDSSLHVAYAGGEVGSMYIPAGQIDGGRTQYMATSFTVPAFAVSATGAAAQPTTISVPASGPSPHVTAALVQPPVMEVDSLLRVKGKVTVLKVLTHHVEAAKVCRIGVSPADGRVLGFRC

SEQ ID NO: 47030 - DNA, 780 bp, Oryza sativa
  CDS (1)..(780)
atgcagccgccgccaagaacccgcgatccggccatcgccatcgccggcgacggcgcggcgcggcgaggtcccccgccgatgcagccgcccgggccgccgccggtaaggcatggtccgccgccggtgcggcagcagcacggctactactacgaggaggagcagaggccgctgcacctgcacgtgaggacggcgaggtcgtcgtcgtcggcgctggcgtcgtgcctcgtggcggcggcgttcctggcgctggcggtgggcggggcgggggcggcgctgttcgtgctgttccggccgcgcccgcccgacatcgcggtggcggcggtgcggctgccggcgttcgcgtccggcccgaacggcacggtggcgttcacgttcgagcagacggccgccgtgcgcaaccccaaccgcgcgccgctcgcgcacttcgacagctcgctccgcgtcgcctacgccggcggcgagctcggctccgtctacatccccgccggcctcatcgacggtggccgcaccaaggacatgtccgccagcttcgccgtcccggcgttcgccgcggccaccccgccgtcgctgcctcaggagcagatggccgccgccgccgccgcctcggcgcagcagcagcagccggcggcggcggcggcggtgatggaggtcgactcgctgctggtggtcaaggggagggtgaccgtgctgcgtgtgctgacgcaccacgtcgaggcggccaaggtgtgccgcgtcggcgtctcgccggtggacggcaaggtgctcggcttccggtgctga

SEQ ID NO: 47031 - protein, 259 aa, Oryza sativa
MQPPPRTRDPAIAIAGDGAARRGPPPMQPPGPPPVRHGPPPVRQQHGYYYEEEQRPLHLHVRTARSSSSALASCLVAAAFLALAVGGAGAALFVLFRPRPPDIAVAAVRLPAFASGPNGTVAFTFEQTAAVRNPNRAPLAHFDSSLRVAYAGGELGSVYIPAGLIDGGRTKDMSASFAVPAFAAATPPSLPQEQMAAAAAASAQQQQPAAAAAVMEVDSLLVVKGRVTVLRVLTHHVEAAKVCRVGVSPVDGKVLGFRC

SEQ ID NO: 47032 - DNA, 537 bp, Glycine max
  CDS (1)..(537)
atggcgaagcccgagagccgcaccaacttggcttcgtgtttcgttgccaccattttcttgatctttcttctcattgtcgtcttcatcgtttacttcactgtgttcaagccgcaggaccccaaaatcgctgtgagcgccgtccagatcccttccttctccgcgactaacggcaccgtcaacttcacgttctcacagtacgcctccgttaggaaccctaaccgaggcacgttctcgcactacgacagctcgctccagcttctctactacggcagacaggtcggcttcatgttcgttcccgccggcaggactcagtacatggccgccaccttcaccgtccagtccttccccttgggcctcggtccccccttcgttgatgggcccagtaatgtggggcccacgatggagatcgagtcgaggattgagatggcggggcgcgtgagggtgttgcacctcttcagtcgtcacgtggaggccaaagctcaatgcagggtcgccatcgccatcaccgatggatccgtattaggttttcggtgctaa

SEQ ID NO: 47033 - protein, 178 aa, Glycine max
MAKPESRTNLASCFVATIFLIFLLIVVFIVYFTVFKPQDPKIAVSAVQIPSFSATNGTVNFTFSQYASVRNPNRGTFSHYDSSLQLLYYGRQVGFMFVPAGRTQYMAATFTVQSFPLGLGPPFVDGPSNVGPTMEIESRIEMAGRVRVLHLFSRHVEAKAQCRVAIAITDGSVLGFRC

SEQ ID NO: 47034 - DNA, 630 bp, Glycine max
  CDS (1)..(630)
atggccgccggagccgcgccggtaccggcgccgaggccgaagcggcctcggcctccgtcggggcgcaccaacctcgcctcctgcgtggtggccaccatcttcctaatcttcatcgtcatcgtcatcctcattgtctactacaccatcttcaaaccccaggaccccaaaattgccgttaacgccgtccagctcccctccttctccgtcgctaacggcaccgtcaacttcaccttctcccagtacgcctccgttagaaaccctaaccgcgccgcattctcgcactacgacagctccctccagctcatctactccggcagccaggtcggcttcatgttcatccccgccggcgagatcgacgcgggccggacgcagtacatggccgccaccttctccgtccagtccttccccctctcggcgccgcctcgaatgggccccacattggccaacggcgacggagtgggcttcaactatgggcttagggttgagcccactttggaaatcgagtctaagttggagatggcggggcgcgtcaaagtgttgcactttttcacccatcacgtttacgccaaagccggttgcagggttgccattgccgtaactgatggatctgtcttaggttttcactgctaa

SEQ ID NO: 47035 - protein, 209 aa, Glycine max
MAAGAAPVPAPRPKRPRPPSGRTNLASCVVATIFLIFIVIVILIVYYTIFKPQDPKIAVNAVQLPSFSVANGTVNFTFSQYASVRNPNRAAFSHYDSSLQLIYSGSQVGFMFIPAGEIDAGRTQYMAATFSVQSFPLSAPPRMGPTLANGDGVGFNYGLRVEPTLEIESKLEMAGRVKVLHFFTHHVYAKAGCRVAIAVTDGSVLGFHC

SEQ ID NO: 47036 - DNA, 994 bp, Viridiplantae
  CDS (61)..(780)
  misc_feature (766)..(766): n is a, g, c or t
  misc_feature (781)..(781): n is a, g, c or t
  misc_feature (786)..(786): n is a, g, c or t
  misc_feature (824)..(824): n is a, g, c or t
  misc_feature (849)..(849): n is a, g, c or t
  misc_feature (877)..(877): n is a, g, c or t
  misc_feature (912)..(912): n is a, g, c or t
  misc_feature (937)..(937): n is a, g, c or t
  misc_feature (973)..(973): n is a, g, c or t
ttttttttttttttttctttttaaatattaaaaattttacgtgaatgtaacgttatccctatgcccaaacaagtatccttttgcatttcttctttttttttaaaggcgaactcttatcctactaaccggggaacagttaaaacatcgctaccaaccatctactctgaaatggcgaagccttcttcttcttcgtctggcggtggaacaaacctcgcttcatgcgcggtcgccgccgtcttcatcgtctttgctatcatagccgcggttacagtttacctaaccgtcttcagaccgagagatcccgagatctccgtcacaaacgtcaaagtcccgtcgttctccgtcgccaacagctccgtcagcttcagctactcccagctctcctccgtcagaaacccaaaccgcgcggcgttctctcactacaacaacagaatcgagctcttctactacgggaaccggatcggtttcattttcatacccgctggtgagatcgaaccgggtcagacgaagaggatggacgctagtttctccgtggattcgtttccgctcgcgtcttcctctgcttctcgaatctccgccgcggattttcagaggcctggatccgggttggtggtgggggaggagagccgggccgggtcaacagtggagatagagtcgaagctggagatggcgggtcgggttagagttctgggtctgttcacgcatcaaatcgcggcgaaatgtaactgcaggatcgcgatttctactgttgatggttcgatcgtanccgtccgttgttganaccanacttttgtagcaattaaacaaaactgtacaagtgtttntttacagaacacaaatgcaaaactntagtaaaaacccagcttgggttcttttntgaatcctcaagttagaaaattgcaaatataattncaaaatatttgtaactttaggacantgcattacaagtcacaatggtaaggagactgacttncagggaaaaaaaaaaaaaaaa

SEQ ID NO: 47037 - protein, 239 aa, Viridiplantae
  misc_feature (236)..(236): The Xaa at location 236 stands for Ala, Pro, Ser, or Thr.
MPKQVSFCISSFFLKANSYPTNRGTVKTSLPTIYSEMAKPSSSSSGGGTNLASCAVAAVFIVFAIIAAVTVYLTVFRPRDPEISVTNVKVPSFSVANSSVSFSYSQLSSVRNPNRAAFSHYNNRIELFYYGNRIGFIFIPAGEIEPGQTKRMDASFSVDSFPLASSSASRISAADFQRPGSGLVVGEESRAGSTVEIESKLEMAGRVRVLGLFTHQIAAKCNCRIAISTVDGSIVXVRC

SEQ ID NO: 47038 - DNA, 868 bp, Glycine max
  CDS (52)..(693)
ccacgcgtccgataaaacaacactctggctctccctccaccgccccaggccatggcggccggagcctctgctccgccccccgccccgcaggcgccgaggccaaagcggcctcggcctccgtcggggcgcaccaacctagcctcctgcgtggtggccaccatcttcctaatcttcatcatcatcgttatcctcattgtatactacaccgtcttcaaaccccaggaccccaaaatcgccgtcaacgccgtccagctcccctccttctccgtcgctaacggcaccgtcaacttcactttctcccagtacgcctccgttagaaaccctaaccgtgccgcgttcacccactacgacagctccctccagctcatctactccggcagccaggtcggcttcatgttcatccccgccggcgagatcgacgctggcaggacgcagtacatggcagccaccttctccgtccagtccttccccctctcggtgccgcccaggatgggccccacattggccaacggcgacggagtgggcttcaactatgggcttagggttgagcccactatggaaatcgagtccaagttggagatggcggggcgtgtcaaagtgttgcacttcttcacccatcacgtttatgccaaagccggttgcagggttgccattgccgtaactgatggatctgtcttaggttttcactgctaattcttcttcttctttttttttgtaactctagactttttaatagtaaaaaagtaaaactgtaattgttacttgttagtcatgttaagtaaccaaacccaaggcgtcacgattaaaattgtaaagatgattttcaattttccttctcgaatgcaaagtttcgccattttgtttgtcg

SEQ ID NO: 47039 - protein, 213 aa, Glycine max
MAAGASAPPPAPQAPRPKRPRPPSGRTNLASCVVATIFLIFIIIVILIVYYTVFKPQDPKIAVNAVQLPSFSVANGTVNFTFSQYASVRNPNRAAFTHYDSSLQLIYSGSQVGFMFIPAGEIDAGRTQYMAATFSVQSFPLSVPPRMGPTLANGDGVGFNYGLRVEPTMEIESKLEMAGRVKVLHFFTHHVYAKAGCRVAIAVTDGSVLGFHC

SEQ ID NO: 47040 - DNA, 1231 bp, Magnoliophyta
  CDS (22)..(1065)
aaacactcttcgatctcgacaatggccaagcctcacgatcgtcgccgttcttccggcagaactaatttagcttcttgcgccgtcgccaccgtcttcttactcatcttactcgttgttctccttgtcgtttacttcacagtcttcaaaccaaaagaccccaagatctccgttaacgccgtccaactcccctcattcgccgtctcaaacaataccgctaacttctccttctctcagtacgtcgccgttagaaaccctaaccgtgccgttttctctcattacgacagctctattcagcttctttattcgggtaatcaagtcgggtttatgttcatacccgccggtaaaattgattcgggtcggattcaatacatggccgccacttttaccgttcattctttccctatttctcctccttcctcctccgctatctccaccgtctctgccgccgttattccagactctccgattattcccggtccaccggatttcactgtaactccaagaaacccagattcaccgtattttccaggatatccagaatcgccggatttaccgggaaatccaggttcaccggatttttctgggaatccgggtcctccgagtttcccgagaaatccaggctcgccggagtttccaggaaacccaggagctccgattataccgagaaatccaggctcgccggaatttccaataaatccaccgagaaatccaggtactccggtgattccgagaaacccaaatccaccggtttttccaggtaatcccgggtcgggtaacccgagaagcatgggtccaccggggtttcctggaatcggaggtccgccgggatttccgggtacgccattcggcggaggagggacggggccaacgctaggagatggatatgcgaatccgggtttcgggtatgggaatcgggtcggaccaacaatggagatagagtcgaagatggagttagcgggtcgggtcaaagtgctgcacgtgttcacacatcacgtggttgctaaatcggattgtcgagtcaccgtctctattgccgatggttccgtcttgggtttccattgctaatttaattcccgtattattattatcttctccatttttgaagttttatttagttttttcccctttttcactaattttttgttgtagcccatgtttaagtttgaggaaattaattagtaattgtataaattatttatttttctactaaaaagaataaagtttataggcc

SEQ ID NO: 47041 - protein, 347 aa, Magnoliophyta
MAKPHDRRRSSGRTNLASCAVATVFLLILLVVLLVVYFTVFKPKDPKISVNAVQLPSFAVSNNTANFSFSQYVAVRNPNRAVFSHYDSSIQLLYSGNQVGFMFIPAGKIDSGRIQYMAATFTVHSFPISPPSSSAISTVSAAVIPDSPIIPGPPDFTVTPRNPDSPYFPGYPESPDLPGNPGSPDFSGNPGPPSFPRNPGSPEFPGNPGAPIIPRNPGSPEFPINPPRNPGTPVIPRNPNPPVFPGNPGSGNPRSMGPPGFPGIGGPPGFPGTPFGGGGTGPTLGDGYANPGFGYGNRVGPTMEIESKMELAGRVKVLHVFTHHVVAKSDCRVTVSIADGSVLGFHC

SEQ ID NO: 47042 - DNA, 958 bp, Oryza sativa
  CDS (113)..(958)
gtcgtgtgaagcggtgaactttagccgactcctgactagcgactaccctcccactctctcagctcgcttcccttcctcgcctcgccggccaagaaccaccgcaagattcgccatggccagatcgccggagccgccgcgctactacgccgccgcgggctaccaccgcccctcgcccttctcctccgtggcggcgtcctgcgtcgtggcggcgctgttcatcctgctcgccgcgggcggcgccgcggctgcgctgttcctgctctaccggccgcaggcgccggccatcgccgtgacggccgtgcagctcccctccttcgcctcccgcaacggcaccgtcgccttcacgttccagcagctcgcctccgtccgcaaccccaaccgctccccgctcgcgcactacgacagctcgctccgcgtcgcctacgccggcggcgaggtcggctcgatgtacatccccgccggccagatcgacggggggcgcacgcagtacatggccaccagcttcaccgtcccggccttcgccgtcacctcctccgccaccgccgccgcttcctcctccccggcgcagacaatcaccgtccccgcctccggcccctcaccggcggcggtgggcgcggtggcgctgcagcaagaacagccgccgccgcagcagcagcaggtggcggcgctgccggtgatggaggtggactcgctgctggtggtgaaagggaaggtgaccatcctccgggtgttcacccaccacgtcgtcgccgccaagttccagttagatgcttatgactttggatgcaagttgaaatattctcagaaatgcaagttgaaaatgttattctcgcatattcgccagattgagctgatatttagtggacatgattggacatttaaccgtgtctcgcggcagtttgctgtaatttactttagtagcctgaattgtttggtgagcataattgttggatcttga

SEQ ID NO: 47043 - protein, 281 aa, Oryza sativa
MARSPEPPRYYAAAGYHRPSPFSSVAASCVVAALFILLAAGGAAAALFLLYRPQAPAIAVTAVQLPSFASRNGTVAFTFQQLASVRNPNRSPLAHYDSSLRVAYAGGEVGSMYIPAGQIDGGRTQYMATSFTVPAFAVTSSATAAASSSPAQTITVPASGPSPAAVGAVALQQEQPPPQQQQVAALPVMEVDSLLVVKGKVTILRVFTHHVVAAKFQLDAYDFGCKLKYSQKCKLKMLFSHIRQIELIFSGHDWTFNRVSRQFAVIYFSSLNCLVSIIVGS

SEQ ID NO: 47044 - DNA, 702 bp, Oryza sativa Japonica Group
  CDS (1)..(702)
atggccagatcgccggagccgccgcgctactacgccgccgcgggctaccaccgcccctcgcccttctcctccgtggcggcgtcctgcgtcgtggcggcgctgttcatcctgctcgccgcgggcggcgccgcggctgcgctgttcctgctctaccggccgcaggcgccggccatcgccgtgacggccgtgcagctcccctccttcgcctcccgcaacggcaccgtcgccttcacgttccagcagctcgcctccgtccgcaaccccaaccgctccccgctcgcgcactacgacagctcgctccgcgtcgcctacgccggcggcgaggtcggctcgatgtacatccccgccggccagatcgacggggggcgcacgcagtacatggccaccagcttcaccgtcccggccttcgccgtcacctcctccgccaccgccgccgcttcctcctccccggcgcagacaatcaccgtccccgcctccggcccctcaccggcggcggtgggcgcggtggcgctgcagcaagaacagccgccgccgcagcagcagcaggtggcggcgctgccggtgatggaggtggactcgctgctggtggtgaaagggaaggtgaccatcctccgggtgttcacccaccacgtcgtcgccgccaaggtgtgccgcatcggcgtctcgccggcggacggccgcgtgctcggattccggtgctga

SEQ ID NO: 47045 - protein, 233 aa, Oryza sativa Japonica Group
MARSPEPPRYYAAAGYHRPSPFSSVAASCVVAALFILLAAGGAAAALFLLYRPQAPAIAVTAVQLPSFASRNGTVAFTFQQLASVRNPNRSPLAHYDSSLRVAYAGGEVGSMYIPAGQIDGGRTQYMATSFTVPAFAVTSSATAAASSSPAQTITVPASGPSPAAVGAVALQQEQPPPQQQQVAALPVMEVDSLLVVKGKVTILRVFTHHVVAAKVCRIGVSPADGRVLGFRC

SEQ ID NO: 47046 - DNA, 1029 bp, Arabidopsis thaliana
  CDS (1)..(1029)
atggccaagcctcacgatcgtcgccgttcttccggcagaactaatttagcttcttgcgccgtcgccaccgtcttcttactcatcttactcgttgttctccttgtcgtttacttcacagtcttcaaaccaaaagaccccaagatctccgttaacgccgtccaactcccctcattcgccgtctcaaacaataccgctaacttctccttctctcagtacgtcgccgttagaaaccctaaccgtgccgttttctctcattacgacagctctattcagcttctttattcgggtaatcaagtcgggtttatgttcatacccgccggtaaaattgattcgggtcggattcaatacatggccgccacttttaccgttcattctttccctatttctcctccttcctcctccgctatctccaccgtctctgccgccgttattccagactctccgattattcccggtccaccggatttcactgtaactccaagaaacccagattcaccgtattttccaggatatccagaatcgccggatttaccgggaaatccaggttcaccggatttttctgggaatccgggtcctccgagtttcccgagaaatccaggctcgccggagtttccaggaaacccaggagctccgattataccgagaaatccaggctcgccggaatttccaataaatccaccgagaaatccaggtgctccggtgattccgagaaacccaaatccaccggtttttccaggtaacccgagaagcatgggtccaccggggtttcctggaatcggaggtccgccgggatttccgggtacgccattcggcggaggagggacggggccaacgctaggagatggatatgcgaatccgggtttcgggtatgggaatcgggtcggaccaacaatggagatagagtcgaagatggagttagcgggtcgggtcaaagtgctgcacgtgttcacacatcacgtggttgctaaatcggattgtcgagtcaccgtctctattgccgatggttccgtcttgggtttccattgctaa

SEQ ID NO: 47047 - protein, 342 aa, Arabidopsis thaliana
MAKPHDRRRSSGRTNLASCAVATVFLLILLVVLLVVYFTVFKPKDPKISVNAVQLPSFAVSNNTANFSFSQYVAVRNPNRAVFSHYDSSIQLLYSGNQVGFMFIPAGKIDSGRIQYMAATFTVHSFPISPPSSSAISTVSAAVIPDSPIIPGPPDFTVTPRNPDSPYFPGYPESPDLPGNPGSPDFSGNPGPPSFPRNPGSPEFPGNPGAPIIPRNPGSPEFPINPPRNPGAPVIPRNPNPPVFPGNPRSMGPPGFPGIGGPPGFPGTPFGGGGTGPTLGDGYANPGFGYGNRVGPTMEIESKMELAGRVKVLHVFTHHVVAKSDCRVTVSIADGSVLGFHC

SEQ ID NO: 47048 - DNA, 708 bp, Arabidopsis thaliana
  CDS (1)..(708)
atgagtgatttttcaatcaaacccgatgataaaaaggaagaggagaagccagcaacagccatgttaccaccacccaaaccaaacgcttcttccatggaaacgcaatctgctaacaccggaaccgctaaaaaactgcggcggaaacgcaactgcaaaatctgtatctgtttcactatccttctcattctcctaatcgccatagttatcgtcatcttagctttcactctcttcaaaccaaaacgcccaactactacaatcgattccgtcaccgttgatcgtctccaagcttccgtcaatcctctccttctcaaagtcctcctaaacctaacgctcaacgtcgatctctctctcaaaaaccctaaccgcatcgggtttagctacgattcgtcgtcggcgttgttgaattacagaggccaagtgatcggtgaagctcctcttccggctaaccgaatcgcggcgcggaaaacggtgccgttgaatataacgttgacgctaatggcggatcggttactctctgaaacgcagcttttatctgacgtcatggctggcgtcattccgcttaatacttttgttaaagtcactggtaaagtaaccgttcttaaaatctttaagattaaagtccaatcgtcttcttcgtgtgatctcagtatctctgtttcggatcgtaatgttacgagtcaacactgtaagtattcgactaagttataa

SEQ ID NO: 47049 - protein, 235 aa, Arabidopsis thaliana
MSDFSIKPDDKKEEEKPATAMLPPPKPNASSMETQSANTGTAKKLRRKRNCKICICFTILLILLIAIVIVILAFTLFKPKRPTTTIDSVTVDRLQASVNPLLLKVLLNLTLNVDLSLKNPNRIGFSYDSSSALLNYRGQVIGEAPLPANRIAARKTVPLNITLTLMADRLLSETQLLSDVMAGVIPLNTFVKVTGKVTVLKIFKIKVQSSSSCDLSISVSDRNVTSQHCKYSTKL

SEQ ID NO: 47050 - DNA, 564 bp, Arabidopsis thaliana
  CDS (1)..(564)
atgtcgaagtcttgttcaaacctcgcttcatgcgccgtcgccacgctcttcatagtcttcttaatcatcgccgcacttactgtttatctcacagtctttagaccgagagatcctgagatctccgtcactagcgtcaaggttccttcattctccgtcgctaatagctccgttagtttcaccttttctcaattctccgccgttagaaaccctaaccgcgcagctttctcacactacaacaatgtaatccagctcttttactatggaaaccggatcggttataccttcgtacctgctggtgagatcgaatcgggtcgaaccaagcgtatgttagctactttctccgttcagtcgtttcctctcgcggcggcctctagttctcaaatctccgccgcccaatttcaaaattcggatcggtccgggtcaacagtggaaatagagtcgaagctggagatggcgggtcgggttcgggttctcggtttgtttactcaccgaatcgcggctaaatgtaattgtaggatcgcgatttcctcgagtgatggttccatcgtagccgtccgttgttaa

SEQ ID NO: 47051 - protein, 187 aa, Arabidopsis thaliana
MSKSCSNLASCAVATLFIVFLIIAALTVYLTVFRPRDPEISVTSVKVPSFSVANSSVSFTFSQFSAVRNPNRAAFSHYNNVIQLFYYGNRIGYTFVPAGEIESGRTKRMLATFSVQSFPLAAASSSQISAAQFQNSDRSGSTVEIESKLEMAGRVRVLGLFTHRIAAKCNCRIAISSSDGSIVAVRC

SEQ ID NO: 47052 - DNA, 1011 bp, Oryza sativa subsp. indica
  CDS (1)..(1011)
atgcagccgccgccaagaacccgcgatccggccatcgccatcgccggcgacggcgcggcgcggcgaggtcccccgccgatgcagccgcccgggccgccgccggtaaggcatggtccgccgccggtgcggcagcagcacggctactactacgaggaggagcagaggccgctgcacctgcacgtgaggccggcgaggtcgtcgtcgtcggcgctggcgtcgtgcctcgtggcggcggcgttcctggcgctggcggtgggcggggcgggggcggcgctgttcgtgctgttccggccgcgcccgcccgacatcgcggtgtcggcggtgcggctgccggcgttcgcgtccggcccgaacggcacggtggcgttcacgttcgagcagacggccgccgtgcgcaaccccaaccgcgcgccgctcgcgcacttcgacagctcgctccgcgtcgcctacgccggcggccagctcggctccgtctacatccccgccggcctcatcgacggtggccgcaccaaggacatgtccgccagcttcgccgtcccggcgttcgccgcggccaccccgccgccgctgcctcaggagcagatggccgccgccgccgccgcctcggcgcagcagcagcagccggcggcggcggcggcggtgatggaggtcgactcgctgctggtggtcaaggggagggtgaccgtgctgcgtgtgctgacgcaccacgtcgaggcggccaaggtgtgccgcgtcggcgtctcgccggtggacggcaagatgcgggataagccatcaaagcatctgttgagccagaatcgattcggggtgcacggagaactcaagttccagcaccgtaacaggaggcctgactgttactctcagtcaccatatcttgttcttgacccaaaagagcatcagtactattccaatcacaatggcaacaggggcatacttgcgaataagggcctgaaaaccatgaaggaaagccttgtcacagacgtgaaaacaggtgaagtggtaaactggtaa

SEQ ID NO: 47053 - protein, 336 aa, Oryza sativa subsp. indica
MQPPPRTRDPAIAIAGDGAARRGPPPMQPPGPPPVRHGPPPVRQQHGYYYEEEQRPLHLHVRPARSSSSALASCLVAAAFLALAVGGAGAALFVLFRPRPPDIAVSAVRLPAFASGPNGTVAFTFEQTAAVRNPNRAPLAHFDSSLRVAYAGGQLGSVYIPAGLIDGGRTKDMSASFAVPAFAAATPPPLPQEQMAAAAAASAQQQQPAAAAAVMEVDSLLVVKGRVTVLRVLTHHVEAAKVCRVGVSPVDGKMRDKPSKHLLSQNRFGVHGELKFQHRNRRPDCYSQSPYLVLDPKEHQYYSNHNGNRGILANKGLKTMKESLVTDVKTGEVVNW

SEQ ID NO: 47054 - DNA, 1761 bp, Oryza sativa subsp. japonica
  CDS (1)..(996)
atgcagccgccgccaagaacccgcgatccggccatcgccatcgccggcgacggcgcggcgcggcgaggtcccccgccgatgcagccgcccgggccgccgccggtaaggcatggtccgccgccggtgcggcagcagcacggctactactacgaggaggagcagaggccgctgcacctgcacgtgaggacggcgaggtcgtcgtcgtcggcgctggcgtcgtgcctcgtggcggcggcgttcctggcgctggcggtgggcggggcgggggcggcgctgttcgtgctgttccggccgcgcccgcccgacatcgcggtggcggcggtgcggctgccggcgttcgcgtccggcccgaacggcacggtggcgttcacgttcgagcagacggccgccgtgcgcaaccccaaccgcgcgccgctcgcgcacttcgacagctcgctccgcgtcgcctacgccggcggcgagctcggctccgtctacatccccgccggcctcatcgacggtggccgcaccaaggacatgtccgccagcttcgccgtcccggcgttcgccgcggccaccccgccgtcgctgcctcaggagcagatggccgccgccgccgccgcctcggcgcagcagcagcagccggcggcggcggcggcggtgatggaggtcgactcgctgctggtggtcaaggggagggtgaccgtgctgcgtgtgctgacgcaccacgtcgaggcggccaaggtgtgccgcgtcggcgtctcgccggtggacggcaagatgcgggataagccatcaaagcatctgttgagccagaatcgattcggggtgcacggagaactcaagttccagcaccgtaacaggaggcctgactgttactctcagtcaccatatcttgttcttgacccaaaagagcatcagtactattccaatcacaatggcaacaagggcatacttgcgaataagggcctgaaaaccattgaaggaaagccttgtcacagacgtgaaaacaggtgaagtgggtaaactggttcttcgtcttctgtatgaaagtgtcaaacttaataaaagcatatggtcttgcagcagtttcaatttggttgccattgaccctctcaaattcatttttgagatcttctaagtactggaaagcaagtttcttcggataagagcagtcacacattgtcaaatagcacacacggccctcgatgatgtaatggaaaaggtatggcccagtctcaattgacatccttgatgcttcatgttgccctttcgataagttcttgaacaacagtttagcttgctgcttgtagaagtcagcatccttcagatcccgaccatcatctaatccctccactaacggaaggtcatcagtaacacgtgctatcattgtcagcttcaccattttggatatgcagcgtgaaatgaactagcataggcaatctgaaagtgccaccttcaaaatttcgaatcgggccgcgaggtgggggcgccggtgggatgagacggccgcgtcgccgcccccggcgaacccgctcgccggcgatcgggggaggagaggagcacgtccgccgccgcttcctcccttgcacctgtccgtcagagcgtgagtgcgggagagggtgagtactctgcttcgcccctcgccccctcatgtgcgacggtgtgtttttcacgtcatccttctctcccgcttcaaccatgaggacatgggtaccttagtactttccatgccattcatgcatccggggtgcaattcctcctgcagcccgggggatccac

SEQ ID NO: 47055 - protein, 331 aa, Oryza sativa subsp. japonica
MQPPPRTRDPAIAIAGDGAARRGPPPMQPPGPPPVRHGPPPVRQQHGYYYEEEQRPLHLHVRTARSSSSALASCLVAAAFLALAVGGAGAALFVLFRPRPPDIAVAAVRLPAFASGPNGTVAFTFEQTAAVRNPNRAPLAHFDSSLRVAYAGGELGSVYIPAGLIDGGRTKDMSASFAVPAFAAATPPSLPQEQMAAAAAASAQQQQPAAAAAVMEVDSLLVVKGRVTVLRVLTHHVEAAKVCRVGVSPVDGKMRDKPSKHLLSQNRFGVHGELKFQHRNRRPDCYSQSPYLVLDPKEHQYYSNHNGNKGILANKGLKTIEGKPCHRRENR

SEQ ID NO: 47056 - DNA, 585 bp, Vitis vinifera
  CDS (1)..(585)
  misc_feature (522)..(522): s is g or c
atggtcaaaccacagaggccaccctctggccgtacgaatctagcttcatgcgttgtggccacaatattcttgattttcatcatcatcgttgtgttgatcgtcttcttctctgtgttcaagcccaaagaacccataatttcagtgaatgcagtgcagcttccgagcttcgcaatctccaatggcaccgtcaacttcacattctcgcagtacgtgtcggtgaagaaccctaacaaggcggagttctcgcattacgacagcacgcttcagctgctctacggtgggaatcaagtgggcttcatgttcattcccgccgggaagatcggctccggccggacccagtacatggctgccaccttcgcggtggagtcgttcccattgggggcggtgccggagtccgtgggacccacgatcaccgacggcctcggagggttcagaatcggacccaatttggagattgagtcgaggatggaaatggcgggcagggttagggttttgcacttcttcacgcaccatgtggatgcsagagctgtttgtagggtttccattgctgtgagtgatggatctgttttagggtttcactgctag

SEQ ID NO: 47057 - protein, 194 aa, Vitis vinifera
MVKPQRPPSGRTNLASCVVATIFLIFIIIVVLIVFFSVFKPKEPIISVNAVQLPSFAISNGTVNFTFSQYVSVKNPNKAEFSHYDSTLQLLYGGNQVGFMFIPAGKIGSGRTQYMAATFAVESFPLGAVPESVGPTITDGLGGFRIGPNLEIESRMEMAGRVRVLHFFTHHVDARAVCRVSIAVSDGSVLGFHC

SEQ ID NO: 47058 - DNA, 585 bp, Vitis vinifera
  CDS (1)..(585)
atgaatgaacctcggcgaccaggccgtacgaacctagcttcatgtatagtggctacggtcttcttagtcctcgccgtcgcagttattgtcatcgtttacctctgcgtcttcaagcctaaagatccaaagatcgccgtccacgccatgaggttcccgacgttctcaatctccaacggcactgtcgacttcaccttctctcagtacgtggctgtcaagaaccctaaccgcgatgccttcactcactatgacagctcagtccagctcgtctactccggcagcgaggtagggttcatgttcattccggccggcaagattgatgccgggaggacgcagtacatgttggcaacgttcgccgtgaagtcgtttccggtgacgcaggcgccgttgagtggggtgacggcgttgaatgatggagtgggtggggtgggcatgggaatggagcccacgatggagatcgagtcaaggatgaagcttgtgggtagggttagggtattgtggttcttcacacatacagttgatagcagagtgagctgcagcgttgccattgaagtgagtaacggctctgtacttggatttcattgctga

SEQ ID NO: 47059 - protein, 194 aa, Vitis vinifera
MNEPRRPGRTNLASCIVATVFLVLAVAVIVIVYLCVFKPKDPKIAVHAMRFPTFSISNGTVDFTFSQYVAVKNPNRDAFTHYDSSVQLVYSGSEVGFMFIPAGKIDAGRTQYMLATFAVKSFPVTQAPLSGVTALNDGVGGVGMGMEPTMEIESRMKLVGRVRVLWFFTHTVDSRVSCSVAIEVSNGSVLGFHC

SEQ ID NO: 47060 - DNA, 777 bp, Zea mays
  CDS (1)..(777)
atgccgccgcccgcgccaccgggccgctcgcacagcaacgaagcatcgccagcggacccgcccatcgccagcgccagcagcagcaggctgccgccgccgcctcctcctcctcctcgtcctcggccgtcgccacacccacgcgtgtacggcgactacgaccccgccgagggcctccgccgtccccctctccctctccctctccctccgcctcggcgcccgccgtccccctgctcctccgcgctggcgtcctgcctggccgcgacggcgttcctgctgctgtcggcgggcggcgccggcgctgcgctgttcctgctgttccgcccgcggccgcccgacatctccgtggccggcgtgcgcctgccctccttctccgcgtccaacggcaccgtggccttcaccttcgagcagacggcggcggtgcgcaaccccaaccgctccccgctcgcgcacttcgacagctccctccgcgtcgcctacgcggggggcgacctcggcgccgtctacatccccgcggggctcatcgacggcggccgcaccaagcacgtgtccgcggtcttcgacgtctcggccatccccgtcgccgcgcagccgcagccgcagggggccgtcgaagccgcccagcaggctcagccgccggttatcgaggtccgctcgctgctggtggtcaagggcagggtcaacgtactgcgcgtcctcacgcaccgcgtccaggccgccaagctctgccgcgtcggggtctcgccgctcgatggcacggtgctcggattccgctgctga

SEQ ID NO: 47061 - protein, 258 aa, Zea mays
MPPPAPPGRSHSNEASPADPPIASASSSRLPPPPPPPPRPRPSPHPRVYGDYDPAEGLRRPPLPLPLPPPRRPPSPCSSALASCLAATAFLLLSAGGAGAALFLLFRPRPPDISVAGVRLPSFSASNGTVAFTFEQTAAVRNPNRSPLAHFDSSLRVAYAGGDLGAVYIPAGLIDGGRTKHVSAVFDVSAIPVAAQPQPQGAVEAAQQAQPPVIEVRSLLVVKGRVNVLRVLTHRVQAAKLCRVGVSPLDGTVLGFRC

SEQ ID NO: 47062 - DNA, 612 bp, Brassica napus
  CDS (1)..(612)
atggcgaagccttcttcttcttcgtctggcggtggaacaaacctcgcttcatgcgcggtcgccgccgtcttcatcgtctttgctatcatagccgcggttacagtttacctaaccgtcttcagaccgagagatcccgagatctccgtcacaaacgtcaaagtcccgtcgttctccgtcgccaacagctccgtcagcttcagctactcccagctctcctccgtcagaaacccaaaccgcgcggcgttctctcactacaacaacagaatcgagctcttctactacgggaaccggatcggtttcattttcatacccgctggtgagatcgaaccgggtcagacgaagaggatggacgctagtttctccgtggattcgtttccgctcgcgtcttcctctgcttctcgaatctccgccgcggattttcagaggcctggatccgggttggtggtgggggaggagagtcgggccgggtcaacagtggaaatagagtcgaagctggagatggcgggtcgggttagagttctgggtctgttcacgcatcaaatcgcggcgaaatgtaactgcaggatcgcgatttctactgttgatggttcgatcgtagccgtccgttgttga

SEQ ID NO: 47063 - protein, 203 aa, Brassica napus
MAKPSSSSSGGGTNLASCAVAAVFIVFAIIAAVTVYLTVFRPRDPEISVTNVKVPSFSVANSSVSFSYSQLSSVRNPNRAAFSHYNNRIELFYYGNRIGFIFIPAGEIEPGQTKRMDASFSVDSFPLASSSASRISAADFQRPGSGLVVGEESRAGSTVEIESKLEMAGRVRVLGLFTHQIAAKCNCRIAISTVDGSIVAVRC

SEQ ID NO: 47064 - DNA, 579 bp, Glycine max
  CDS (1)..(579)
atgaaggtaggatctggtaaagggagaaaagtgtgcctgacggtgacaggtgttgtgattgcaattgtattgctaattgtgatactagcgttgacagtgttcaaagccaagcatcctgttaccacagtggactcaacgaagctagaggactttcacgtgagcttggatccagtaaaactaagggtagatttgaatgtgaccctgggagtggatgtctcagtgaagaacccgaacaaggtgggattccagtattcagacagcactgcccacctcaattacagagggcagctgataggtgaagtcccgatctctgccggagagatttcatccggtgagaccaaaggattcaatctcaccctcaccattatggccgaccgtttgctctccaattctcagcttttatctgatgtcacatctggtacattgcccctaaacactttcgtgaggatgtctgggaaagtcagcatcttaggctttatcaaagtccatgtggtttcctccacttcttgtgatgttgcaattaatctttctaatggaactgttgggaaccaagagtgccaatacaagacaaaactttga

SEQ ID NO: 47065 - protein, 192 aa, Glycine max
MKVGSGKGRKVCLTVTGVVIAIVLLIVILALTVFKAKHPVTTVDSTKLEDFHVSLDPVKLRVDLNVTLGVDVSVKNPNKVGFQYSDSTAHLNYRGQLIGEVPISAGEISSGETKGFNLTLTIMADRLLSNSQLLSDVTSGTLPLNTFVRMSGKVSILGFIKVHVVSSTSCDVAINLSNGTVGNQECQYKTKL

SEQ ID NO: 47066 - DNA, 552 bp, Glycine max
  CDS (1)..(552)
atggcgaagcccgagaaccgcactaacttagcttcgtgtttcgtggccaccgttttcttgatcttccttctcattgtggtcttcatcgtttacttcactgtgttcaagccgcagtaccccaaaatcgctgtgagcgccgtccagatcccttccttctccgcgactaacggcaccgtcaacttcaccttctcacagtacgcctccgttaggaaccctaaccgaggcaccttctcccactacgacagctcgctccagcttctctactacggcagacaggtcggcttcatgttcgttccggccggaaagatcgccgccggcaggactcagtacatggccgccaccttcaccgttcagtcctttcccttgggcctggggcccacctccgtggatgggcctagtagtgtggggcccacgatggagatggagtcgaggatagagatggcggggcgcgtgagagtgttacaccttttcagtcatcacgtggaggccaaagctcaatgcagggtcgccatcgccatcaacgatggatcggtgttaggttttcggtgctaa

SEQ ID NO: 47067 - protein, 183 aa, Glycine max
MAKPENRTNLASCFVATVFLIFLLIVVFIVYFTVFKPQYPKIAVSAVQIPSFSATNGTVNFTFSQYASVRNPNRGTFSHYDSSLQLLYYGRQVGFMFVPAGKIAAGRTQYMAATFTVQSFPLGLGPTSVDGPSSVGPTMEMESRIEMAGRVRVLHLFSHHVEAKAQCRVAIAINDGSVLGFRC

SEQ ID NO: 47068 - DNA, 20 bp, Artificial sequence
  primer
atggcgaagcccgagaaccg

SEQ ID NO: 47069 - DNA, 21 bp, Artificial sequence
  primer
ttagcaccgaaaacctaacac

SEQ ID NO: 47070 - protein, 364 aa, Artificial sequence
  consensus sequence
  Variant (4)..(4): Xaa in position 4 is any amino acid
  Variant (7)..(7): Xaa in position 7 is any amino acid
  Variant (8)..(8): Xaa in position 8 is any or no amino acid
  Variant (10)..(24): Xaa in position 10 to 24 is any amino acid
  Variant (26)..(26): Xaa in position 26 is any amino acid
  Variant (28)..(29): Xaa in position 28 to 29 is any amino acid
  Variant (31)..(31): Xaa in position 31 is any amino acid
  Variant (33)..(33): Xaa in position 33 is any amino acid
  Variant (35)..(36): Xaa in position 35 to 36 is any amino acid
  Variant (38)..(39): Xaa in position 38 to 39 is any amino acid
  Variant (41)..(41): Xaa in position 41 is any amino acid
  Variant (43)..(45): Xaa in position 43 to 45 is any amino acid
  Variant (46)..(51): Xaa in position 46 to 51 is any or no amino acid
  Variant (53)..(54): Xaa in position 53 to 54 is any amino acid
  Variant (56)..(56): Xaa in position 56 is any amino acid
  Variant (60)..(60): Xaa in position 60 is any amino acid
  Variant (62)..(64): Xaa in position 62 to 64 is any amino acid
  Variant (71)..(74): Xaa in position 71 to 74 is any amino acid
  Variant (76)..(76): Xaa in position 76 is any amino acid
  Variant (79)..(83): Xaa in position 79 to 83 is any amino acid
  Variant (85)..(85): Xaa in position 85 is any amino acid
  Variant (87)..(89): Xaa in position 87 to 89 is any amino acid
  Variant (91)..(94): Xaa in position 91 to 94 is any amino acid
  Variant (98)..(98): Xaa in position 98 is any amino acid
  Variant (100)..(101): Xaa in position 100 to 101 is any amino acid
  Variant (105)..(106): Xaa in position 105 to 106 is any amino acid
  Variant (108)..(110): Xaa in position 108 to 110 is any amino acid
  Variant (112)..(112): Xaa in position 112 is any amino acid
  Variant (114)..(115): Xaa in position 114 to 115 is any amino acid
  Variant (117)..(133): Xaa in position 117 to 133 is any amino acid
  Variant (134)..(293): Xaa in position 134 to 293 is any or no amino acid
  Variant (295)..(296): Xaa in position 295 to 296 is any amino acid
  Variant (298)..(302): Xaa in position 298 to 302 is any amino acid
  Variant (304)..(304): Xaa in position 304 is any amino acid
  Variant (306)..(306): Xaa in position 306 is any amino acid
  Variant (309)..(312): Xaa in position 309 to 312 is any amino acid
  Variant (314)..(314): Xaa in position 314 is any amino acid
  Variant (316)..(316): Xaa in position 316 is any amino acid
  Variant (318)..(320): Xaa in position 318 to 320 is any amino acid
  Variant (321)..(328): Xaa in position 321 to 328 is any or no amino acid
  Variant (331)..(336): Xaa in position 331 to 336 is any amino acid
  Variant (339)..(344): Xaa in position 339 to 344 is any amino acid
  Variant (345)..(363): Xaa in position 345 to 363 is any or no amino acid
ASCXVAXXFXXXXXXXXXXXXXXXFXPXXPXIXVXXVXXPXFXXXXXXXXXNXXVXFTFXQXXXVRNPNRXXXXHXDSXXXXXYXGXXXGXXXXPAGXIXXGRTXXMXXXFXVXXFXXXXXXXXXXXXXXXXXXXXXXXXXXXXXXXXXXXXXXXXXXXXXXXXXXXXXXXXXXXXXXXXXXXXXXXXXXXXXXXXXXXXXXXXXXXXXXXXXXXXXXXXXXXXXXXXXXXXXXXXXXXXXXXXXXXXXXXXXXXXXXXXXXXXXXXXXXXXXXXXXXXXXXXXXXXXXXXXXEXXSXXXXXGXVXVLXXXXHXVXAXXXXXXXXXXXCRXXXXXXDGXXXXXXXXXXXXXXXXXXXXXXXXXC

SEQ ID NO: 47071 - protein, 21 aa, Artificial sequence
  protein pattern
  Variant (2)..(2): Xaa in position 2 is Ser or Thr
  Variant (3)..(3): Xaa in position 3 is Phe or Tyr
  Variant (4)..(4): Xaa in position 4 is Glu, Gln or Ser
  Variant (6)..(6): Xaa in position 6 is any amino acid
  Variant (7)..(7): Xaa in position 7 is Ala, Ser or Val
  Variant (8)..(8): Xaa in position 8 is Ala or Ser
  Variant (15)..(15): Xaa in position 15 is Ala, Gly or Ser
  Variant (16)..(16): Xaa in position 16 is Ala, Pro, Thr or Val
  Variant (17)..(17): Xaa in position 17 is Phe or Leu
  Variant (18)..(18): Xaa in position 18 is Ala, Ser or Thr
  Variant (20)..(20): Xaa in position 20 is Phe or Tyr
  Variant (21)..(21): Xaa in position 21 is Asp or Asn
FXXXQXXXVRNPNRXXXXHXX

SEQ ID NO: 47072 - protein, 33 aa, Artificial sequence
  protein pattern
  Variant (2)..(2): Xaa in position 2 is any amino acid
  Variant (3)..(11): Xaa in position 3 to 11 is any or no amino acid
  Variant (13)..(13): Xaa in position 13 is Ile, Met or Val
  Variant (14)..(14): Xaa in position 14 is Asp, Glu or Arg
  Variant (16)..(16): Xaa in position 16 is any amino acid
  Variant (17)..(17): Xaa in position 17 is Ile, Leu or Met
  Variant (18)..(18): Xaa in position 18 is any amino acid
  Variant (19)..(19): Xaa in position 19 is Leu, Met or Val
  Variant (20)..(20): Xaa in position 20 is any amino acid
  Variant (22)..(22): Xaa in position 22 is Lys or Arg
  Variant (24)..(24): Xaa in position 24 is any amino acid
  Variant (25)..(25): Xaa in position 25 is Ile or Val
  Variant (27)..(27): Xaa in position 27 is any amino acid
  Variant (28)..(28): Xaa in position 28 is Phe, Leu or Val
  Variant (29)..(29): Xaa in position 29 is Phe or Leu
  Variant (30)..(30): Xaa in position 30 is Ser or Thr
  Variant (31)..(31): Xaa in position 31 is His or Arg
  Variant (32)..(32): Xaa in position 32 is any amino acid
  Variant (33)..(33): Xaa in position 33 is Ile or Val
VXXXXXXXXXXEXXSXXXXXGXVXXLXXXXXXX

SEQ ID NO: 47073 - protein, 20 aa, Artificial sequence
  protein pattern
  Variant (2)..(2): Xaa in position 2 is any amino acid
  Variant (4)..(4): Xaa in position 4 is any amino acid
  Variant (5)..(5): Xaa in position 5 is Glu, Gln or Arg
  Variant (6)..(6): Xaa in position 6 is Ile, Leu or Val
  Variant (8)..(9): Xaa in position 8 to 9 is any amino acid
  Variant (10)..(10): Xaa in position 10 is Phe or Tyr
  Variant (11)..(11): Xaa in position 11 is Ile or Val
  Variant (15)..(15): Xaa in position 15 is any amino acid
  Variant (17)..(17): Xaa in position 17 is Ala, Asp, Glu or Gly
  Variant (18)..(18): Xaa in position 18 is Ala, Gly, Pro or Ser
  Variant (20)..(20): Xaa in position 20 is Gln or Arg
YXGXXXGXXXXPAGXIXXGX

SEQ ID NO: 47074 - protein, 21 aa, Artificial sequence
  protein pattern
  Variant (2)..(4): Xaa in position 2 to 4 is any amino acid
  Variant (7)..(7): Xaa in position 7 is Ile or Val
  Variant (8)..(8): Xaa in position 8 is Ala, Gly, Ser or Thr
  Variant (9)..(9): Xaa in position 9 is Ile or Val
  Variant (10)..(10): Xaa in position 10 is Ala or Ser
  Variant (11)..(12): Xaa in position 11 to 12 is any amino acid
  Variant (15)..(15): Xaa in position 15 is any amino acid
  Variant (16)..(16): Xaa in position 16 is Ile, Met or Val
  Variant (17)..(20): Xaa in position 17 to 20 is any amino acid
  Variant (21)..(21): Xaa in position 21 is Cys or Ser
AXXXCRXXXXXXDGXXXXXXX

SEQ ID NO: 47075 - protein, 17 aa, Artificial sequence
  protein pattern
  Variant (2)..(2): Xaa in position 2 is any or no amino acid
  Variant (5)..(5): Xaa in position 5 is any amino acid
  Variant (8)..(8): Xaa in position 8 is Ala or Thr
  Variant (9)..(9): Xaa in position 9 is Ala, Ile, Leu or Val
  Variant (11)..(11): Xaa in position 11 is Ile or Leu
  Variant (12)..(12): Xaa in position 12 is Ala, Ile, Leu or Val
  Variant (13)..(13): Xaa in position 13 is Phe, Ile or Leu
  Variant (14)..(14): Xaa in position 14 is Ala, Ile or Leu
  Variant (15)..(15): Xaa in position 15 is Ala, Ile, Leu or Val
  Variant (16)..(16): Xaa in position 16 is Ala, Gly, Ile or Val
  Variant (17)..(17): Xaa in position 17 is Ala, Gly or Val
AXSCXVAXXFXXXXXXX

SEQ ID NO: 47076 - DNA, 276 bp, Glycine max
  CDS (1)..(276)
atgagtagctcatcaaggccggtgccgaggagagagagtccatggggagtcaccggagagaatcatcctgagcccaaagctcaccgctgcaatgaccgtgtcgaggatgttattcaggcttgctttgagggaaacccattcaagactgttccaggacccttcaagctcttctggcagtgcatgcgttcaaaacccggtgaggaaccaacagagccatttacttatctggatttggagcctccaaagagagaaacgaaacctgtgaaacctgagtag

SEQ ID NO: 47077 - protein, 91 aa, Glycine max
MSSSSRPVPRRESPWGVTGENHPEPKAHRCNDRVEDVIQACFEGNPFKTVPGPFKLFWQCMRSKPGEEPTEPFTYLDLEPPKRETKPVKPE

SEQ ID NO: 47078 - DNA, 509 bp, Zea mays subsp. mays
  CDS (182)..(466)
ccctcctcacggtaacccttcctgttcaaggagactcggcagaatcagacgccgccggagtcttctaggcttcctcgccccttccacatcgccggcggcatcatccttgcgccgcccggccagatcacagccggtccgccgcttgcctgtagggaagagagggtggaggaagtgggggaggatgagcgaggagaggccggtgccgcggcgggagagcccgtggggtctgcctgagggcgacacgcggcagcccaaggctcaccgctgtaacgaccgcgccgaggacgtcgtccaggcttgctttgaagggaacccattcaagacagttccaggcccatttaagctcttctggcaatgcatgcgctcaaaacctggggaggaaccaaccgagccctatacctacctgcagctagatcctccgagaagggtggaagtgaatctggagcaaacaggaagtgaaccttgaacgagcatgccatctcgtgccgatttgtcttcacctttggagc

SEQ ID NO: 47079 - protein, 94 aa, Zea mays subsp. mays
MSEERPVPRRESPWGLPEGDTRQPKAHRCNDRAEDVVQACFEGNPFKTVPGPFKLFWQCMRSKPGEEPTEPYTYLQLDPPRRVEVNLEQTGSEP

SEQ ID NO: 47080 - DNA, 285 bp, Zea mays
  CDS (1)..(285)
atgagcgcggagaggcccgtgccgcgccgggagagcccgtggggtctgcccgagggcgacacgcggcagcccaaggcacaccgctgcaacgaccgcgccgaggacgtcgtccaggcttgctttgaagggaacccattcaagacagttccaggtccattcaagctcttctggcaatgcatgcgatctaaacctggggaggaaccaaccgagccctatacctacctgcagctagatcctccgagaagagtggaagtgaatctggagcaaacagcttctgaatcttga

SEQ ID NO: 47081 - protein, 94 aa, Zea mays
MSAERPVPRRESPWGLPEGDTRQPKAHRCNDRAEDVVQACFEGNPFKTVPGPFKLFWQCMRSKPGEEPTEPYTYLQLDPPRRVEVNLEQTASES

SEQ ID NO: 47082 - DNA, 276 bp, Arabidopsis thaliana
  CDS (1)..(276)
atgagcgagacgagaccagtgccgaggagagagagtccatggggtttaccggaaggtcaccgtgagcccaaagctcaccgctgcaacgatcgtgttgaagacgttatccaggcgttattcgagggaaacccattcaagacagttccaggacctttcaaactcttctaccgatgtatgcgctctaagccaggagaggagccaacagagccattcaaatacctcgacctggaacctccaaagagagaagttaaacttgaagaagcaaagcttgagtaa

SEQ ID NO: 47083 - protein, 91 aa, Arabidopsis thaliana
MSETRPVPRRESPWGLPEGHREPKAHRCNDRVEDVIQALFEGNPFKTVPGPFKLFYRCMRSKPGEEPTEPFKYLDLEPPKREVKLEEAKLE

SEQ ID NO: 47084 - DNA, 909 bp, Oryza sativa subsp
  CDS (1)..(909)
atggtgattgtgtgttcttatcatccagtaactcctggccaatctgctgaggaaatgccaagtattgatgttcccaacaaagaaaacaaggacaaagacatgtttatcttgcatgtgatcatacagaaggttaaacctggtgaatcaatttcagttgcaggctggaaaagaattgcttctgaggttgtggcaactattcttcaagcactgcatatgtcagaaactcctctgcattttgatttcaacagtgagattgaggaacgtgaaatcgaatcctttgcagagcttccggttctctatgatgaacagttgtgctttggggacaattgcaagcattgtggaagtccgaagaacgttgatgtttctccttcaaacacaccacatatctttacaataggtttatactggtttggtgattgtgaaaaccagggtgttcactcctcggcaaaatattctctggcctcaatgatctcctatgccaatgggcggtacttctgctttgctcgcgaccaggataagtggctcatctctgatgctgagactattgaggtagataacttgctcatggcctctgcagcagccatgtgggccccatctgtcattgtaaggttggactgtgaggagggaggtggttggaggaggatgagcgaggggaggccggtgccgaggagggagagcccatggggcttgccggagggggacaagcgggagcccaaggcgcaccgctgcaacgaccgcgccgaggacgtcgtccaggcttgctttgaggggaatcctttcaagacagttccaggtccattcaagctcttttggcaatgcatgcgttcgaaacctggggaggagccaacggagccgtatacttacctgcagctggatcctcccaagagagcggaagtcaagctagagtaa

SEQ ID NO: 47085 - protein, 302 aa, Oryza sativa subsp
MVIVCSYHPVTPGQSAEEMPSIDVPNKENKDKDMFILHVIIQKVKPGESISVAGWKRIASEVVATILQALHMSETPLHFDFNSEIEEREIESFAELPVLYDEQLCFGDNCKHCGSPKNVDVSPSNTPHIFTIGLYWFGDCENQGVHSSAKYSLASMISYANGRYFCFARDQDKWLISDAETIEVDNLLMASAAAMWAPSVIVRLDCEEGGGWRRMSEGRPVPRRESPWGLPEGDKREPKAHRCNDRAEDVVQACFEGNPFKTVPGPFKLFWQCMRSKPGEEPTEPYTYLQLDPPKRAEVKLE

SEQ ID NO: 47086 - DNA, 972 bp, Oryza sativa subsp
  CDS (1)..(972)
atggtgattgtgtgttcttatcatccagtaactcctggccaatctgctgaggaaatgccaagtattgatgttcccaacaaagaaaacaaggacaaagacatgtttatcttgcatgtgatcatacagaaggttaaacctggtgaatcaatttcagttgcaggctggaaaagaattgcttctgaggttgtggcaacgattcttcaagcactgcatatgtcagaaactcctctgcattttgatttcaacagtgagattgaggaacgtgaaatcgaatcctttgcagagcttccggttctctatgatgaacagttgtgctttggggacaattgcaagcattgtggaagtccgaagaacgttgatgtttctccttcaaacacaccacatatctttacaataggtttatactggtttggtgattgtgaaaaccaggttcagctatctgaagttctagttggcattgcacatcccattgatatcaaacttctctgcaagggtgttcactcctcggcaaaatattctctggcctcaatgatctcctatgccaatgggcggtacttctgctttgctcgcgaccaggataagtggctcatctctgatgctgagactattgaggtagataacttgctcatggcctctgcagcagccatgtgggccccatctgtcattgtaaggttggactgtgaggagggaggtggttggaggaggatgagcgaggggaggccggtgccgaggagggagagcccatggggcttgccggagggggacaagcgggagcccaaggcgcaccgctgcaacgaccgcgccgaggacgtcgtccaggcttgctttgaggggaatcctttcaagacagttccaggtccattcaagctcttttggcaatgcatgcgttcgaaacctggggaggagccaacggagccgtatacttacctgcagctggatcctcccaagagagcggaagtcaagctagagtaa

SEQ ID NO: 47087 - protein, 323 aa, Oryza sativa subsp
MVIVCSYHPVTPGQSAEEMPSIDVPNKENKDKDMFILHVIIQKVKPGESISVAGWKRIASEVVATILQALHMSETPLHFDFNSEIEEREIESFAELPVLYDEQLCFGDNCKHCGSPKNVDVSPSNTPHIFTIGLYWFGDCENQVQLSEVLVGIAHPIDIKLLCKGVHSSAKYSLASMISYANGRYFCFARDQDKWLISDAETIEVDNLLMASAAAMWAPSVIVRLDCEEGGGWRRMSEGRPVPRRESPWGLPEGDKREPKAHRCNDRAEDVVQACFEGNPFKTVPGPFKLFWQCMRSKPGEEPTEPYTYLQLDPPKRAEVKLE

SEQ ID NO: 47088 - DNA, 261 bp, Vitis vinifera
  CDS (1)..(261)
  misc_feature (183)..(183): s is g or c
atgagtagtcgaccagtgccgaggagagagagcccatggggaacaccagagggagaacatcgtcaacccaaggcccatcgctgcaacgatcgcgccgaggatgttattcaagcttgttttgaaggaaacccatttaagacagtaccaggtcctttcaagctcttctggcagtgcatgcgttcsaaacctggggaggaaccaactgatccatttcactatctacaactagatcccccaaagcgagaagtgcagcttgagtaa

SEQ ID NO: 47089 - protein, 86 aa, Vitis vinifera
MSSRPVPRRESPWGTPEGEHRQPKAHRCNDRAEDVIQACFEGNPFKTVPGPFKLFWQCMRSKPGEEPTDPFHYLQLDPPKREVQLE

SEQ ID NO: 47090 - DNA, 267 bp, Oryza sativa
  CDS (1)..(267)
atgagcgaggggaggccggtgccgaggagggagagcccatggggcttgccggagggggacaagcgggagcccaaggcgcaccgctgcaacgaccgcgccgaggacgtcgtccaggcttgctttgaggggaatcctttcaagacagttccaggtccattcaagctcttttggcaatgcatgcgttcgaaacctggggaggagccaacggagccgtatacttacctgcagctggatcctcccaagagagcggaagtcaagctagagtaa

SEQ ID NO: 47091 - protein, 88 aa, Oryza sativa
MSEGRPVPRRESPWGLPEGDKREPKAHRCNDRAEDVVQACFEGNPFKTVPGPFKLFWQCMRSKPGEEPTEPYTYLQLDPPKRAEVKLE

SEQ ID NO: 47092 - DNA, 273 bp, Triticum aestivum
  CDS (1)..(273)
atgagcgagagcgagcagaggccggtgccgaggcgggagagcccgtggggcttgccggagggggacaagcgccagcccaaggcgcaccgctgcaacgaccgcatcgaggatgtcgtccaggctgcctttgaagggaatccattcaagacagttccaggcccattcaaggtcttttggcaatgcatgcgctcgaaacctggggaggaaccaactgtaccatttacttacctgcagctggatcctccgaagagggtagaggccaagctagagtaa

SEQ ID NO: 47093 - protein, 90 aa, Triticum aestivum
MSESEQRPVPRRESPWGLPEGDKRQPKAHRCNDRIEDVVQAAFEGNPFKTVPGPFKVFWQCMRSKPGEEPTVPFTYLQLDPPKRVEAKLE

SEQ ID NO: 47094 - DNA, 273 bp, Hordeum vulgare
  CDS (1)..(273)
atgagcgagagcgagcagaggccggtgccgaggcgggagagcccgtggggcttgccggagggggacaagcggcagcccaaggcgcaccgctgcaacgaccgcgtcgaggatgtcgtccaggctgcctttgaagggaacccgttcaagacagttccaggtccattcaaggtcttttggcaatgcatgcgctcgaaacctggggaggaaccaaccgtaccatttacttacctgcagctggatcctccgaagagggtggaggccaagctagattaa

SEQ ID NO: 47095 - protein, 90 aa, Hordeum vulgare
MSESEQRPVPRRESPWGLPEGDKRQPKAHRCNDRVEDVVQAAFEGNPFKTVPGPFKVFWQCMRSKPGEEPTVPFTYLQLDPPKRVEAKLD

SEQ ID NO: 47096 - DNA, 261 bp, Brassica napus
  CDS (1)..(261)
atgagcgagacgagaccagtgccgaggagagagagtccgtggggtttaccggaaggtcaccgtgagcccaaagctcaccgctgcaacgatcgcgtcgaggacgtcgtccaggcgtttttcgaggggaacccgtttaagacggttccaggaccttttaaactattctaccgatgcatgcgctctaagccaggagaggaaccaacagagccattcacgtacctcgacttggaacctccaaaaagagaagcaaaacttgagtaa

SEQ ID NO: 47097 - protein, 86 aa, Brassica napus
MSETRPVPRRESPWGLPEGHREPKAHRCNDRVEDVVQAFFEGNPFKTVPGPFKLFYRCMRSKPGEEPTEPFTYLDLEPPKREAKLE

SEQ ID NO: 47098 - DNA, 276 bp, Glycine max
  CDS (1)..(276)
atgagtagttcatcaaggccggtgccgaggagagagagtccatggggagtcaccggagagaatcatcctgaacccaaagctcaccgctgcaatgaccgtgtcgaggacgttattcaggcttgctttgagggaaacccattcaagactgttccgggacctttcaagctcttctggcagtgcatgcgttccaaacccggtgaggaaccaacagccccatttacttatctggatttggagcctctaaagagagaaacggaacctgtgaaacctgagtag

SEQ ID NO: 47099 - protein, 91 aa, Glycine max
MSSSSRPVPRRESPWGVTGENHPEPKAHRCNDRVEDVIQACFEGNPFKTVPGPFKLFWQCMRSKPGEEPTAPFTYLDLEPLKRETEPVKPE

SEQ ID NO: 47100 - DNA, 20 bp, Artificial sequence
  primer
atgagtagctcatcaaggcc

SEQ ID NO: 47101 - DNA, 22 bp, Artificial sequence
  primer
ctactcaggtttcacaggtttc

SEQ ID NO: 47102 - protein, 86 aa, Artificial sequence
  consensus sequence
  Variant (2)..(2): Xaa in position 2 is any amino acid
  Variant (3)..(3): Xaa in position 3 is any or no amino acid
  Variant (15)..(15): Xaa in position 15 is any amino acid
  Variant (19)..(19): Xaa in position 19 is any amino acid
  Variant (20)..(20): Xaa in position 20 is any or no amino acid
  Variant (22)..(22): Xaa in position 22 is any amino acid
  Variant (32)..(32): Xaa in position 32 is any amino acid
  Variant (36)..(36): Xaa in position 36 is any amino acid
  Variant (39)..(39): Xaa in position 39 is any amino acid
  Variant (69)..(69): Xaa in position 69 is any amino acid
  Variant (71)..(71): Xaa in position 71 is any amino acid
  Variant (75)..(75): Xaa in position 75 is any amino acid
  Variant (77)..(77): Xaa in position 77 is any amino acid
  Variant (82)..(82): Xaa in position 82 is any amino acid
  Variant (84)..(85): Xaa in position 84 to 85 is any amino acid
SXXRPVPRRESPWGXPEGXXRXPKAHRCNDRXEDVXQAXFEGNPFKTVPGPFKLFWQCMRSKPGEEPTXPXTYLXLXPPKRXEXXL

SEQ ID NO: 47103 - protein, 59 aa, Artificial sequence
  protein pattern
  Variant (10)..(10): Xaa in position 10 is Ala or Val
  Variant (14)..(14): Xaa in position 14 is Ile or Val
  Variant (17)..(17): Xaa in position 17 is any amino acid
  Variant (34)..(34): Xaa in position 34 is Trp or Tyr
  Variant (35)..(35): Xaa in position 35 is Gln or Arg
  Variant (47)..(47): Xaa in position 47 is Ala, Asp or Glu
  Variant (49)..(49): Xaa in position 49 is Phe or Tyr
  Variant (50)..(50): Xaa in position 50 is any amino acid
  Variant (53)..(53): Xaa in position 53 is Asp or Gln
  Variant (55)..(55): Xaa in position 55 is Asp or Glu
  Variant (57)..(57): Xaa in position 57 is Leu or Pro
  Variant (58)..(58): Xaa in position 58 is Lys or Arg
PKAHRCNDRXEDVXQAXFEGNPFKTVPGPFKLFXXCMRSKPGEEPTXPXXYLXLXPXXR

SEQ ID NO: 47104 - protein, 15 aa, Artificial sequence
  protein pattern
  Variant (12)..(12): Xaa in position 12 is any amino acid
RPVPRRESPWGXPEG

SEQ ID NO: 47105 - DNA, 696 bp, Glycine max
  CDS (1)..(696)
atggaccgcttgcgtcctaggaatcgagcggtcttttctggatttacaaatgccgagattgagaaaatggagaaattgttgagggaacctacgggggggtcattgggcagggaattttaccaaaaactggctcgaagtttcaactattcctctggccgtgctgggaagcctatcataaaatggacagagattgagagttggtttcagactaggctccaagactcatcactagtccctagcagtgagttgatggttcctaaatgcaaggaaggagaaactatgcaagacccatcagagttggaatttgaagcaagatcatcaaaagatggagcatggtatgatgttgaggcatttctagctcacagatttcttagcacaggggaagctgaagtccaagtcagatttgttggatttggagctgaggaagatgagtggatcaatatcaaaacttcagtacgtcaacgctctattcctttggaaagcacagagtgttccaacctgaaaattggagacccagtcctgtgcttccaggagaggagagatcaagcaatttactatgacgctcacattgtagagatccaaaagaggatgcatgatattagaggttgcagatgtctcctcttaattcattatgatcatgacaacagtgaggaaagagttcgcttgaggagactttgccgcagaccaagatcttaa

SEQ ID NO: 47106 - protein, 231 aa, Glycine max
MDRLRPRNRAVFSGFTNAEIEKMEKLLREPTGGSLGREFYQKLARSFNYSSGRAGKPIIKWTEIESWFQTRLQDSSLVPSSELMVPKCKEGETMQDPSELEFEARSSKDGAWYDVEAFLAHRFLSTGEAEVQVRFVGFGAEEDEWINIKTSVRQRSIPLESTECSNLKIGDPVLCFQERRDQAIYYDAHIVEIQKRMHDIRGCRCLLLIHYDHDNSEERVRLRRLCRRPRS

SEQ ID NO: 47107 - DNA, 1285 bp, Oryza sativa
  CDS (69)..(878)
gtctgcaagttgggaggagggcgtcttccccgttcttccggcggcggagacctcgccggcggcgagaaatggagcggcgatcgagcgttcgcttcgcgccatccgagattgcaaggatggagaagttggttacacataaaaaggaacaagtcttggatgaaattttctgccggaagctcgcagaagaatttaattgttctccaggccgagttggaagtaaagcactacaggctgtgcaggttcaagaatggttccgtcaaaagttccctgcatcaactgttatacctccttgtttgcctactggctctgaagaaaaggctttagcctcccaagcaagtgcacgggtttctgaagaaaagcctccatcatctgaagaaaatgctttagctgttgatacaagcatttcaaatgatataggcgaggtttcgccggatttacctatagacaacatagataagcttcctgaaattgaagacatgcagttcgaggctaggtcttcaaaggattttgcttggtatgatatcgccactttcttagcatacaggaagttaagttctggtgaatttgaagtccgagtgagatttcaaggatttggggctgaagaggatgaatggatcaatgtccggaaggctatccgcctgcaatccatcccgttggaatcatcagaatgcaaactcatcagggaaggagaccttgtcctctgtttcaaggagagcaatgatgaagcattgcatttcgatgcgcatgttctggaaatccagcggaaacaacatgatataagggggtgcagatgtgtcttccttgtcgaatacgaccatgatggaacccaggagagggtgaacctgagaagattgtcccggcggccaaagcactcctgatggcttgtgtcaaactgtcaaatacacatctgcctcttgcctcttgccgtatgcgctaatgctgaactaacaggaactccgaacctagttaggggctaaactttttgcttggttcagaactcattgatgagtacagtaacccccccccccccccggtgatggtacatttcaaccctctttggcaaattccgaacctagttaggggctgttcgtggggctgcttgatggccaaattttgtgcagtaatttgggaggaaaagagggggattagtcaagactgaactgaagagcatattacctccaagaactaacaggattggactttttaaatgcgttgtgttgggtgtgagattccacatttccatggaaaattcgtaatgctcagcgttctcggcttgggtgatttt

SEQ ID NO: 47108 - protein, 269 aa, Oryza sativa
MERRSSVRFAPSEIARMEKLVTHKKEQVLDEIFCRKLAEEFNCSPGRVGSKALQAVQVQEWFRQKFPASTVIPPCLPTGSEEKALASQASARVSEEKPPSSEENALAVDTSISNDIGEVSPDLPIDNIDKLPEIEDMQFEARSSKDFAWYDIATFLAYRKLSSGEFEVRVRFQGFGAEEDEWINVRKAIRLQSIPLESSECKLIREGDLVLCFKESNDEALHFDAHVLEIQRKQHDIRGCRCVFLVEYDHDGTQERVNLRRLSRRPKHS

SEQ ID NO: 47109 - DNA, 1202 bp, Zea mays
  CDS (75)..(884)
ggaccctcgagtccggcggggccgtccccctctcaaactctaatactgtcccctcggcctcccgccggtgagcgatggagcggcggtcctccgtccgctttgtgccatccgagattgcaaggatggagaaattggctgcagatagaaaagaccaagtctttgataacaagttctgccagaagctcgcagaagaatttaatcgttctgttggccgtgctggaagtaaagcgttacaagctacacaggttcaaggatggtttcttaataagtttccagcatcagccactaaacctacttgtgtgcccactgcttcccaagaaaagacttcagcctcagaaataaatgtatcagtttctgaaaaaagatctgcagcttccgaagagaaacttttccctcttgatacaggtgtttcaaataatgaggatgaggtttctcctgtttttccattagaaactaaagatatgattcctgaacttgaagacctggagtttgaggccaagtctacaaaggattttgcctggtatgacattgccctattcttggcacacaggaggaacagggcgggtgaagtagaagtccgggtgagattcgagggttttggggcggatgaggatgagtgggtgaatgtcaagaagttcatccgccagcgttccattcctctggagtcctcacagtgcaaaagcgttgttgaaggtgaccttgttctctgcttcagggagggaaacgaggaggcattgcatttcgatgcacatgttcttgaggttcagcggaagcagcatgatattagtgggtgcagatgtgtattccttgttgaatacgatcatgaccaaagccaggagagggttagcctgagaagattgtcccggcggccaaagtacttttgaaggctgctcctgttagcctgatgggcatatctattctggaactggaactaaccggagcgtgaaacttaggtgaagttagtttgtggcgtccttggtcatgtgtgtattagcaaccggcggcagcaagcatgggcttgcatctcaacccctttggcacaggactggctgactgaattttataaactcgttatcgtgcagaagagggaagagtacgcggcttgagcacttagggtgtcacttaggatgtgtttggttcgtgaagtcaccttatgcttcatgaggtgtatcatgaattcatcctatattttttgtggcatc

SEQ ID NO: 47110 - protein, 269 aa, Zea mays
MERRSSVRFVPSEIARMEKLAADRKDQVFDNKFCQKLAEEFNRSVGRAGSKALQATQVQGWFLNKFPASATKPTCVPTASQEKTSASEINVSVSEKRSAASEEKLFPLDTGVSNNEDEVSPVFPLETKDMIPELEDLEFEAKSTKDFAWYDIALFLAHRRNRAGEVEVRVRFEGFGADEDEWVNVKKFIRQRSIPLESSQCKSVVEGDLVLCFREGNEEALHFDAHVLEVQRKQHDISGCRCVFLVEYDHDQSQERVSLRRLSRRPKYF

SEQ ID NO: 47111 - DNA, 759 bp, Arabidopsis thaliana
  CDS (1)..(759)
atggctgcttccgatgattcctctcactatttcaccgagtttaccttgtctgagattgtagacatggagaatctgtataaggagctcggtgaccaatctctccacaaagatttctgtcaaactgttgcctctacttttagttgttctgtgaatcggaatggcaaatcctctataacctggaaacaggtacagatttggttccaggagaagctgaagcatcaaagccaaccaaaatccaaaactttgccatctccccctttgcagattcatgacttatctaatcccagttcttatgcttcaaatgcctcaaatgctacctttgttgggaattctacctttgttcaaacacgaaaaggcaaggcctctgatttagctgatctggcttttgaggctaaatcagcgcgggactacgcgtggtatgacgtgtcttcgttccttacttatagagttcttcgcactggtgaactggaagtgcgtgtacggttttctgggttcgacaaccgacacgatgagtgggtaaacgtcaaaacatcagtgcgtgagcggtctattcctgtagaaccatcagagtgtgggagagtgaacgttggagacctgcttctatgtttccaagaaagagaggatcaagcactctactgtgatggtcatgttttgaatatcaagagagggattcatgatcacgcgagatgtaactgcgtgtttcttgttcgctacgagcttgacaatacagagtgtatgttcaggaatcgctgggactag

SEQ ID NO: 47112 - protein, 252 aa, Arabidopsis thaliana
MAASDDSSHYFTEFTLSEIVDMENLYKELGDQSLHKDFCQTVASTFSCSVNRNGKSSITWKQVQIWFQEKLKHQSQPKSKTLPSPPLQIHDLSNPSSYASNASNATFVGNSTFVQTRKGKASDLADLAFEAKSARDYAWYDVSSFLTYRVLRTGELEVRVRFSGFDNRHDEWVNVKTSVRERSIPVEPSECGRVNVGDLLLCFQEREDQALYCDGHVLNIKRGIHDHARCNCVFLVRYELDNTECMFRNRWD

SEQ ID NO: 47113 - DNA, 1047 bp, Arabidopsis thaliana
  CDS (1)..(1047)
atgggtcgacctcccagtaatggcggtccggcgtttcgatttatcctgcctgaggtaacggagatggaagcaattttgctacagcataatacagcaatgccaggtcgacatattcttgaagctcttgctgataagtttagtgaatcacctgagcggaaggggaaagttgttgtgcagttcaagcaaatctggaactggtttcaaaataggcgatatgctttacgagcaaggggaaacaaagctcctgggaagctaaatgtatcttccatgccgcgtatggatttaccaaatcagatgagaagtgtgattcaaccattatcagttcctaaaaccactcatatgactggaaatttacccggcatgacgcctgccccttctggtagtttagttcccggtgtcatgaggagtggttcagacaactcttacttggaatttgaagccaaatctgccagggatggtgcatggtatgatgtgcaagctttcctagctcatagaaacttggagattggtgatccggaagtgcaggttcgatttgcgggtttcgaagttgaagaagatgaatggataaatgtcaaaaagcatgtaagacaacggtctctcccatgtgaagcatcagaatgtgttgcagttcttgctggagatctcgtcctttgtttccaggaaggaaaagatcaagctctttactttgacgccattgttcttgacgcacagagaagaagacatgatgtcagaggttgtcgttgtaggttcttggtgcgttacagccacgaccagtccgaggaaatcgttcccttgaggaagatttgtcggcggcccgagacagattacaggctacaacaacttcacaacgccgtaaacgatttggctaactcaaatcagcatcagatacccgctctagatgcggctgcaaaaacccctctgtcactacccggagctacagttcccattgttgcacccgagtcaaaagatccgagcctgagtgccactccagccactttggttcagcctagctccaatgcagctactgttcccgctggttcagcctag

SEQ ID NO: 47114 - protein, 348 aa, Arabidopsis thaliana
MGRPPSNGGPAFRFILPEVTEMEAILLQHNTAMPGRHILEALADKFSESPERKGKVVVQFKQIWNWFQNRRYALRARGNKAPGKLNVSSMPRMDLPNQMRSVIQPLSVPKTTHMTGNLPGMTPAPSGSLVPGVMRSGSDNSYLEFEAKSARDGAWYDVQAFLAHRNLEIGDPEVQVRFAGFEVEEDEWINVKKHVRQRSLPCEASECVAVLAGDLVLCFQEGKDQALYFDAIVLDAQRRRHDVRGCRCRFLVRYSHDQSEEIVPLRKICRRPETDYRLQQLHNAVNDLANSNQHQIPALDAAAKTPLSLPGATVPIVAPESKDPSLSATPATLVQPSSNAATVPAGSA

SEQ ID NO: 47115 - DNA, 696 bp, Arabidopsis thaliana
  CDS (1)..(696)
atggagaatctgtataaggagctcggtgaccaatctctccacaaagatttctgtcaaactgttgcctctacttttagttgttctgtgaatcggaatggcaaatcctctataacctggaaacaggtacagatttggttccaggagaagctgaagcatcaaagccaaccaaaatccaaaactttgccatctccccctttgcagattcatgacttatctaatcccagttcttatgcttcaaatgcctcaaatgctacctttgttgggaattctacctttgttcaaacacgaaaaggcaaggcctctgatttagctgatctggcttttgaggctaaatcagcgcgggactacgcgtggtatgacgtgtcttcgttccttacttatagagttcttcgcactggtgaactggaagtgcgtgtacggttttctgggttcgacaaccgacacgatgagtgggtaaacgtcaaaacatcagtgcgtgagcggtctattcctgtagaaccatcagagtgtgggagagtgaacgttggagacctgcttctatgtttccaagaaagagaggatcaagcactctactgtgatggtcatgttttgaatatcaagagagggattcatgatcacgcgagatgtaactgcgtgtttcttgttcgctacgagcttgacaatacagagtgtatgttcaggaatcgctgggactag

SEQ ID NO: 47116 - protein, 231 aa, Arabidopsis thaliana
MENLYKELGDQSLHKDFCQTVASTFSCSVNRNGKSSITWKQVQIWFQEKLKHQSQPKSKTLPSPPLQIHDLSNPSSYASNASNATFVGNSTFVQTRKGKASDLADLAFEAKSARDYAWYDVSSFLTYRVLRTGELEVRVRFSGFDNRHDEWVNVKTSVRERSIPVEPSECGRVNVGDLLLCFQEREDQALYCDGHVLNIKRGIHDHARCNCVFLVRYELDNTECMFRNRWD

SEQ ID NO: 47117 - DNA, 777 bp, Arabidopsis thaliana
  CDS (1)..(777)
atggctgcttccgatgattcctctcactatttcaccgagtttaccttgtctgagattgtagacatggagaatctgtataaggagctcggtgaccaatctctccacaaagatttctgtcaaactgttgcctctacttttagttgttctgtgaatcggaatggcaaatcctctataacctggaaacaggtacagatttggttccaggagaagctgaagcatcaaagccaaccaaaatccaaaactttgccatctccccctttgcagattcatgacttatctaatcccagttcttatgcttcaaatgcctcaaatgctacctttgttgggaattctacctttgttcaaacacgaaaaggcaaggcctctgatttagctgatctggcttttgaggctaaatcagcgcgggactacgcgtggtatgacgtgtcttcgttccttacttatagagttcttcgcactggtgaactggaagtgcgtgtacggttttctgggttcgacaaccgacacgatgagtgggtaaacgtcaaaacatcagtgcgtgagcggtctattcctgtagaaccatcagagtgtgggagagtgaacgttggagacctgcttctatgtttccaagaaagagaggatcaagcactctactgtgatggtcatgttttgaatatcaagagagggattcatgatcacgcgagatgtaactgcgtgtttcttgttcgctacgagcttgacaatacagaggaatcgctgggactagaaagaatttgccgccgccctgaagagtaa

SEQ ID NO: 47118 - protein, 258 aa, Arabidopsis thaliana
MAASDDSSHYFTEFTLSEIVDMENLYKELGDQSLHKDFCQTVASTFSCSVNRNGKSSITWKQVQIWFQEKLKHQSQPKSKTLPSPPLQIHDLSNPSSYASNASNATFVGNSTFVQTRKGKASDLADLAFEAKSARDYAWYDVSSFLTYRVLRTGELEVRVRFSGFDNRHDEWVNVKTSVRERSIPVEPSECGRVNVGDLLLCFQEREDQALYCDGHVLNIKRGIHDHARCNCVFLVRYELDNTEESLGLERICRRPEE

SEQ ID NO: 47119 - DNA, 1050 bp, Arabidopsis thaliana
  CDS (1)..(1050)
atgggtcgacctcccagtaatggcggtccggcgtttcgatttatcctgcctgaggtaacggagatggaagcaattttgctacagcataatacagcaatgccaggtcgacatattcttgaagctcttgctgataagtttagtgaatcacctgagcggaaggggaaagttgttgtgcagttcaagcaaatctggaactggtttcaaaataggcgatatgctttacgagcaaggggaaacaaagctcctgggaagctaaatgtatcttccatgccgcgtatggatttaccaaatcagatgagaagtgtgattcaaccattatcagttcctaaaaccactcatatgactggaaatttacccggcatgacgcctgccccttctggtagtttagttcccggtgtcatgaggagtggttcagacaactcttacttggaatttgaagccaaatctgccagggatggtgcatggtatgatgtgcaagctttcctagctcatagaaacttggagattggtgatccggaagtgcaggttcgatttgcgggtttcgaagttgaagaagatgaatggataaatgtcaaaaagcatgtaagacaacggtctctcccatgtgaagcatcagaatgtgttgcagttcttgctggagatctcgtcctttgtttccaggaaggaaaagatcaagctctttactttgacgccattgttcttgacgcacagagaagaagacatgatgtcagaggttgtcgttgtaggttcttggtgcgttacagccacgaccagtccgagcaggaaatcgttcccttgaggaagatttgtcggcggcccgagacagattacaggctacaacaacttcacaacgccgtaaacgatttggctaactcaaatcagcatcagatacccgctctagatgcggctgcaaaaacccctctgtcactacccggagctacagttcccattgttgcacccgagtcaaaagatccgagcctgagtgccactccagccactttggttcagcctagctccaatgcagctactgttcccgctggttcagcctag

SEQ ID NO: 47120 - protein, 349 aa, Arabidopsis thaliana
MGRPPSNGGPAFRFILPEVTEMEAILLQHNTAMPGRHILEALADKFSESPERKGKVVVQFKQIWNWFQNRRYALRARGNKAPGKLNVSSMPRMDLPNQMRSVIQPLSVPKTTHMTGNLPGMTPAPSGSLVPGVMRSGSDNSYLEFEAKSARDGAWYDVQAFLAHRNLEIGDPEVQVRFAGFEVEEDEWINVKKHVRQRSLPCEASECVAVLAGDLVLCFQEGKDQALYFDAIVLDAQRRRHDVRGCRCRFLVRYSHDQSEQEIVPLRKICRRPETDYRLQQLHNAVNDLANSNQHQIPALDAAAKTPLSLPGATVPIVAPESKDPSLSATPATLVQPSSNAATVPAGSA

SEQ ID NO: 47121 - DNA, 843 bp, Oryza sativa subsp
  CDS (1)..(843)
atggggcggccaccaacgccaagcacggggggcccgggtttccggttcacgcaggaggaggtggccgagatggagtcgctcctgcggcatctcaacaacggcatcccggacggctccttgatccagtccctcgccgacaggttcaccgcctccgccgcgcgcgccggcaaggtcggcgtccggtccaagcagaaccggaagtactcgcagcgctctaggaactcgaccaagatgctactggcggcgtccggcgaccacaagtcggccttcgcgcgctcctcagttcaaaaatcagtaaagaattctttggagggtggccagctcgagtttgaggcaaagtccgttagagatggtgcatggtatgatgttgctgccttcctttcccatagattgtcccagtctggtgaactgaatatcatcagtaccggcactaccattgggatgattggggcgctggaagtatgggttcgattttctggatttggagctagggacgacgaatggattgatgtccgtacatgtgtgcggcaacgttctcatccatgtgtgtcaaccgaatgtgccgctgttcttcctggggaccaaattctttgcttccaggaaggcaaacatcaggctctgtattttgatgctcatgtccttgatgctcaaaagcgtaggcatgatgcaagaggttgtcgttgcagatttcttgtttgctatgatcatgatgactctgaggaaattgttccactgaggaagatgtgtcgtcggccagaaactgactacagacttgagattctacatgctgctggagcagcaaatgctgctaaagaggctgtggttgattcggtgattgcttag

SEQ ID NO: 47122 - protein, 280 aa, Oryza sativa subsp
MGRPPTPSTGGPGFRFTQEEVAEMESLLRHLNNGIPDGSLIQSLADRFTASAARAGKVGVRSKQNRKYSQRSRNSTKMLLAASGDHKSAFARSSVQKSVKNSLEGGQLEFEAKSVRDGAWYDVAAFLSHRLSQSGELNIISTGTTIGMIGALEVWVRFSGFGARDDEWIDVRTCVRQRSHPCVSTECAAVLPGDQILCFQEGKHQALYFDAHVLDAQKRRHDARGCRCRFLVCYDHDDSEEIVPLRKMCRRPETDYRLEILHAAGAANAAKEAVVDSVIA

SEQ ID NO: 47123 - DNA, 1041 bp, Oryza sativa subsp
  CDS (1)..(1041)
atggaggcccgcctgcagcagctcaacaacgccatcccgcaccgctccgtcatccaggccctcgccgacaagttcacctcctcccccgcccgctccggcaaggtcgccgtccagcccaagcagggaagggttctttggagagcggccaggttgaatttgaagcaaagtcggctagagatggcgcatgtaaaattcaaaaatagcatggacaacagtaaacctccagatgcacctgtgttattggttaacattccgctgcggccattgattgctctggtcagcacaccagtgatgctccagccaccacttcggcaactacccaagaaggaacatcaggcctcctggtatgatgttgctgccttcctgtctcatcggttgttcgaatctggtgatccagaagtacgagttcgcttttctggatttggagccgaggaagatgaatggataaatgtccgtaaatgtgtgcggcaacgttctcttccgtgtgaatcaactgaatgtgttgctgttcttcctggagacctcatactttgctttcaggaaggcaaagagcaggctctgtatttcgatgctcgtgtccttgatgctcaaaggcgtagacatgatgtacgagggtgtcgctgtagatttcttgttcgctacgatcatgatcactctgaggaaattgttccactgaggaaggtatgtcgccgaccagaaactgactacaggcttcagattctgcatgctgctagagcagcaggtatggctaaagaggctgtggttgatttggtgtcgcacaatgataagagctcagcagagcagaaacccccaaagcagcacaagatgatggatgtgaacactgatgaggtaaccatggtttctaaccaagaccaagaagagccaacaggcaagcctgctgctaccttgccagcagcaccggtcaaaaccctgaatgattcagcttcagcttcagcttcagatgtccaaatgggcgaggcacaggctgctccaaaagttgaatcttctgatgaagtagaagacaagatgaaagagggatag

SEQ ID NO: 47124 - protein, 346 aa, Oryza sativa subsp
MEARLQQLNNAIPHRSVIQALADKFTSSPARSGKVAVQPKQGRVLWRAARLNLKQSRLEMAHVKFKNSMDNSKPPDAPVLLVNIPLRPLIALVSTPVMLQPPLRQLPKKEHQASWYDVAAFLSHRLFESGDPEVRVRFSGFGAEEDEWINVRKCVRQRSLPCESTECVAVLPGDLILCFQEGKEQALYFDARVLDAQRRRHDVRGCRCRFLVRYDHDHSEEIVPLRKVCRRPETDYRLQILHAARAAGMAKEAVVDLVSHNDKSSAEQKPPKQHKMMDVNTDEVTMVSNQDQEEPTGKPAATLPAAPVKTLNDSASASASDVQMGEAQAAPKVESSDEVEDKMKEG

SEQ ID NO: 47125 - DNA, 774 bp, Oryza sativa subsp
  CDS (1)..(774)
atggagaagttggttacacataaaaaggaacaagtcttggatgaaattttctgccggaagctcgcagaagaatttaattgttctccaggccgagttggaagtaaagcactacaggctgtgcaggttcaagaatggttccgtcaaaagttccctgcatcaactgttatacctccttgtttgcctactggctctgaagaaaaggctttagcctcccaagcaagtgcaccggtttctgaagaaaagcctccatcatctgaagaaaatgctttagctgttgatacaagcatttcaaatgatataggcgaggtttcgccggatttacctataggagtacttagagacataattcccatcaatgggaaggtttgccatgacaaatcacttgctcctttcctgattatgctagtttggtatgatatcgccactttcttagcatacaggaagttaagttctggtgaatttgaagtccgagtgagatttcaaggatttggggctgaagaggatgaatggatcaatgtccggaaggctatccgcctgcaatccatcccgttggaatcatcagaatgcaaactcatcagggaaggagaccttgtcctctgtttcaaggagagcaatgatgaagcattgcatttcgatgcgcatgttctggaaatccagcggaaacaacacgatataagggggtgcagatgtgtcttccttgtcgaatacgaccatgatggaacccaggagagggtgaacctgagaagattgtcccggcggccaaagcactcctga

SEQ ID NO: 47126 - protein, 257 aa, Oryza sativa subsp
MEKLVTHKKEQVLDEIFCRKLAEEFNCSPGRVGSKALQAVQVQEWFRQKFPASTVIPPCLPTGSEEKALASQASAPVSEEKPPSSEENALAVDTSISNDIGEVSPDLPIGVLRDIIPINGKVCHDKSLAPFLIMLVWYDIATFLAYRKLSSGEFEVRVRFQGFGAEEDEWINVRKAIRLQSIPLESSECKLIREGDLVLCFKESNDEALHFDAHVLEIQRKQHDIRGCRCVFLVEYDHDGTQERVNLRRLSRRPKHS

SEQ ID NO: 47127 - DNA, 1068 bp, Oryza sativa subsp
  CDS (1)..(1068)
atggggcggccaccaatgccaagcacggggggcccgggtttccggttcacgcaggaggaggtggccgagatggagtcgctcctgcggcatctcaacaacggcatcccggacggctccttgatccagtccctcgccgacaggttcaccgcctccgccgcgcgcgccggcaaggtcggcgtccggtccaagcaggtgtggtactggttccagaaccggaagtactcgcagcgctctaggaactcgaccaagatgctaccggcggcgtctggcgaccacaagtcggccttcgctcgctcctcagttcaaaaatcagtaaagaattctttggagggtggccagctcgagtttgaggcaaagtccgttagagatggtgcatggtatgatgttgctgccttcctttcccatagattgtcccagtctggtgaactgaatatcaccagtaccggcactaccattgggatgattggggcactgaagtacaacagaacaacaacacaactaaatggagtcactgccaacgccatcgttgatctccctcgcagccgttgtcaccctcaaactgcacatgccatccgaccattaaggagagggggaggccgacaccactcattggaccatgtggttgtcgcccctgtccttaaggcggctggatctggtggcctagccatcgggaagaaacaggaagtatgggttcgattttctggatttggagctagggacgacgaatggattgatgtccgtacatgtgtgcggcaacgttctcatccatgtgtgtcaaccgaatgtgccgctgttcttcctggggaccaaattctttgcttccaggaaggcaaacatcaggctctgtattttgatgctcatgtccttgatgctcaaaagcgtaggcatgatgcaagaggttgtcgttgcagatttcttgtttgctatgatcatgatgactctgaggaaattgttccactgaggaagatgtgtcgtcggccagaaactgactacagacttgagattctacatgctgctggagcagcaaatgctgctaaagaggctgtggttgattcggtgattgcttag

SEQ ID NO: 47128 - protein, 355 aa, Oryza sativa subsp
MGRPPMPSTGGPGFRFTQEEVAEMESLLRHLNNGIPDGSLIQSLADRFTASAARAGKVGVRSKQVWYWFQNRKYSQRSRNSTKMLPAASGDHKSAFARSSVQKSVKNSLEGGQLEFEAKSVRDGAWYDVAAFLSHRLSQSGELNITSTGTTIGMIGALKYNRTTTQLNGVTANAIVDLPRSRCHPQTAHAIRPLRRGGGRHHSLDHVVVAPVLKAAGSGGLAIGKKQEVWVRFSGFGARDDEWIDVRTCVRQRSHPCVSTECAAVLPGDQILCFQEGKHQALYFDAHVLDAQKRRHDARGCRCRFLVCYDHDDSEEIVPLRKMCRRPETDYRLEILHAAGAANAAKEAVVDSVIA

SEQ ID NO: 47129 - DNA, 1032 bp, Medicago truncatula
  CDS (1)..(1032)
atgccagcacgagatgttcttcaagcacttgcagacaagtttagtgaatcacccgaccgtaaaggcaagattacagtacagatgaaacaggtatggaattggtttcaaaataagcgatatgctataagggctaaatctagtaagactcctgcaaagttaaatatcacgcccatgcctcggactgatttgaccccaggaaggataatgactcaaccaacagcttctcctattcctgctccttcagcgtcagttcaaacaacagcaaaggcagctcctgaaaattcagttatggaatttgaagctaaatctggaagagatggagcatggtatgatgtggctacctttctatcatacagacatttggagagcagtgatccggaagtgctggtgcgttttgctggttttggatccgaggaagatgagtggattaacgtgcgaaaaaatgtcaggccgcgctctctgccatgtgaatcatcagaatgtgtcgcagtgctccctggtgatctcatactttgttttcaggagggtaaagagcaagccctttactttgatgcccatgtccttgatgctcaaagacggaggcatgatgtaagaggttgtcgctgtagatttttggttcgctatgatcacgatcaatctgaggaaatcgtgccgcttaggaagatttgtcggagacctgaaactgattacagattacatcaacttcatgctgtgaatgatgcagcacccacagatcagcagaagattgcgttggatcatccagcaaatgttcatggcgcgagggttactaatccttctgaaatggtgcaaaagcagcagcagattgcaaatattcatatagtaacacctgttttgcaaacaaatgtttctataccaccacaaagtatgaatgtggatccaatgaaagctgaaacaaaagctgatgttcaagctggaaattctgtcactccaagctctgccgcattcactggaatcattgccactagcagtgttcctgaagtctctactcagaacctggctgaagggaagtaa

SEQ ID NO: 47130 - protein, 343 aa, Medicago truncatula
MPARDVLQALADKFSESPDRKGKITVQMKQVWNWFQNKRYAIRAKSSKTPAKLNITPMPRTDLTPGRIMTQPTASPIPAPSASVQTTAKAAPENSVMEFEAKSGRDGAWYDVATFLSYRHLESSDPEVLVRFAGFGSEEDEWINVRKNVRPRSLPCESSECVAVLPGDLILCFQEGKEQALYFDAHVLDAQRRRHDVRGCRCRFLVRYDHDQSEEIVPLRKICRRPETDYRLHQLHAVNDAAPTDQQKIALDHPANVHGARVTNPSEMVQKQQQIANIHIVTPVLQTNVSIPPQSMNVDPMKAETKADVQAGNSVTPSSAAFTGIIATSSVPEVSTQNLAEGK

SEQ ID NO: 47131 - DNA, 801 bp, Vitis vinifera
  CDS (1)..(801)
atggatgatgcccctgttcctattgcttgttttacacaatctgagatcttggaaatggagaatttatttgaggaatttggagaagaaacgctaggccaggaattctgccaagatcttgccaccagctttagtgcctcaccaggttgttctgggaatatgtccgtaggatggaaagaggtgcgagattggttccaaactaagcaaaaagagttggttgctagagtcacttcctcacctgttgctcccagaggaatcgatgctcttccagaagcacccatgtcaaacaatgcacctcaaaattctatagttccaagaggggacatggttgcagcagatctttcagagttgacgtatgaggctaaatcatcaaaagatgatgcatggtacgacgttgctgcattcctcacctacagagttcttagctctggtgaacttgaagctcgtgtaagattttctggatttggcaatgaggaggacgagtgggtgaatgtcaaaaagggaatacgaaagcggtcgattcctctagagccttcagagtgttacagggtcagagttggagatctggtgttatgcttccaggaaagatcagatcaagcagtctactgtgatgcccacattatagaaatccaaaggaggttacatgacattaagggctgcaggtgcatcttcgtggttcgctatgatcatgaccatggcgagaattcagttcttttcaggttgttacagttatttgggaactacgatctgtgccaagaaaagaacaaaaaatggtcatgtttgtcacattcagaagccacctaa

SEQ ID NO: 47132 - protein, 266 aa, Vitis vinifera
MDDAPVPIACFTQSEILEMENLFEEFGEETLGQEFCQDLATSFSASPGCSGNMSVGWKEVRDWFQTKQKELVARVTSSPVAPRGIDALPEAPMSNNAPQNSIVPRGDMVAADLSELTYEAKSSKDDAWYDVAAFLTYRVLSSGELEARVRFSGFGNEEDEWVNVKKGIRKRSIPLEPSECYRVRVGDLVLCFQERSDQAVYCDAHIIEIQRRLHDIKGCRCIFVVRYDHDHGENSVLFRLLQLFGNYDLCQEKNKKWSCLSHSEAT

SEQ ID NO: 47133 - DNA, 972 bp, Arabidopsis thaliana
  CDS (1)..(972)
atgaaggtaacggagatggaagcaattttgctacagcataatacagcaatgccaggtcgacatattcttgaagctcttgctgataagtttagtgaatcacctgagcggaaggggaaagttgttgtgcagttcaagcgatatgctttacgagcaaggggaaacaaagctcctgggaagctaaatgtatcttccatgccgcgtatggatttaccaaatcagatgagaagtgtgattcaaccattatcagttcctaaaaccactcatatgactggaaatttacccggcatgacgcctgccccttctggtagtttagttcccggtgtcatgaggagtggttcagacaactcttacttggaatttgaagccaaatctgccagggatggtgcatggtatgatgtgcaagctttcctagctcatagaaacttggagattggtgatccggaagtgcaggttcgatttgcgggtttcgaagttgaagaagatgaatggataaatgtcaaaaagcatgtaagacaacggtctctcccatgtgaagcatcagaatgtgttgcagttcttgctggagatctcgtcctttgtttccaggaaggaaaagatcaagctctttactttgacgccattgttcttgacgcacagagaagaagacatgatgtcagaggttgtcgttgtaggttcttggtgcgttacagccacgaccagtccgaggaaatcgttcccttgaggaagatttgtcggcggcccgagacagattacaggctacaacaacttcacaacgccgtaaacgatttggctaactcaaatcagcatcagatacccgctctagatgcggctgcaaaaacccctctgtcactacccggagctacagttcccattgttgcacccgagtcaaaagatccgagcctgagtgccactccagccactttggttcagcctagctccaatgcagctactgttcccgctggttcagcctag

SEQ ID NO: 47134 - protein, 323 aa, Arabidopsis thaliana
MKVTEMEAILLQHNTAMPGRHILEALADKFSESPERKGKVVVQFKRYALRARGNKAPGKLNVSSMPRMDLPNQMRSVIQPLSVPKTTHMTGNLPGMTPAPSGSLVPGVMRSGSDNSYLEFEAKSARDGAWYDVQAFLAHRNLEIGDPEVQVRFAGFEVEEDEWINVKKHVRQRSLPCEASECVAVLAGDLVLCFQEGKDQALYFDAIVLDAQRRRHDVRGCRCRFLVRYSHDQSEEIVPLRKICRRPETDYRLQQLHNAVNDLANSNQHQIPALDAAAKTPLSLPGATVPIVAPESKDPSLSATPATLVQPSSNAATVPAGSA

SEQ ID NO: 47135 - DNA, 1113 bp, Oryza sativa
  CDS (1)..(1113)
atggggcggccgccgagcacggggggcccggcgttccggttcacccaggcggaggtggccgagatggaggcccgcctgcagcagctcaacaacgccatcccgcaccgctccgtcatccaggccctcgccgacaagttcacctcctcccccgcccgctccggcaaggtcgccgtccagcccaagcaggtgtggaactggttccagaaccggaggtactcgcaccgctccaggagctccaggggccccccgacgctgatgcagaccaagatgctgcccacggggtccgacgagcacaagtcgcctcccttcagggctatgccctctgcctctgcgcactccggctcgccctcagggaagggttctttggagagcggccaggttgaatttgaagcaaagtcggctagagatggcgcatggtatgatgttgctgccttcctgtctcatcggttgttcgaatctggtgatccagaagtacgagttcgcttttctggatttggagccgaggaagatgaatggataaatgtccgtaaatgtgtgcggcaacgttctcttccgtgtgaatcaactgaatgtgttgctgttcttcctggagacctcatactttgctttcaggaaggcaaagagcaggctctgtatttcgatgcttgtgtccttgatgctcaaaggcgtagacatgatgtacgagggtgtcgctgtagatttcttgttcgctacgatcatgatcactctgaggaaattgttccactgaggaaggtatgtcgccgaccagaaactgactacaggcttcagattctgcatgctgctagagcagcaggtatggctaaagaggctgtggttgatttggtgtcgcacaatgataagagctcagcggagcagaaacccccaaagcagcacaaaatgatggatgtgaacactgatgaggtaaccatggtttctaaccaagaccaagaagagccaacaggcaagcctgctgctaccttgccagcagcaccggtcaaaaccctgaatgattcagcttcagcttcagcttcagatgtccaaatgggcgaggcacaggctgctccaaaagttgaatcttctgatgaagtagaagacaagatgaaagagggatag

SEQ ID NO: 47136 - protein, 370 aa, Oryza sativa
MGRPPSTGGPAFRFTQAEVAEMEARLQQLNNAIPHRSVIQALADKFTSSPARSGKVAVQPKQVWNWFQNRRYSHRSRSSRGPPTLMQTKMLPTGSDEHKSPPFRAMPSASAHSGSPSGKGSLESGQVEFEAKSARDGAWYDVAAFLSHRLFESGDPEVRVRFSGFGAEEDEWINVRKCVRQRSLPCESTECVAVLPGDLILCFQEGKEQALYFDACVLDAQRRRHDVRGCRCRFLVRYDHDHSEEIVPLRKVCRRPETDYRLQILHAARAAGMAKEAVVDLVSHNDKSSAEQKPPKQHKMMDVNTDEVTMVSNQDQEEPTGKPAATLPAAPVKTLNDSASASASDVQMGEAQAAPKVESSDEVEDKMKEG

SEQ ID NO: 47137 - DNA, 810 bp, Oryza sativa
  CDS (1)..(810)
atggagcggcgatcgagcgttcgcttcgcgccatccgagattgcaaggatggagaagttggttacacataaaaaggaacaagtcttggatgaaattttctgccggaagctcgcagaagaatttaattgttctccaggccgagttggaagtaaagcactacaggctgtgcaggttcaagaatggttccgtcaaaagttccctgcatcaactgttatacctccttgtttgcctactggctctgaagaaaaggctttagcctcccaagcaagtgcaccggtttctgaagaaaagcctccatcatctgaagaaaatgctttagctgttgatacaagcatttcaaatgatataggcgaggtttcgccggatttacctatagacaacatagataagcttcctgaaattgaagacatgcagttcgaggctaggtcttcaaaggattttgcttggtatgatatcgccactttcttagcatacaggaagttaagttctggtgaatttgaagtccgagtgagatttcaaggatttggggctgaagaggatgaatggatcaatgtccggaaggctatccgcctgcaatccatcccgttggaatcatcagaatgcaaactcatcagggaaggagaccttgtcctctgtttcaaggagagcaatgatgaagcattgcatttcgatgcgcatgttctggaaatccagcggaaacaacatgatataagggggtgcagatgtgtcttccttgtcgaatacgaccatgatggaacccaggagagggtgaacctgagaagattgtcccggcggccaaagcactcctga

SEQ ID NO: 47138 - protein, 269 aa, Oryza sativa
MERRSSVRFAPSEIARMEKLVTHKKEQVLDEIFCRKLAEEFNCSPGRVGSKALQAVQVQEWFRQKFPASTVIPPCLPTGSEEKALASQASAPVSEEKPPSSEENALAVDTSISNDIGEVSPDLPIDNIDKLPEIEDMQFEARSSKDFAWYDIATFLAYRKLSSGEFEVRVRFQGFGAEEDEWINVRKAIRLQSIPLESSECKLIREGDLVLCFKESNDEALHFDAHVLEIQRKQHDIRGCRCVFLVEYDHDGTQERVNLRRLSRRPKHS

SEQ ID NO: 47139 - DNA, 1170 bp, Zea mays
  CDS (1)..(1170)
atgggtcgtccgccgagcgccggtgctccggcgttccgcttcctcccgtccgaggtggcggagatggaggcgcgcctgctgcagctcaacaacggcatccccacccgcgccgtgctgcagaccctcgcggataaattctccgcttcgcccgagcgcgctggcaaggtggccatccagcccaagcaggtgtggaactggtttcagaacagacggtactcacaccgggccaaaactcccagggccacgtcgtcaccgccggctaagatgacgccctcgggagctgatcaccagcagcatgccgctaacgcctccgccttcagggctgctcagctctcttctgtcgctgctgcgcaccacggttcctcctctacagggaagaatcctgtggaaagtgtctcagttgagtttgaggccaagtcagctcgtgatggtgcatggtatgatgttgctgcctttctttcacataggttgtttgaatccggtgacccggaggtgcgggttcgtttttctggatttggggcagaggaggatgaatggataaatgttcgcaaatgtgtgcgacaacgttctcttccatgcgaggccacagaatgtgttgctgtgcttcctggggacctgattctttgttttcaggaaggtaaagatcaggctctctattatgatgctcatgtccttgatgctcaaaggagaaggcatgatgttagaggttgccgttgtagatttcttgttcgctacgaccatgattcttctgaggaaattgttccactgaggaaggtgtgccgccgaccggaaactgactacaggcttcagattctgcatgcggctagagcggcagccacgaatgcagatgttcacactccacccaaagaggttaaggtggagttggcgtccactgataaaagcccagccgagcagaaaccccagaagcagcacaagatgatggacgtgaacactgatgaggtgaccatggtctccaccttggagcaagatgagacaccaggcaagactgtagcccccgtaccgtcagccactgcagaaacccgcaattcaagttcggacacagtgatgaaaggtgctgaggcttcctcggtcgttgaagatgacgatgaagtgcaggcagttgacaagatgaaagaggggagaagttttattcccttatcttttggttag

SEQ ID NO: 47140 - protein, 389 aa, Zea mays
MGRPPSAGAPAFRFLPSEVAEMEARLLQLNNGIPTRAVLQTLADKFSASPERAGKVAIQPKQVWNWFQNRRYSHRAKTPRATSSPPAKMTPSGADHQQHAANASAFRAAQLSSVAAAHHGSSSTGKNPVESVSVEFEAKSARDGAWYDVAAFLSHRLFESGDPEVRVRFSGFGAEEDEWINVRKCVRQRSLPCEATECVAVLPGDLILCFQEGKDQALYYDAHVLDAQRRRHDVRGCRCRFLVRYDHDSSEEIVPLRKVCRRPETDYRLQILHAARAAATNADVHTPPKEVKVELASTDKSPAEQKPQKQHKMMDVNTDEVTMVSTLEQDETPGKTVAPVPSATAETRNSSSDTVMKGAEASSVVEDDDEVQAVDKMKEGRSFIPLSFG

SEQ ID NO: 47141 - DNA, 771 bp, Brassica napus
  CDS (1)..(771)
atggatgctcccgaagattcctcccactatttcaccgatttcacattggccgagattgtagacatggagactctgttcaaggagctcggtgatcaatctctcctcaaagacttctgtcaaactgttgcctcctcttttagttgctcagtgaaccggaagggaaaatcatcaataacatggaaacaagtacagggttggtttcaggggagtttagagaagcaaaaccaaccaaaattcaagactgcgccatcttcccctttgctgattgttgacttatcaaatcccggtggtgtcagagatgctggaagtcctgaaactgttacctatggtcaaagagtgaaaggtaaggcctctgatgtatctgatctcgcttttgaggctaaatctgcaagggatgacgcgtggtatgacgtggcatcgttcatgacttatagatatcttcgcactggtgaactggaagtgcgtgtccggttttctgggttcgacaaccaacacgatgagtgggtgaacgtgcaaacgtcagtgcgtgagcggtctattcctgtagaaccatcagagtgtgggagagtgaaggttggagatctgcttctgtgttttcaggatagggaggatgaagcactgtactgtgatgctcatgttgtgaatatcaagagaggggttcatgatcacaggagttgtaactgcgtgtttgttgttcgctacgagtttgacggtacagaggaaccgctgggacttgaaagtatttgccgtcctcctgattctgaagagtga

SEQ ID NO: 47142 - protein, 256 aa, Brassica napus
MDAPEDSSHYFTDFTLAEIVDMETLFKELGDQSLLKDFCQTVASSFSCSVNRKGKSSITWKQVQGWFQGSLEKQNQPKFKTAPSSPLLIVDLSNPGGVRDAGSPETVTYGQRVKGKASDVSDLAFEAKSARDDAWYDVASFMTYRYLRTGELEVRVRFSGFDNQHDEWVNVQTSVRERSIPVEPSECGRVKVGDLLLCFQDREDEALYCDAHVVNIKRGVHDHRSCNCVFVVRYEFDGTEEPLGLESICRPPDSEE

SEQ ID NO: 47143 - DNA, 1149 bp, Zea mays
  CDS (1)..(1149)
atgggtcgtccgccgagcaccactggtgctccggccttccgcttcctcccttccgaggtggcggagatggaggcgcgcttgctgcagctcaacaacggcatccccacccgcgccatgctccagactctcgccgataagttctccgcctcgcccgagcgcgccggcaaggtggccatccagcccaagcaggtgtggaactggtttcagaacaggcgttactcgcatcgggccaagaccaccagggtcgtgccgtctccaccggctaagatgaccccctcgggggccgatcaccaccagcacgccgctaacgcctccgccttcagggccgctcagccctcttctgtcgctgttgctcaccatggctcctcctcgacagggaagaaccctatggaaggtgtctcagttgagtttgaggccaagtcagctcgtgatggtgcatggtatgatgttgctgcctttctgtcacataggttgtttgaatccggtgacccggaagtgcgggttcgtttttctggatttggggcagaggaggatgaatggatcaatgttcgcaaatgtgtgcgacaacgttctcttccatgcgaggccacagaatgcgttgctgtgcttcctggggacctcattctttgttttcaggaagataaagagcaggctctctattttgatgctcgtgtccttgatgctcaaaggagaaggcatgatgttagaggttgccgttgtagatttcttgttcgctatgatcatgactcttctgaggaaattgttccactgaggaaggtgtgccgccgaccagaaactgactacaggcttcagattctgcatgctgctagagcggcagccgccagtgcagatattcacactccacccagagaggctaaagtggagttggcatccaatgctaagagcccatatgagcaaaaaccccagaagcagtacaagatgatggacgtgaacactgatgaggaggtgaccatggtctccaccttggaacaggatgagacacaaggcaagactgtagcccccgtaccgtcagcaactgcagaaacccgcaattcaagttcagacgcggtgatgaaggatgcggaggcttcgtccgtggctcaagacgatgatgaagtgcaggtggttgacaagatgaaagaggggtag

SEQ ID NO: 47144 - protein, 382 aa, Zea mays
MGRPPSTTGAPAFRFLPSEVAEMEARLLQLNNGIPTRAMLQTLADKFSASPERAGKVAIQPKQVWNWFQNRRYSHRAKTTRVVPSPPAKMTPSGADHHQHAANASAFRAAQPSSVAVAHHGSSSTGKNPMEGVSVEFEAKSARDGAWYDVAAFLSHRLFESGDPEVRVRFSGFGAEEDEWINVRKCVRQRSLPCEATECVAVLPGDLILCFQEDKEQALYFDARVLDAQRRRHDVRGCRCRFLVRYDHDSSEEIVPLRKVCRRPETDYRLQILHAARAAAASADIHTPPREAKVELASNAKSPYEQKPQKQYKMMDVNTDEEVTMVSTLEQDETQGKTVAPVPSATAETRNSSSDAVMKDAEASSVAQDDDEVQVVDKMKEG

SEQ ID NO: 47145 - DNA, 822 bp, Glycine max
  CDS (1)..(822)
atggaaaagctacctttaactgaatatccattccctaagctctctttagatgagattctggaattggaaagaatatacaaagatgtggtaggaaaagtgttcaatcggaagttgtgccaggagattgctaaacgttttagttcctcatcaaatggtgctggtaaaaattccttatcatggcaacaggtgcagctgtggttcagaaatagtcagagaatgttactgggtgaagatatctcatcttctgacctgctgaaaatatctgctgatcttgcagattcacctcttttaggcaatggaaaaggtaaacaagctacagatctcgatgatatgggatttgaagcacgatctacaaaagacaatgcatggcatgatgtttcaatgttccttaactacagagttctgagtacgggcgaacttgaagtccgcgtacgatatgctggatttgggaaagagcaggatgagtggatgaatgtgaaattgggggtacgggagagatctattccattagaaccttcagagtgtcacaaggtgaaggatggagatcttgtactatgtttcctggaaaaagaagattatgccctctattgtgatgctcgaattgtaaaaatccagaggaagatacacgatccaacagactgtacgtgcaccttcattgttcaattcgtccatgacaacactgaggaaggagtttcttttagcaggatatgctgtaggcctacacaagaggaatctgcttgcttcccagatcttgcccttgatcccacccaaagtccctccctaaatttccccctaaataccatagagtccttgtggggataa

SEQ ID NO: 47146 - protein, 273 aa, Glycine max
MEKLPLTEYPFPKLSLDEILELERIYKDVVGKVFNRKLCQEIAKRFSSSSNGAGKNSLSWQQVQLWFRNSQRMLLGEDISSSDLLKISADLADSPLLGNGKGKQATDLDDMGFEARSTKDNAWHDVSMFLNYRVLSTGELEVRVRYAGFGKEQDEWMNVKLGVRERSIPLEPSECHKVKDGDLVLCFLEKEDYALYCDARIVKIQRKIHDPTDCTCTFIVQFVHDNTEEGVSFSRICCRPTQEESACFPDLALDPTQSPSLNFPLNTIESLWG

SEQ ID NO: 47147 - DNA, 1149 bp, Zea mays
  CDS (1)..(1149)
atgggtcgtccgccaagcaccactggtgctccggccttccgcttcctcccttccgaggtggcggagatggaggcgcgcttgctgcagctcaacaacggcatccccacccgcgccatgctccagactctcgccgataagttctccgcctcgcccgagcgcgccggcaaggtggccatccagcccaagcaggtgtggaactggtttcagaacaggcgttactcgcatcgggccaagaccaccagggtcgtgccgtctccaccggctaagatgaccccctcgggggccgatcaccaccagcacgccgctaacgcctccgccttcagggccgctcagccctcttctgtcgctgttgctcaccatggctcctcctcgacagggaagaaccctatggaaggtgtctcagttgagtttgaggccaagtcagctcgtgatggtgcatggtatgatgttgctgcctttctgtcacataggttgtttgaatccggtgacccggaagtgcgggttcgtttttctggatttggggcagaggaggatgaatggatcaatgttcgcaaatgtgtgcgacaacgttctcttccatgcgaggccacagaatgcgttgctgtgcttcctggggacctcattctttgttttcaggaagataaagagcaggctctctattttgatgctcgtgtccttgatgctcaaaggagaaggcatgatgttagaggttgccgttgtagatttcttgttcgctatgatcatgactcttctgaggaaattgttccactgaggaaggtgtgccgccgaccagaaactgactacaggcttcagattctgcatgctgctagagcggcagccgccagtgcagatattcacactccacccagagaggctaaagtggagttggcatccaatgctaagagcccatatgagcaaaacccccagaagcagtacaagatgatggacgtgaacactgatgaggaggtgaccatggtctccaccttggaacaggatgagacacaaggcaagactgtagcccccgtaccgtcagcaactgcagaaacccgcaattcaagttcagacgcggtgatgaaggatgcggaggcttcgtccgtggctcaagacgatgatgaagtgcaggtggttgacaagatgaaagaggggtag

SEQ ID NO: 47148 - protein, 382 aa, Zea mays
MGRPPSTTGAPAFRFLPSEVAEMEARLLQLNNGIPTRAMLQTLADKFSASPERAGKVAIQPKQVWNWFQNRRYSHRAKTTRVVPSPPAKMTPSGADHHQHAANASAFRAAQPSSVAVAHHGSSSTGKNPMEGVSVEFEAKSARDGAWYDVAAFLSHRLFESGDPEVRVRFSGFGAEEDEWINVRKCVRQRSLPCEATECVAVLPGDLILCFQEDKEQALYFDARVLDAQRRRHDVRGCRCRFLVRYDHDSSEEIVPLRKVCRRPETDYRLQILHAARAAAASADIHTPPREAKVELASNAKSPYEQNPQKQYKMMDVNTDEEVTMVSTLEQDETQGKTVAPVPSATAETRNSSSDAVMKDAEASSVAQDDDEVQVVDKMKEG

SEQ ID NO: 47149 - DNA, 810 bp, Zea mays
  CDS (1)..(810)
atggagcggcggtcctccgtccgctttgtgccatccgagattgcaaggatggagaaattggctgcagatagaaaagaccaagtctttgataacaagttctgccagaagcttgcagaagaatttaatcgttctgttggccgtgctggaagtaaagcgttacaagctacacaggttcaaggatggtttcttaataagtttccagcatcagccactaaacctacttgtgtgcccactgcttcccaagaaaagacttcagcctcagaaataaatgtatcagtttctgaaaaaagatctgcagcttccgaagagaaacttttccctcttgatacaggtgtttcaaataatgaggatgaggtttctcctgtttttccattagaaactaaagatatgattcctgaacttgaagacctggagtttgaggccaagtctacaaaggattttgcctggtatgacattgccctattcttggcacacaggaggaacagggcgggtgaagtagaagtccgggtgagattcgagggttttggggcggatgaggatgagtgggtgaatgtcaagaagttcatccgccagcgttccattcctctggagtcctcacagtgcaaaagcgttgttgaaggtgaccttgttctctgcttcagggagggaaacgaggaggcattgcatttcgatgcacatgttcttgaggttcagcggaagcagcatgatattagggggtgcagatgtgtattccttgttgaatacgatcatgaccaaagccaggagagggttagcctgagaagattgtcccggcggccaaagtacttttga

SEQ ID NO: 47150 - protein, 269 aa, Zea mays
MERRSSVRFVPSEIARMEKLAADRKDQVFDNKFCQKLAEEFNRSVGRAGSKALQATQVQGWFLNKFPASATKPTCVPTASQEKTSASEINVSVSEKRSAASEEKLFPLDTGVSNNEDEVSPVFPLETKDMIPELEDLEFEAKSTKDFAWYDIALFLAHRRNRAGEVEVRVRFEGFGADEDEWVNVKKFIRQRSIPLESSQCKSVVEGDLVLCFREGNEEALHFDAHVLEVQRKQHDIRGCRCVFLVEYDHDQSQERVSLRRLSRRPKYF

SEQ ID NO: 47151 - DNA, 1143 bp, Zea mays
  CDS (1)..(1143)
atgggtcgtccgccgagcgccggtgctccggcgttccgcttcctcccgtccgaggtggcggagatggaggcgcgcctgctgcagctcaacaacggcatccccacccgcgccgtgctgcagaccctcgcggataagttctccgcttcgcccgagcgcgctggcaaggtggccatccagcccaagcaggtgtggaactggtttcagaacagacggtactcacaccgggccaaaactcccagggccgcgtcgtcaccgccggctaagatgacgccctcgggagctgatcaccaccagcatgccgctaacgcctccgccttcagggctgctcagctctcttctgttgctgctgcgcaccacggttcctcctctacagggaagaatcctgtggaaagtgtctcagttgagtttgaggccaagtcagctcgtgatggtgcatggtatgatgttgctgcctttctttcacataggttgtttgaatccggtgacccggaggtgcgggttcgtttttctggatttggggcagaggaggatgaatggatcaatgttcgcaaatgtgtgcgacaacgttctcttccatgcgaggccacagaatgtgttgctgtgcttcctggggacctgattctttgttttcaggaaggtaaagatcaggctctctattatgatgctcatgtccttgatgctcaaaggagaaggcatgacgttagaggttgccgttgtagatttcttgttcgctacgaccatgattcttctgaggaaattgttccactgaggaaggtgtgccgccgaccggaaactgactacaggcttcagattctgcatgctgctagagcggcagccactaatgcagatgttcacactccacccaaagaggttaaggtggagttggcgtccactgataagagcccagccgagcagaaaccccataagcagcacaagatgatggacgtgaacactgatgaggtgaccatggtctccaccttggagcaagatgagacaccaggcaagactgtagcccccgtaccgtcagcaactgcagaaacccgcaattcaagttcggacacagtgatgaaaggtgctgaggcttcctcggtcgttgaagatgacgatgaagtgcaggcagttgacaagatgaaagaggggtag

SEQ ID NO: 47152 - protein, 380 aa, Zea mays
MGRPPSAGAPAFRFLPSEVAEMEARLLQLNNGIPTRAVLQTLADKFSASPERAGKVAIQPKQVWNWFQNRRYSHRAKTPRAASSPPAKMTPSGADHHQHAANASAFRAAQLSSVAAAHHGSSSTGKNPVESVSVEFEAKSARDGAWYDVAAFLSHRLFESGDPEVRVRFSGFGAEEDEWINVRKCVRQRSLPCEATECVAVLPGDLILCFQEGKDQALYYDAHVLDAQRRRHDVRGCRCRFLVRYDHDSSEEIVPLRKVCRRPETDYRLQILHAARAAATNADVHTPPKEVKVELASTDKSPAEQKPHKQHKMMDVNTDEVTMVSTLEQDETPGKTVAPVPSATAETRNSSSDTVMKGAEASSVVEDDDEVQAVDKMKEG

SEQ ID NO: 47153 - DNA, 858 bp, Zea mays
  CDS (1)..(858)
atggatcggcggcaatcaagcagcagcgggatgatggagggaccgttccgattcttgccggccgaagtgaaagagatggaggagcgcctgttcccggtcaccaatcgcaggctggatcacatcctcatggatgagctcgctctgaaatttagctgcttccggcgccgtgctggcatggttcccgtcaagccaaagcaggtgctcaactggttttataacaaccgtaacaagacttctgccaaggtagcagccagggaagcacatgctccatgggagttttgggccaaccatcagcaagctagagctagaggaggctcatccatcagcaagctgaagccaaagaaggcgactacgcacgcaggatcttcctcagggaataattatatcgatgtatatcacaccaagtttgaagctaagtcagctagagatggctcttggtaccttgtcgaagaattcttgactgaaaagttttgtgaatcaggcgatttgcaagtattggttcgctttcctggatttggagttgaggaagctgaatggatcgatgttcgtacatgtactttgcggcaacgctcagtgccatacaaggccacagaatgtgcagatgttcatatttgggaccctgttctttgttacaaggtaagtgaacagagtggtctctattttgatgctgaagtgcatgctattgaaaggaaaacacataattcaggagaagaatgtgattgcaaaatccttgttctttatgtgcatgataattctgaggacatcgtttccttgaagaagttgcgccgtcgatacgtagaatatgactacaaacctcaaacttcgtatgagctgccaaaaggaacgaaaatagcttaa

SEQ ID NO: 47154 - protein, 285 aa, Zea mays
MDRRQSSSSGMMEGPFRFLPAEVKEMEERLFPVTNRRLDHILMDELALKFSCFRRRAGMVPVKPKQVLNWFYNNRNKTSAKVAAREAHAPWEFWANHQQARARGGSSISKLKPKKATTHAGSSSGNNYIDVYHTKFEAKSARDGSWYLVEEFLTEKFCESGDLQVLVRFPGFGVEEAEWIDVRTCTLRQRSVPYKATECADVHIWDPVLCYKVSEQSGLYFDAEVHAIERKTHNSGEECDCKILVLYVHDNSEDIVSLKKLRRRYVEYDYKPQTSYELPKGTKIA

SEQ ID NO: 47155 - DNA, 20 bp, Artificial sequence
  primer
atggaccgcttgcgtcctag

SEQ ID NO: 47156 - DNA, 20 bp, Artificial sequence
  primer
ttaagatcttggtctgcggc

SEQ ID NO: 47157 - protein, 354 aa, Artificial sequence
  consensus sequence
  Variant (2)..(4): Xaa in position 2 to 4 is any amino acid
  Variant (7)..(15): Xaa in position 7 to 15 is any amino acid
  Variant (16)..(24): Xaa in position 16 to 24 is any or no amino acid
  Variant (27)..(28): Xaa in position 27 to 28 is any amino acid
  Variant (30)..(31): Xaa in position 30 to 31 is any amino acid
  Variant (33)..(34): Xaa in position 33 to 34 is any amino acid
  Variant (36)..(36): Xaa in position 36 is any amino acid
  Variant (38)..(44): Xaa in position 38 to 44 is any amino acid
  Variant (46)..(48): Xaa in position 46 to 48 is any amino acid
  Variant (51)..(83): Xaa in position 51 to 83 is any amino acid
  Variant (84)..(127): Xaa in position 84 to 127 is any or no amino acid
  Variant (133)..(134): Xaa in position 133 to 134 is any amino acid
  Variant (136)..(136): Xaa in position 136 is any amino acid
  Variant (137)..(140): Xaa in position 137 to 140 is any or no amino acid
  Variant (146)..(147): Xaa in position 146 to 147 is any amino acid
  Variant (150)..(151): Xaa in position 150 to 151 is any amino acid
  Variant (153)..(156): Xaa in position 153 to 156 is any amino acid
  Variant (158)..(159): Xaa in position 158 to 159 is any amino acid
  Variant (160)..(243): Xaa in position 160 to 243 is any or no amino acid
  Variant (246)..(246): Xaa in position 246 is any amino acid
  Variant (250)..(250): Xaa in position 250 is any amino acid
  Variant (253)..(256): Xaa in position 253 to 256 is any amino acid
  Variant (260)..(260): Xaa in position 260 is any amino acid
  Variant (263)..(266): Xaa in position 263 to 266 is any amino acid
  Variant (267)..(267): Xaa in position 267 is any or no amino acid
  Variant (269)..(269): Xaa in position 269 is any amino acid
  Variant (272)..(272): Xaa in position 272 is any amino acid
  Variant (274)..(274): Xaa in position 274 is any amino acid
  Variant (276)..(277): Xaa in position 276 to 277 is any amino acid
  Variant (280)..(281): Xaa in position 280 to 281 is any amino acid
  Variant (283)..(284): Xaa in position 283 to 284 is any amino acid
  Variant (288)..(288): Xaa in position 288 is any amino acid
  Variant (292)..(292): Xaa in position 292 is any amino acid
  Variant (294)..(297): Xaa in position 294 to 297 is any amino acid
  Variant (301)..(301): Xaa in position 301 is any amino acid
  Variant (304)..(304): Xaa in position 304 is any amino acid
  Variant (307)..(308): Xaa in position 307 to 308 is any amino acid
  Variant (311)..(312): Xaa in position 311 to 312 is any amino acid
  Variant (315)..(317): Xaa in position 315 to 317 is any amino acid
  Variant (318)..(318): Xaa in position 318 is any or no amino acid
  Variant (320)..(320): Xaa in position 320 is any amino acid
  Variant (322)..(322): Xaa in position 322 is any amino acid
  Variant (326)..(326): Xaa in position 326 is any amino acid
  Variant (328)..(328): Xaa in position 328 is any amino acid
  Variant (331)..(332): Xaa in position 331 to 332 is any amino acid
  Variant (334)..(334): Xaa in position 334 is any amino acid
  Variant (336)..(336): Xaa in position 336 is any amino acid
  Variant (338)..(338): Xaa in position 338 is any amino acid
  Variant (340)..(341): Xaa in position 340 to 341 is any amino acid
  Variant (342)..(351): Xaa in position 342 to 351 is any or no amino acid
  Variant (353)..(353): Xaa in position 353 is any amino acid
EXXXMEXXXXXXXXXXXXXXXXXXLAXXFXXSXXRXGXXXXXXXQXXXWFXXXXXXXXXXXXXXXXXXXXXXXXXXXXXXXXXXXXXXXXXXXXXXXXXXXXXXXXXXXXXXXXXXXXXXXXXXXXXFEAKSXXDXXXXXAWYDVXXFLXXRXXXXGXXXXXXXXXXXXXXXXXXXXXXXXXXXXXXXXXXXXXXXXXXXXXXXXXXXXXXXXXXXXXXXXXXXXXXXXXXXXXXXXXXXXXXEVXVRFXGFXXXXDEWXNVXXXXXRXRSXPXEXXECXXVXXGDLXLCFXEXXXXALYXDAXVLXXQRXXHDXXXXCXCXFLVXYXHDXXEXEXVXLXXXXXXXXXXXXRXP

SEQ ID NO: 47158 - protein, 47 aa, Artificial sequence
  protein pattern
  Variant (2)..(3): Xaa in position 2 to 3 is any amino acid
  Variant (5)..(5): Xaa in position 5 is Ile or Leu
  Variant (7)..(7): Xaa in position 7 is any amino acid
  Variant (9)..(9): Xaa in position 9 is Ala, Pro or Ser
  Variant (10)..(10): Xaa in position 10 is Ser or Thr
  Variant (13)..(14): Xaa in position 13 to 14 is any amino acid
  Variant (15)..(15): Xaa in position 15 is Ile, Leu or Val
  Variant (16)..(17): Xaa in position 16 to 17 is any amino acid
  Variant (20)..(21): Xaa in position 20 to 21 is any or no amino acid
  Variant (25)..(25): Xaa in position 25 is any amino acid
  Variant (26)..(26): Xaa in position 26 is Asp or Glu
  Variant (27)..(28): Xaa in position 27 to 28 is any amino acid
  Variant (29)..(29): Xaa in position 29 is Asp or Glu
  Variant (30)..(30): Xaa in position 30 is any amino acid
  Variant (32)..(32): Xaa in position 32 is Ile, Leu or Val
  Variant (33)..(33): Xaa in position 33 is His or Tyr
  Variant (34)..(34): Xaa in position 34 is any amino acid
  Variant (36)..(36): Xaa in position 36 is Ala or Gly
  Variant (37)..(37): Xaa in position 37 is any amino acid
  Variant (38)..(38): Xaa in position 38 is Ile or Val
  Variant (39)..(39): Xaa in position 39 is Ile, Leu or Val
  Variant (40)..(40): Xaa in position 40 is any amino acid
  Variant (41)..(41): Xaa in position 41 is Ala or Ile
  Variant (42)..(42): Xaa in position 42 is any amino acid
  Variant (43)..(43): Xaa in position 43 is Lys or Arg
  Variant (44)..(45): Xaa in position 44 to 45 is any amino acid
RXXSXPXEXXECXXXXXGDXXLCFXXXXXXAXXXDXXXXXXXXXXHD

SEQ ID NO: 47159 - DNA, 255 bp, Azotobacter vinelandii
  CDS (1)..(255): transl_table=11
atgccgcacatcgtcatctataccagcgcctggtgcccctactgcatacgggccaagcaactgctggacaggaaaggcgtcgcctaccgggagatcggtgtcgacggcaaaccggagctgcgcgccgagatgacccgcaaggccggacgcacctcggttccgcaaatctggatcggcgatacccacgtgggtgggtgtgacgatctccatgccctggagcgcgcgggccgcctggacgcgctgctcgaggattga

SEQ ID NO: 47160 - protein, 84 aa, Azotobacter vinelandii
MPHIVIYTSAWCPYCIRAKQLLDRKGVAYREIGVDGKPELRAEMTRKAGRTSVPQIWIGDTHVGGCDDLHALERAGRLDALLED

SEQ ID NO: 47161 - DNA, 501 bp, Glycine max
  CDS (1)..(501)
atggcattggcattgggtaacattgttgctcttcctctctcaaacttgaaaccttctctaaagttatcttcttcttcatcctcttgttgtatcaccaaactcttccccatttcccgcatcaatgtctctcccacctcggtattagttcgagcctcttcctcatcctctttcgggtctcgcctcgaagacaccatcaagaagaccgtagctgagaacccagtcgtcgtttattccaaaacctggtgcacctattcttccgaggtcaaaatcctcttcaaaaaactcggcgtcgaccctctcgtcttcgaattagacgaaatgggtcctcaagggccacagttgcagaaggtattggaaaggatcacagggcaacacactgtgccaaatgtatttattggtggcaaacacattggcggctgtacagatacactgaagctgtaccggaaaggagaactagaacctttgctatcagaagcgaatgctaaaaaaactgagagctaa

SEQ ID NO: 47162 - protein, 166 aa, Glycine max
MALALGNIVALPLSNLKPSLKLSSSSSSCCITKLFPISRINVSPTSVLVRASSSSSFGSRLEDTIKKTVAENPVVVYSKTWCTYSSEVKILFKKLGVDPLVFELDEMGPQGPQLQKVLERITGQHTVPNVFIGGKHIGGCTDTLKLYRKGELEPLLSEANAKKTES

SEQ ID NO: 47163 - DNA, 810 bp, Glycine max
  CDS (66)..(566)
cccacgcgtccgcccacgcgtccgacggctgcgagaagacgacagaagggggaagaagtaatagtatggcattggcattgggtaacgctattcctctctcaaacttgaaaccttgtccaaagttatcttgttgttgtatgaagaaactctttttcactcactcagtccccatttctcgcatcccaacaacgccaaagcgtactcccaccaccgtagttcgagccacttcctctttcgggtctcgcctcgaagacaccatcaagaagactgtagccgagaacccagtggtgctttattccaaaacatggtgctcctattcttctgaggtcaaaatcttgttcaaaaagctcggcgtcgacccattggtcttcgaattagacgaaatgggtcctcaaggcccacagttgcacaaggtattggaaaggatcacagggcaacacactgtgccaaatgtatttattggcggcaagcacattggcggctgtacagatacactgaagctgtatcggaaaggagaacttgaacctttgctatcaaaagctaatgctaaaaaaacagggagctaagctgttgactggcatcctaaagggaacctgatcccgttaccaagttgttacttttaaggtcaatgcagttttctcaatgttattgtttgtcacaaatgatggttgaaagaaatcagaccgcactgataacttgaaaattgacgtttagttaggaatttatagttacaaatatgcagttgaaaagttgcaacttgggattgtacctggaatatggatatatttatattttacttcttagttagct

SEQ ID NO: 47164 - protein, 166 aa, Glycine max; identical to SEQ ID NO: 2886

SEQ ID NO: 47165 - DNA, 586 bp, Sorghum bicolor
  CDS (5)..(391)
agagatgggaatcgcctcctcctcatcatccaacccggaatcgagagctatggcgctcgccaaggccaaggagatcgtcgcctccgctcccctcgtcgtcttcagcaagacttcctgccctttctgcgtccgtgtgaagcagttgtttgagaagctgggagcaagctacaaggccattgagttggatgtggaaagtgatgggcctgagctccagaatgccctcaaggagtggactggacagaggactgtcccaaatgtcttcatcaatgggaagcatattggcggctgtgatgatactatggcactgaacaatgatgggaagctggtgcctctgctgactgaggctggagccatcgccggttctacctcaaagacaaccgtcactgcttgacatttgtgttaccgttcctgtgcttaaaataaagatgctttgcaagtgctgaacttgcagctgtcagatgctatctgggatgttggatccctgtgtacaaactgcctagacatcagtcgagtcgtatcccagtgcttgttgtgcactctactgccgttgctctgtttgtctttaaaaaaaaaaaaaaaaaaaaag

SEQ ID NO: 47166 - protein, 128 aa, Sorghum bicolor
MGIASSSSSNPESRAMALAKAKEIVASAPLVVFSKTSCPFCVRVKQLFEKLGASYKAIELDVESDGPELQNALKEWTGQRTVPNVFINGKHIGGCDDTMALNNDGKLVPLLTEAGAIAGSTSKTTVTA

SEQ ID NO: 47167 - DNA, 879 bp, Zea mays
  CDS (114)..(650)
cactccggcggccgcttcggggccccgcccccgcccgggagagacgaatcccatcgtgttgtggccggagagacgagaggactccagagagattccgacaccgctgggctcagatgccgccgccgccgccgccgccgcagcagcagcagcagcagtccggcatgactctctgccgcctccccacggccactcttggccttcccctttctctcccctgtttgctacctcgttcccgcccccgcctgtgcttcgccgcacgtcatgccagggccgtcgccgccagggcttcctcatcctctccatcaccggactcttcattcggttcgcggatggaggagtccgtcaagaagacggtggccgacaaccccgttgtcatctactccaagtcatggtgctcatattgcatggaggtgaaggcgctcttcaagcggatcggtgtgcagccccatgttatcgagcttgaccatctcggtgctcaaggaccacaaatacagaaggtattagagaggctgactggacagtctactgttcctaatgttttcatcggtggaaagcatgttggtggctgtacagatactgtgaagctgtatcgcaagggggagctagctagcatgctgtccggcctggatatcaacattaacaactcatgacaagtttgaccatgttttgcaagtatagttttgatgtttgagagacttgggcagtcatgtattgagtttttttaacttatgcagattctttatgtctgcaagaaaaaaaaaagctgtgtcatttacacatttttgtttggtactctgattaaatcattgaatttgaccactgtatgcaaattgctagaaagaaaaacgaacgaactcacaaaaaaaaaaaaattggcct

SEQ ID NO: 47168 - protein, 178 aa, Zea mays; identical to SEQ ID NO: 2926

SEQ ID NO: 47169 - DNA, 695 bp, Glycine max
  CDS (3)..(398)
agatgggaatcacctcctcaacctccagcccaacctccagcccggaatcgagagcaatggcgctcgccaaggccaaggagatcgttgcctccgctcccctcgtcgtcttcagcaaaacttcctgtcctttctgcgtccgtgtgaagcagttgttcgagaagctcggagcaagctacaaggccattgagttggataaggaaagtgatggagctgagctccagaatgccctgaaggagtggactggacagaggactgtcccaaatgtcttcatcaatgggaagcatattggcggctgtgatgatactatggcactgaacaatgatgggaagctggtgcctctgctgactgaggctggagccatcgccggttctgcctcgaagacaaccatcactgcttgacatgtgtgttaccattcccgtgcttaaaaataatgatgctttgcaagtgctgaacttgcagatgctatgtgggagtgactgttcgttccctgtgtaaaactccctagacatcagtcgagtcgtgttgctgtggtggttgtgaaatctacaataatcattgctacaataatgtcgtgttccctagacatcagatgagaaagatgagaagaaataacattataatcttattcgaactatcatctgtaagcttcttttgatacaatatttttatttatagattttaaaaacatttgtagg

SEQ ID NO: 47170 - protein, 131 aa, Glycine max
MGITSSTSSPTSSPESRAMALAKAKEIVASAPLVVFSKTSCPFCVRVKQLFEKLGASYKAIELDKESDGAELQNALKEWTGQRTVPNVFINGKHIGGCDDTMALNNDGKLVPLLTEAGAIAGSASKTTITA

SEQ ID NO: 47171 - DNA, 578 bp, Zea mays subsp. mays
  CDS (55)..(396)
accgctttttcctcctcctcctcctcctcctcttccaccccagagtccagagctatggcgctcgccaaggccaaggagatcgtcgcctccgctcccgtcgtcgtcttcagcaagtcttactgccctttctgcgtacaagtgaagaagttgttcacgcagctgggagcaagtttcaaggccattgagttggacactgaaagcgatggaactgagattcagtcagctcttgctgaatggactgggcagaggactgttcccaatgtcttcatcaatggaaaacacattggtggctgtgacgatactattgcactgaacaagggagggaagctggttgctctgctgacggaggctggagcgatctcgggttcttcttcgaagaccactgtcactgcttagctctgtttgcgagttgtcgtgatcgacatgttagtgtgttacatgtgttgcatcgttcccgtgtcatgaaataacgtagttggatatgtttggcaagttcagggcttgttgctgtctagtatttctgcagtaaatgtctttgtgtaaaactcgttggaaataaatcaaattatgtcggcgat

SEQ ID NO: 47172 - protein, 113 aa, Zea mays subsp. mays
MALAKAKEIVASAPVVVFSKSYCPFCVQVKKLFTQLGASFKAIELDTESDGTEIQSALAEWTGQRTVPNVFINGKHIGGCDDTIALNKGGKLVALLTEAGAISGSSSKTTVTA

SEQ ID NO: 47173 - DNA, 267 bp, Brucella suis 1330
  CDS (1)..(267): transl_table=11
atggttgacgtcatcatctatacccgccccggctgcccctattgcgcacgggcaaaggcgcttctggcccgaaagggtgccgagttcaatgaaatcgatgcctcggcaacgccggaattgcgcgctgaaatgcaagagcgctccgggcgcaataccttcccgcagatttttatcggctcggttcatgtcggcggctgcgacgatctttatgcactggaagacgagggcaagctcgatagcctgctgaaaaccggcaaacttatttag

SEQ ID NO: 47174 - protein, 88 aa, Brucella suis 1330
MVDVIIYTRPGCPYCARAKALLARKGAEFNEIDASATPELRAEMQERSGRNTFPQIFIGSVHVGGCDDLYALEDEGKLDSLLKTGKLI

SEQ ID NO: 47175 - DNA, 258 bp, Bartonella quintana str. Toulouse
  CDS (1)..(258): transl_table=11
atgaaagaggtaacactttatacacgtcctaactgtccttattgcgcgaaagctcgtgatttgcttgataaaaaaggcgtgaaatatacagatattgatgcatcaactgttttgcgcgaagaaatggtgcagcgcgcaaatgggcggaatacatttccacaaatttttataggtgattatcatgtcggtggttgtgatgatctctacgctttaaatgctaagggagagcttaattctttgctgcaaagcgtggaatag

SEQ ID NO: 47176 - protein, 85 aa, Bartonella quintana str. Toulouse
MKEVTLYTRPNCPYCAKARDLLDKKGVKYTDIDASTVLREEMVQRANGRNTFPQIFIGDYHVGGCDDLYALNAKGELNSLLQSVE

SEQ ID NO: 47177 - DNA, 255 bp, Legionella pneumophila str. Lens
  CDS (1)..(255): transl_table=11
atgaatgaagtcatactctacactacaggctattgtccttattgcatcaaagcaaaagaactactagatagaaaaaaggttatctataccgaaatccgcgtcgatttaaagcctgaattacgtgaagaaatgatacaaaaaagtggccggcgtacagtgcctcaaattttcattaatggccaggcaattggtggctgcgatgatttatatgcactggaagcccagggaacattaaatgaacttttaaaaaaatag

SEQ ID NO: 47178 - protein, 84 aa, Legionella pneumophila str. Lens
MNEVILYTTGYCPYCIKAKELLDRKKVIYTEIRVDLKPELREEMIQKSGRRTVPQIFINGQAIGGCDDLYALEAQGTLNELLKK

SEQ ID NO: 47179 - DNA, 599 bp, Brassica napus
  CDS (33)..(437)
gaattcccgggtcgacaggtgagcgaatggcgatggttgggcaccgtcctcgccgtgttgaagtcacggcggttcacatactcctaatactagcggtggttcccagcgatctgtcaatctctgcaggagctgagaaatcggtggctgcatttgtgcagaacgccatattgtccaacaagattgtcatcttctccaagtcctactgcccgtattgcttgcgctcgaaacgcattttcagagaacttaaggaacagccttttgtcgtggagcttgatctcagagaggacggagataaaatacagtacgagcttctggaatttgttggtcgccgtaccgtcccccaagtttttgttaacggcaagcatattggtggctctgatgatcttgcagattctgtggagaatggtcagttgcaaaagcttcttgctgctagttagacttttcagaagctggaacttatgttgtgatttaaaagaatagaagaatctttggtagtaaacttgaatcaatgaattggtgtgtcacatgtttactgacttggttttgctccttatatataataaagttatgatggggcttggtattaaaaaaaaaaaaaa

SEQ ID NO: 47180 - protein, 134 aa, Brassica napus
MVGHRPRRVEVTAVHILLILAVVPSDLSISAGAEKSVAAFVQNAILSNKIVIFSKSYCPYCLRSKRIFRELKEQPFVVELDLREDGDKIQYELLEFVGRRTVPQVFVNGKHIGGSDDLADSVENGQLQKLLAAS

SEQ ID NO: 47181 - DNA, 258 bp, Neisseria meningitidis
  CDS (1)..(258): transl_table=11
atgcagaccgttaccatgtacacaggtccgttttgcccctactgcacgatggcgaaaaggctgctgcacgcggcaggtgtcggacatatcgacgaaatccgtgtcgatgcaagtcccgaagcctttgccgaaatgcagcagctttccggacagcgcagcgtgccgcagattttcatcggcgaaacgcacgtcggcggatttaccgacctctaccgcctccagcaggaaggcgggctggacggactgctgaacccttaa

SEQ ID NO: 47182 - protein, 85 aa, Neisseria meningitidis
MQTVTMYTGPFCPYCTMAKRLLHAAGVGHIDEIRVDASPEAFAEMQQLSGQRSVPQIFIGETHVGGFTDLYRLQQEGGLDGLLNP

SEQ ID NO: 47183 - DNA, 249 bp, Yersinia pestis
  CDS (1)..(249): transl_table=11
atggcgaagattgagatgtataccaaagcaacatgcccgttctgtcaccgtgctaaagcactgctgaacgccaagggtgctgctttccatgaaatcgcaatagataatgatccggccaaacgcgaagagatgattgctcgtagtgggcggacgacggtgcctcagatatttattgatgggcagcatatcggtggctgtgatgatttacacgccctggatgcgcgcggtgggctagacccactgctttaa

SEQ ID NO: 47184 - protein, 82 aa, Yersinia pestis
MAKIEMYTKATCPFCHRAKALLNAKGAAFHEIAIDNDPAKREEMIARSGRTTVPQIFIDGQHIGGCDDLHALDARGGLDPLL

SEQ ID NO: 47185 - DNA, 463 bp, Brassica napus
  CDS (26)..(436)
aattcccgggtcgacaggtgagcgaatggcgatggttgggcaccgtcctcgccgtgttgaagtcacggcggttcacatactcctaatactagcggtggttcccagcgatctgtcaatctctgcaggagctgagaaatcggtggctgcatttgtgcagaacgccatattgtccaacaagattgtcatcttctccaagtcctactgcccgtattgcttgcgctcgaaacgcattttcagagaacttaaggaacagccttttgtcgtggagcttgatctcagagaggacggagataaaatacagtacgagcttctggaatttgttggtcgccgtaccgtcccccaagtttttgttaacggcaagcatattggtggctctgatgatcttgcagattctgtggagaatggtcagttgcaaaagcttcttgctgctagttagacttttcagaagctggaacttatgttg

SEQ ID NO: 47186 - protein, 136 aa, Brassica napus
MAMVGHRPRRVEVTAVHILLILAVVPSDLSISAGAEKSVAAFVQNAILSNKIVIFSKSYCPYCLRSKRIFRELKEQPFVVELDLREDGDKIQYELLEFVGRRTVPQVFVNGKHIGGSDDLADSVENGQLQKLLAAS

SEQ ID NO: 47187 - DNA, 672 bp, Brassica napus
  CDS (22)..(543)
cctaagggtcagaaaatagccatggcagtcacagctttcaacccactgaagcttgcatcttcgcctcgagattcgtttccttcaatctcctcttcaacttcttattcggtgtctctgataagcttcggtttcagaaactccgtcggatctcctctcaagaaatgttctctaaagcagacgtgttctgttcgagccatgtcttcttcgtcattcgaatcggggatggaggagagcgtgaagaaaacggtggctgataacacagtcgttgtttactcgaaaacttggtgcccatactgttctgaagtgaagacattgttcaagagacttggtgttcagccactggtggttgagttggatgaacttggtccacaagggacacaactacagaaggtactggaaacacttactgggcaacgcactgttcctaatgtgttcgtcggaggcaagcacattggtggctgcacagatacagtaaacctgaacaggaaaggagaactggaattgatgttagctgaagccaacgctaaaaccgatcagacttgaggaaatgatggaaactggctttggagatgaacccacttctctctctctctcttttgtaaacattgaacctcgatttctctctctacactttctagaacatcattcaaataatacatgaacagaggtaaa

SEQ ID NO: 47188 - protein, 173 aa, Brassica napus
MAVTAFNPLKLASSPRDSFPSISSSTSYSVSLISFGFRNSVGSPLKKCSLKQTCSVRAMSSSSFESGMEESVKKTVADNTVVVYSKTWCPYCSEVKTLFKRLGVQPLVVELDELGPQGTQLQKVLETLTGQRTVPNVFVGGKHIGGCTDTVNLNRKGELELMLAEANAKTDQT

SEQ ID NO: 47189 - DNA, 255 bp, Xanthobacter autotrophicus Py2; identical to SEQ ID NO: 2955
  CDS (1)..(255): transl_table=11

SEQ ID NO: 47190 - protein, 84 aa, Xanthobacter autotrophicus Py2; identical to SEQ ID NO: 2956

SEQ ID NO: 47191 - DNA, 351 bp, Bombyx mori; identical to SEQ ID NO: 2591
  CDS (1)..(351)

SEQ ID NO: 47192 - protein, 116 aa, Bombyx mori; identical to SEQ ID NO: 2592

SEQ ID NO: 47193 - DNA, 270 bp, Mesorhizobium loti MAFF303099
  CDS (1)..(270): transl_table=11
atggtcgatgtcacgatctatacgcgcatgatgtgcggctactgcacggcagccaagcggctgctggagcgcaagggcgttgcctataccgagcatgacgcttcgttttcgccggaactgcgccaggagatgatctcgcgcgcgcacggccgcacgacctttccgcagattttcatcggcgagacgcatgtcggcggctgcgacgatctccacgagctggaggccgaaggccggctggacaggctgctcgccaacggcgcgacgatttga

SEQ ID NO: 47194 - protein, 89 aa, Mesorhizobium loti MAFF303099
MVDVTIYTRMMCGYCTAAKRLLERKGVAYTEHDASFSPELRQEMISRAHGRTTFPQIFIGETHVGGCDDLHELEAEGRLDRLLANGATI

SEQ ID NO: 47195 - DNA, 264 bp, Pasteurella multocida subsp. multocida str. Pm70
  CDS (1)..(264): transl_table=11
atgttcgtcgtcatctttgggcgcgcaggttgcccgtattgtgtacgtgctaaaaacttagccgacaaattaaaacaaagcttaccagatttcgattatcgctatgtcgatatcgttgcagaaggcatttctaaagcggatttatccaaatcagttgggaaacccgttgaaaccgtaccacaaatttttattgatgaaaaaccgattggtggctgtacagattttgaagccttaatgaaggcacaattcaatattgttgcgtaa

SEQ ID NO: 47196 - protein, 87 aa, Pasteurella multocida subsp. multocida str. Pm70
MFVVIFGRAGCPYCVRAKNLADKLKQSLPDFDYRYVDIVAEGISKADLSKSVGKPVETVPQIFIDEKPIGGCTDFEALMKAQFNIVA

SEQ ID NO: 47197 - DNA, 357 bp, Xylella fastidiosa 9a5c
  CDS (1)..(357): transl_table=11
atgcggggcatcggttaccattggacctcaaaatcgacacggagtttcctaatgaaacaagacgctacacgtgatgaagcaggtagcacacccaagattactatttactcaactgccatctgcccctattgcgtggctgctaagaattttctaaagagcaagggttacacctggacagagatcatgatcgacgtgaacgcagcagaacgcgaaaaaatgattgcacgtacccaacgtaccagcgtgccccagattttcgttggggatacccatgttggcggctacgacgacatgatggcacttcatcatgcaggcaagctagaaccactgctgaccaatcacagcccgcagggatga

SEQ ID NO: 47198 - protein, 118 aa, Xylella fastidiosa 9a5c
MRGIGYHWTSKSTRSFLMKQDATRDEAGSTPKITIYSTAICPYCVAAKNFLKSKGYTWTEIMIDVNAAEREKMIARTQRTSVPQIFVGDTHVGGYDDMMALHHAGKLEPLLTNHSPQG

SEQ ID NO: 47199 - DNA, 303 bp, Agrobacterium tumefaciens str. C58
  CDS (1)..(303): transl_table=11
gtgactttatcgtgcgttttgccgcacgtttgcgaggctctgaataacatggcaccggtaacgatctatacacgggatttttgtggttattgcgcgcgcgccaaggcgctgctggacatgaagggcgtcgattacgccgaatataacgccaccacgacgccggaataccggcaggaaatgatcgagaaatccggcggcacgaccttcccgcaaatcttcatcaacggccagcatgtaggcggttgtgacgatctgcatgcgctggaacgtgccggcaagctggatgccatgctggctggctga

SEQ ID NO: 47200 - protein, 100 aa, Agrobacterium tumefaciens str. C58
MTLSCVLPHVCEALNNMAPVTIYTRDFCGYCARAKALLDMKGVDYAEYNATTTPEYRQEMIEKSGGTTFPQIFINGQHVGGCDDLHALERAGKLDAMLAG

SEQ ID NO: 47201 - DNA, 267 bp, Sinorhizobium meliloti 1021
  CDS (1)..(267): transl_table=11
ttggagaccatggcttcggtcgtcatttatacgcgtcagttctgcggctattgcacgagggcgaagaaacttctggaaagcaagggcgtcgacttcaccgagtatgacgccacttatgcacctgaacttcgccaggagatgatcgaaaaatccaggggcggcaggaccttcccgcaaatcatcatcaacgatgttcccgtcggcggctgcgacgatctgcatgcgctcgatcgtgccggcaagctcgacgatctgctcgcggcctga

SEQ ID NO: 47202 - protein, 88 aa, Sinorhizobium meliloti 1021
METMASVVIYTRQFCGYCTRAKKLLESKGVDFTEYDATYAPELRQEMIEKSRGGRTFPQIIINDVPVGGCDDLHALDRAGKLDDLLAA

SEQ ID NO: 47203 - DNA, 255 bp, Caulobacter crescentus CB15
  CDS (1)..(255): transl_table=11
atggccaaggtcaccatctacacccgccccttctgcccctactgctcgcgcgccgtggcgctgctgaccgacaagggcgccgacttcaccgagatcgaggccggcatggatccggccctgcgccaggaaatgatgcagcgctcgggtcgcaacaccttcccgcagatcttcgtgggcgagcagcacatcggcggctgcgacgacatgatggccctggaagatcagggcaagctggacagccttctgtcggcatga

SEQ ID NO: 47204 - protein, 84 aa, Caulobacter crescentus CB15
MAKVTIYTRPFCPYCSRAVALLTDKGADFTEIEAGMDPALRQEMMQRSGRNTFPQIFVGEQHIGGCDDMMALEDQGKLDSLLSA

SEQ ID NO: 47205 - DNA, 252 bp, Salmonella typhimurium LT2
  CDS (1)..(252): transl_table=11
atggccaatattgaaatctacaccaaagcaacctgcccgttttgccatcgtgcaaaggcgctgttaaacagcaagggcgtgagtttccaggaaattgcgattgacggcgacgccgtgaagcgtgaagagatgatcaaacgtagtggccgaacgacggttccgcaaatttttattgatgcacagcacattggcggttgtgacgacttgtatgcgctggatgcgcgtggtggactggatccgctgttgcgttaa

SEQ ID NO: 47206 - protein, 83 aa, Salmonella typhimurium LT2
MANIEIYTKATCPFCHRAKALLNSKGVSFQEIAIDGDAVKREEMIKRSGRTTVPQIFIDAQHIGGCDDLYALDARGGLDPLLR

SEQ ID NO: 47207 - DNA, 273 bp, Nostoc sp. PCC 7120
  CDS (1)..(273): transl_table=11
atggctgccacagtagaaatttacacttggagaacttgccctttttgcattcgagcaaaaaatttgctcaataacaagggtgttgagtttgttgaatacagtatcgatggtgatgaggaggcaagggataaaatggctcagagagccaatggtagacgctcattaccacaaatttttatcaatgatcgccatgtgggtggttgtgatgatatccatgctcttgaacgtcaaggccaacttgatgagttattagcatctagtactagcctctag

SEQ ID NO: 47208 - protein, 90 aa, Nostoc sp. PCC 7120
MAATVEIYTWRTCPFCIRAKNLLNNKGVEFVEYSIDGDEEARDKMAQRANGRRSLPQIFINDRHVGGCDDIHALERQGQLDELLASSTSL

SEQ ID NO: 47209 - DNA, 312 bp, Nostoc sp. PCC 7120
  CDS (1)..(312): transl_table=11
atgtcgaacttatttaatcaacttttcggacgttctccagcaaaaattaaagccaacgtagagatatacacttggcaaacctgcccctactgcattcgtgccaaattgttactgtggtggaaaggcgtacaatttacagaatataaaattgatggcgacgaagcagctagagctaatatggcagaacgcgccaacggtcgtcgcacagtaccgcaaattttcatcaataaccaacacatcggcggttgtgacgatctttatgagctagatacaaaaggtcaacttgatcccctgctagtacagccagcgtaa

SEQ ID NO: 47210 - protein, 103 aa, Nostoc sp. PCC 7120
MSNLFNQLFGRSPAKIKANVEIYTWQTCPYCIRAKLLLWWKGVQFTEYKIDGDEAARANMAERANGRRTVPQIFINNQHIGGCDDLYELDTKGQLDPLLVQPA

SEQ ID NO: 47211 - DNA, 279 bp, Brucella melitensis 16M
  CDS (1)..(279): transl_table=11
atggagtttctcatggttgacgtcatcatctatacccgccccggctgcccctattgcgcacgggcaaaggcgcttctggcccgaaagggtgccgagttcaatgaaatcgatgcctcggcaacgccggaattgcgcgctgaaatgcaagagcgctccgggcgcaataccttcccgcagatttttatcggctcggttcatgtcggcggctgcgacgatctttatgcactggaagacgagggcaagctcgatagcctgctgaaaaccggcaaacttatttag

SEQ ID NO: 47212 - protein, 92 aa, Brucella melitensis 16M
MEFLMVDVIIYTRPGCPYCARAKALLARKGAEFNEIDASATPELRAEMQERSGRNTFPQIFIGSVHVGGCDDLYALEDEGKLDSLLKTGKLI

SEQ ID NO: 47213 - DNA, 351 bp, Drosophila melanogaster; identical to SEQ ID NO: 2599
  CDS (1)..(351)

SEQ ID NO: 47214 - protein, 116 aa, Drosophila melanogaster; identical to SEQ ID NO: 2600

SEQ ID NO: 47215 - DNA, 345 bp, Drosophila melanogaster; identical to SEQ ID NO: 2967
  CDS (1)..(345)

SEQ ID NO: 47216 - protein, 114 aa, Drosophila melanogaster; identical to SEQ ID NO: 2968

SEQ ID NO: 47217 - DNA, 264 bp, Thermosynechococcus elongatus BP-1
  CDS (1)..(264): transl_table=11
gtggctaaggtcgaaatctatacgtggtctcgttgtcctttttgtattcgggcaaagcaattgctgacgcaaaaaggagtgaagtttacagagtacgtcattgatggagatgaagtagcccgtgacgcgatggcaaaacgagcccatggccggcgatcgctcccgcagatttttattgacaatgaacacattggcggctgtgacgatctctatgccctggaggcgcaaggaaaattggatgccctgttgcaaggggtagcttag

SEQ ID NO: 47218 - protein, 87 aa, Thermosynechococcus elongatus BP-1
MAKVEIYTWSRCPFCIRAKQLLTQKGVKFTEYVIDGDEVARDAMAKRAHGRRSLPQIFIDNEHIGGCDDLYALEAQGKLDALLQGVA

SEQ ID NO: 47219 - DNA, 252 bp, Shigella flexneri 2a str. 301; identical to SEQ ID NO: 10861
  CDS (1)..(252): transl_table=11

SEQ ID NO: 47220 - protein, 83 aa, Shigella flexneri 2a str. 301; identical to SEQ ID NO: 10862

SEQ ID NO: 47221 - DNA, 255 bp, Pseudomonas putida KT2440
  CDS (1)..(255): transl_table=11
atgagccctgtgactatctataccaccccgcactgcccatactgcctgagcgccaagcgactgctgtcgagcaagggcatcacccctgacgaaatcaacgttgaaacgtcacccctgcacctggcggaaatgatgcagcgatcccagcgccgaactgtcccacagatatttgttggcaaggtgcatgtcggcggcttcgatgacttggcgcgtcttgaccgcaagggccagctcgaggcattgcttcacgcttga

SEQ ID NO: 47222 - protein, 84 aa, Pseudomonas putida KT2440
MSPVTIYTTPHCPYCLSAKRLLSSKGITPDEINVETSPLHLAEMMQRSQRRTVPQIFVGKVHVGGFDDLARLDRKGQLEALLHA

SEQ ID NO: 47223 - DNA, 255 bp, Pseudomonas putida KT2440
  CDS (1)..(255): transl_table=11
atgaagcctgtcatcgtctactccagcgactactgcccctactgcatgcgcgccaagtacctgctcgagagcaagggcgtggccttcgaggaaatcaaggtcgacggcaagccgcaggttcgcgccgagatgagtcagaaagccggccgcacgtcggtgccgcagatctggatcggcagcacccatgtcggtggatgcgatgacctctatgccctggagcgcgcgggcaagctcgacgcgttgctggcggcctga

SEQ ID NO: 47224 - protein, 84 aa, Pseudomonas putida KT2440
MKPVIVYSSDYCPYCMRAKYLLESKGVAFEEIKVDGKPQVRAEMSQKAGRTSVPQIWIGSTHVGGCDDLYALERAGKLDALLAA

SEQ ID NO: 47225 - DNA, 273 bp, Escherichia coli CFT073
  CDS (1)..(273): transl_table=11
atgaggagagaaataatgcaaaccgttatttttggtcgtccgggttgcccttactgtgtgcgtgccaaagatctggccgagaaattgagcaatgagcgcgatgatttccagtatcagtatgtagatattcgtgcggaagggatcactaaagaagatctacaacaaaaggcaggtaaacccgtagaaaccgtgccgcagatttttgtcgatcagcaacatatcggcggctataccgattttgctgcatgggtgaaagagaatctggacgcctga

SEQ ID NO: 47226 - protein, 90 aa, Escherichia coli CFT073
MRREIMQTVIFGRPGCPYCVRAKDLAEKLSNERDDFQYQYVDIRAEGITKEDLQQKAGKPVETVPQIFVDQQHIGGYTDFAAWVKENLDA

SEQ ID NO: 47227 - DNA, 270 bp, Vibrio vulnificus CMCP6
  CDS (1)..(270): transl_table=11
atgccaaagattgaaatctacaccaaaagctactgcccacactgtaaagcagccaaacagaccttggcgagcatggggttggtttatcgagaaatcgaagtcagcgatgaccaagcactgtttaacgagatgctaaatcgcagccaacgcagaacggtgccgcaaatttttgtcggcgatgtgcatgttggcgggaatcaagaccttatcacagcaatccgaaaaggccgatttgagaagattctacgtagccaagcaatccgtcactaa

SEQ ID NO: 47228 - protein, 89 aa, Vibrio vulnificus CMCP6
MPKIEIYTKSYCPHCKAAKQTLASMGLVYREIEVSDDQALFNEMLNRSQRRTVPQIFVGDVHVGGNQDLITAIRKGRFEKILRSQAIRH

SEQ ID NO: 47229 - DNA, 252 bp, Pseudomonas syringae pv. tomato str. DC3000
  CDS (1)..(252): transl_table=11
atggctcaagtcatcgtctattccagcgactactgcccgtattgcatacgtgccaagcagctgttgcagagcaagagcgtggccttcgaagaaatccgggtcgacggcaagccgcaattgcgcgccgaaatgaccaagaaggccggtcgtacttctgtaccgcagatctggatcggcccgacccacgtgggcggctgcgatgacctgtttgctctggaacgtgccggcaagcttgatgccctgctggcctga

SEQ ID NO: 47230 - protein, 83 aa, Pseudomonas syringae pv. tomato str. DC3000
MAQVIVYSSDYCPYCIRAKQLLQSKSVAFEEIRVDGKPQLRAEMTKKAGRTSVPQIWIGPTHVGGCDDLFALERAGKLDALLA

SEQ ID NO: 47231 - DNA, 267 bp, Vibrio parahaemolyticus RIMD 2210633
  CDS (1)..(267): transl_table=11
atgttcgttgttatttttggtcgtcctgcatgtccttactgtgttcgcgctaaagaacacgcagaaacactaaaagctaaacgtgatgactttaactaccgttacgttgatatccaagctgaaggcatttctaaagcagaccttgagaagacagttggcaaaccagttgaaactgttcctcaaatcttcatcgaccaagaacacatcggtggttgtgacgatttcgaagcttacgcgaaagagcacctaggtctattcgacgagtaa

SEQ ID NO: 47232 - protein, 88 aa, Vibrio parahaemolyticus RIMD 2210633
MFVVIFGRPACPYCVRAKEHAETLKAKRDDFNYRYVDIQAEGISKADLEKTVGKPVETVPQIFIDQEHIGGCDDFEAYAKEHLGLFDE

SEQ ID NO: 47233 - DNA, 258 bp, Nitrosomonas europaea ATCC 19718
  CDS (1)..(258): transl_table=11
atgcccaagattgtaatgtatgtctccgggtactgtccttattgcactatggcggagaagttgctgcgtgcgagaggggtcgaggagatcgaaaaaatcagggtggatctgcaaccggggctgcgtgccgagatgatgcagcgtaccggacggcgaaccgttccgcagatttatatcggcccggtgcatgtcggggggtacgacgatctggcaatgctggaccgccagggggaactgagcggattgctggctggctaa

SEQ ID NO: 47234 - protein, 85 aa, Nitrosomonas europaea ATCC 19718
MPKIVMYVSGYCPYCTMAEKLLRARGVEEIEKIRVDLQPGLRAEMMQRTGRRTVPQIYIGPVHVGGYDDLAMLDRQGELSGLLAG

SEQ ID NO: 47235 - DNA, 234 bp, Wigglesworthia glossinidia endosymbiont of Glossina brevipalpis
  CDS (1)..(234): transl_table=11
atgaaaaatgtagaaatttatattaaaagtacatgttctttttgtgtaaaagcaaaaaatttattaaaacaaaataatataaaatttaaagaaatttttgtggaaaacagtacagctaatttatcaaaaatgataaaaagaagcaaaaaaacaactgtccctcaaatatttattaataaagtacatataggagggtatgaagatttgattatatttttaaaaaaaaatatataa

SEQ ID NO: 47236 - protein, 77 aa, Wigglesworthia glossinidia endosymbiont of Glossina brevipalpis
MKNVEIYIKSTCSFCVKAKNLLKQNNIKFKEIFVENSTANLSKMIKRSKKTTVPQIFINKVHIGGYEDLIIFLKKNI

SEQ ID NO: 47237 - DNA, 267 bp, Candidatus Blochmannia floridanus
  CDS (1)..(267): transl_table=11
atgtcatatgatattgttatttatacaaaaaagaattgtccttattgtgatagggctaagttttttttagtagaacaatctttaatatttaaagaaattgttttaagtgatgataaatcggatcctgcatatttggaaatgtataatagatcaaaggggtgtgttacagttcctcaggtttttattaataataatcatgttggagggtcagatgatttattaaaattaggtaggaatcggaaggatttagaacaattattgaaataa

SEQ ID NO: 47238 - protein, 88 aa, Candidatus Blochmannia floridanus
MSYDIVIYTKKNCPYCDRAKFFLVEQSLIFKEIVLSDDKSDPAYLEMYNRSKGCVTVPQVFINNNHVGGSDDLLKLGRNRKDLEQLLK

SEQ ID NO: 47239 - DNA, 294 bp, Bordetella bronchiseptica RB50; identical to SEQ ID NO: 20372
  CDS (1)..(294): transl_table=11

SEQ ID NO: 47240 - protein, 97 aa, Bordetella bronchiseptica RB50; identical to SEQ ID NO: 20373

SEQ ID NO: 47241 - DNA, 258 bp, Synechococcus sp. WH 8102
  CDS (1)..(258): transl_table=11
atggccaaggtcgagatctacacctggcgcacctgccccttctgcgttcgcgccaagggtctgttggaccgcaaaggtgtgagttacaccgagcatgccgtggatggtgacgaacccggccgcgatgccatggccgcccgtggtgatggccgccgcagtgttccccagatcttcatcgacgaccgtcacatcggtggttgcgatgacctccacgccctcgagcggtccggtgagctcgatcccctgctgaacgcctga

SEQ ID NO: 47242 - protein, 85 aa, Synechococcus sp. WH 8102
MAKVEIYTWRTCPFCVRAKGLLDRKGVSYTEHAVDGDEPGRDAMAARGDGRRSVPQIFIDDRHIGGCDDLHALERSGELDPLLNA

SEQ ID NO: 47243 - DNA, 258 bp, Chromobacterium violaceum ATCC 12472
  CDS (1)..(258): transl_table=11
atgaaaccggtaaccatgtacaccacggcggtctgcccgtactgcgtgcgcgccaagcagctgctggccagcaagggcgtgggcggcatcaacgagatccgcatcgacctcgacccggacgcgcgcgacaagatgatggcgctgaccggccgccgcaccgtgccgcagatcttcatcggcgacacccatgtcggcggttgcgacgacctggtcgcgctgaaccaggccggcaagctggacccgctgctggctgactga

SEQ ID NO: 47244 - protein, 85 aa, Chromobacterium violaceum ATCC 12472
MKPVTMYTTAVCPYCVRAKQLLASKGVGGINEIRIDLDPDARDKMMALTGRRTVPQIFIGDTHVGGCDDLVALNQAGKLDPLLAD

SEQ ID NO: 47245 - DNA, 264 bp, Gloeobacter violaceus PCC 7421
  CDS (1)..(264): transl_table=11
atgaaccccaaggttgaaatttatacctggcaattctgtccgttctgcattcgtgcaaaggctctgctcaagcaaaaaagtgtagcctttagcgaatacgccatcgacggcgacgaggctgcgcgctcggcgatggccgagcgcgccgacggcaggcgcagtgtgccgcagatatttatcgacggcaagcacatcggcggttgcgacgatctatacgccctcgatcgctccggccagctcgatccgctgcttgtcgcttcatga

SEQ ID NO: 47246 - protein, 87 aa, Gloeobacter violaceus PCC 7421
MNPKVEIYTWQFCPFCIRAKALLKQKSVAFSEYAIDGDEAARSAMAERADGRRSVPQIFIDGKHIGGCDDLYALDRSGQLDPLLVAS

SEQ ID NO: 47247 - DNA, 276 bp, Rhodopseudomonas palustris CGA009
  CDS (1)..(276): transl_table=11
atgcccgcagcgatcgagatcttcacccgccccggctgcggctattgcagcgccgccaagtcgctcctcaaccgcaagaaggcggccttcaccgagtacgacgtcgcggtcgatccgggcttccgggtgaagatggacgagcgcgccggccccggcgccacctatccgcagatcttcatcggcgacctccacgtcggcggctgtgatgatctctatgcgctcgaccgcgagggcaagctcgatgcgctgctcgccgacgagaaggcggcgtcatga

SEQ ID NO: 47248 - protein, 91 aa, Rhodopseudomonas palustris CGA009
MPAAIEIFTRPGCGYCSAAKSLLNRKKAAFTEYDVAVDPGFRVKMDERAGPGATYPQIFIGDLHVGGCDDLYALDREGKLDALLADEKAAS

SEQ ID NO: 47249 - DNA, 339 bp, Wolbachia endosymbiont of Drosophila melanogaster
  CDS (1)..(339): transl_table=11
gtgaaaaatgttgtgatatatgtaaagaagggctgtccatactgcataaggggaaaggatttactagataaaaaaggtgtgaagtatgaagaaattgatgtgctcaaaaactcagatctatttaacgacataaaatcaaagtataacgttagaacagttccacagatttttatcaacgataagcacattggggggtgtgacaaattgatggatcttgaaaaagaaggaaagttggatgatatgctaaataataatgacaatcacactgatgtcacaacctacacaaacagcaatgatgaatgtggagagtgtgttataccacatgatgattttatgtaa

SEQ ID NO: 47250 - protein, 112 aa, Wolbachia endosymbiont of Drosophila melanogaster
MKNVVIYVKKGCPYCIRGKDLLDKKGVKYEEIDVLKNSDLFNDIKSKYNVRTVPQIFINDKHIGGCDKLMDLEKEGKLDDMLNNNDNHTDVTTYTNSNDECGECVIPHDDFM

SEQ ID NO: 47251 - DNA, 297 bp, Bdellovibrio bacteriovorus HD100
  CDS (1)..(297): transl_table=11
atgaaaccttgtctcccccacctacctatgtcaaaaagaattatggcaaaagtattaatctacaagaaaatcccttgtccttactgcgatcgcgcgatgcacctcatggatgaccgaggcatcgactatgacgtggtggatctgaccgataaacctgaagaaattgaaagaatcaaaaccgaaaccggctggagaactgtgccgatcatcatgatcaacggcaaattgatcggcggctatacggatttgaaagccttggacgaagaaggcaaactgatgcccctgctgcaagagtag

SEQ ID NO: 47252 - protein, 98 aa, Bdellovibrio bacteriovorus HD100
MKPCLPHLPMSKRIMAKVLIYKKIPCPYCDRAMHLMDDRGIDYDVVDLTDKPEEIERIKTETGWRTVPIIMINGKLIGGYTDLKALDEEGKLMPLLQE

SEQ ID NO: 47253 - DNA, 312 bp, Strongylocentrotus purpuratus; identical to SEQ ID NO: 2603
  CDS (1)..(312)

SEQ ID NO: 47254 - protein, 103 aa, Strongylocentrotus purpuratus; identical to SEQ ID NO: 2604

SEQ ID NO: 47255 - DNA, 381 bp, Strongylocentrotus purpuratus; identical to SEQ ID NO: 2605
  CDS (1)..(381)

SEQ ID NO: 47256 - protein, 126 aa, Strongylocentrotus purpuratus; identical to SEQ ID NO: 2606

SEQ ID NO: 47257 - DNA, 321 bp, Strongylocentrotus purpuratus; identical to SEQ ID NO: 2607
  CDS (1)..(321)

SEQ ID NO: 47258 - protein, 106 aa, Strongylocentrotus purpuratus; identical to SEQ ID NO: 2608

SEQ ID NO: 47259 - DNA, 297 bp, Nasonia vitripennis; identical to SEQ ID NO: 2609
  CDS (1)..(297)

SEQ ID NO: 47260 - protein, 98 aa, Nasonia vitripennis; identical to SEQ ID NO: 2610

SEQ ID NO: 47261 - DNA, 339 bp, Anopheles gambiae str. PEST; identical to SEQ ID NO: 2611
  CDS (1)..(339)

SEQ ID NO: 47262 - protein, 112 aa, Anopheles gambiae str. PEST; identical to SEQ ID NO: 2612

SEQ ID NO: 47263 - DNA, 321 bp, Gibberella zeae PH-1; identical to SEQ ID NO: 2617
  CDS (1)..(321)

SEQ ID NO: 47264 - protein, 106 aa, Gibberella zeae PH-1; identical to SEQ ID NO: 2618

SEQ ID NO: 47265 - DNA, 681 bp, Candida glabrata CBS 138; identical to SEQ ID NO: 4972
  CDS (1)..(681)

SEQ ID NO: 47266 - protein, 226 aa, Candida glabrata CBS 138; identical to SEQ ID NO: 4973

SEQ ID NO: 47267 - DNA, 324 bp, Kluyveromyces lactis NRRL Y-1140; identical to SEQ ID NO: 3321
  CDS (1)..(324)

SEQ ID NO: 47268 - protein, 107 aa, Kluyveromyces lactis NRRL Y-1140; identical to SEQ ID NO: 3322

SEQ ID NO: 47269 - DNA, 342 bp, Debaryomyces hansenii CBS767; identical to SEQ ID NO: 2621
  CDS (1)..(342)

SEQ ID NO: 47270 - protein, 113 aa, Debaryomyces hansenii CBS767; identical to SEQ ID NO: 2622

SEQ ID NO: 47271 - DNA, 318 bp, Yarrowia lipolytica CLIB122; identical to SEQ ID NO: 2625
  CDS (1)..(318)

SEQ ID NO: 47272 - protein, 105 aa, Yarrowia lipolytica CLIB122; identical to SEQ ID NO: 2626

SEQ ID NO: 47273 - DNA, 309 bp, Aspergillus nidulans FGSC A4; identical to SEQ ID NO: 2629
  CDS (1)..(309)

SEQ ID NO: 47274 - protein, 102 aa, Aspergillus nidulans FGSC A4; identical to SEQ ID NO: 2630

SEQ ID NO: 47275 - DNA, 690 bp, Candida albicans SC5314; identical to SEQ ID NO: 2631
  CDS (1)..(690): transl_table=12

SEQ ID NO: 47276 - protein, 229 aa, Candida albicans SC5314; identical to SEQ ID NO: 2632

SEQ ID NO: 47277 - DNA, 360 bp, Candida albicans SC5314; identical to SEQ ID NO: 2633
  CDS (1)..(360): transl_table=12

SEQ ID NO: 47278 - protein, 119 aa, Candida albicans SC5314; identical to SEQ ID NO: 2634

SEQ ID NO: 47279 - DNA, 309 bp, Ustilago maydis 521; identical to SEQ ID NO: 2635
  CDS (1)..(309)

SEQ ID NO: 47280 - protein, 102 aa, Ustilago maydis 521; identical to SEQ ID NO: 2636

SEQ ID NO: 47281 - DNA, 384 bp, Candida albicans SC5314; identical to SEQ ID NO: 3720
  CDS (1)..(384): transl_table=12

SEQ ID NO: 47282 - protein, 127 aa, Candida albicans SC5314; identical to SEQ ID NO: 3721

SEQ ID NO: 47283 - DNA, 471 bp, Candida albicans SC5314; identical to SEQ ID NO: 2639
  CDS (1)..(471): transl_table=12

SEQ ID NO: 47284 - protein, 156 aa, Candida albicans SC5314; identical to SEQ ID NO: 2640

SEQ ID NO: 47285 - DNA, 264 bp, Prochlorococcus marinus str. MIT 9303
  CDS (1)..(264): transl_table=11
atggccaaggttgagatctatacctggcagtcatgccctttctgcctgcgtgccaaggctctcttggatcgcaaaggggtgagttaccaggagcacgccatcgatggcgaccaggatgcccgcgcagcgatggcgaaccgggctggggggagtaacacgttgccccagatctttatcgatgatctgagcatcggtggctgcgatgagttgcatgcccttgagggggctcaaaaacttgatggtttgctccaaggcaagggctga

SEQ ID NO: 47286 - protein, 87 aa, Prochlorococcus marinus str. MIT 9303
MAKVEIYTWQSCPFCLRAKALLDRKGVSYQEHAIDGDQDARAAMANRAGGSNTLPQIFIDDLSIGGCDELHALEGAQKLDGLLQGKG

SEQ ID NO: 47287 - DNA, 264 bp, Herminiimonas arsenicoxydans
  CDS (1)..(264): transl_table=11
atgactgcgcatgtagtgatgtatagctctggtgtctgtccgtattgcacgatggcggaacgcctgttgacggccaagggcatcagcaatattgaaaaaattcgtatcgatctcgatcccgcgcaacgcgccgcaatgatgcagaaaaccggtcgccgcaccgtgccgcagatttatgtcggcgatacgcatgtgggcggcttcgacgatctgaacgcgctggaacgcctcggcaagctggatgcattgctgcagggcgcctga

SEQ ID NO: 47288 - protein, 87 aa, Herminiimonas arsenicoxydans
MTAHVVMYSSGVCPYCTMAERLLTAKGISNIEKIRIDLDPAQRAAMMQKTGRRTVPQIYVGDTHVGGFDDLNALERLGKLDALLQGA

SEQ ID NO: 47289 - DNA, 276 bp, Bradyrhizobium sp. ORS278
  CDS (1)..(276): transl_table=11
atgaccgctgcgatcgaaatctatacccgtccggggtgcggctactgcacggccgccaaatcgctcctgacccgcaagaacgtccctttcaccgaatacgacgcgggcaaggatccgaacgtccggcagcagatgtatgatcgcgttggcccgggctcgaccttcccgcagatcttcatcggcaagacccatatcggcggctgcgacgatctctatgcgctcgatcgcgagggcaggctcgacgccatgctggctggagacaaggcgacatcatga

SEQ ID NO: 47290 - protein, 91 aa, Bradyrhizobium sp. ORS278
MTAAIEIYTRPGCGYCTAAKSLLTRKNVPFTEYDAGKDPNVRQQMYDRVGPGSTFPQIFIGKTHIGGCDDLYALDREGRLDAMLAGDKATS

SEQ ID NO: 47291 - DNA, 255 bp, Synechococcus sp. WH 7803
  CDS (1)..(255): transl_table=11
atgccgagcgtcgagatctacacctggcgcacctgtccgttttgtgtgcgcgccaagcagctgctggatcgcaagggtgtcacctacaccgagtactccgtggatggtgatgagccggcccgcgatgccatggcagcacggggtaatggtcgccgcagtgtgccccagatcttcattgcggatcagcacatcggcggttgcgatgaactccatgctcttgaacgggccgggaaactcgatgccctgctctcctga

SEQ ID NO: 47292 - protein, 84 aa, Synechococcus sp. WH 7803
MPSVEIYTWRTCPFCVRAKQLLDRKGVTYTEYSVDGDEPARDAMAARGNGRRSVPQIFIADQHIGGCDELHALERAGKLDALLS

SEQ ID NO: 47293 - DNA, 258 bp, Bartonella henselae str. Houston-1
  CDS (1)..(258): transl_table=11
atgaaagaaatcatactttatacacgtcctaactgtccttactgcaagagagcacgtgatttgcttgataaaaaaggtgtaaaatatacagatattgacgcatcaacttctcttcgccaagaaatggtgcagcgagcgaatgggcgtaatacatttccacaaatttttataggtgattatcatgttggcggttgtgatgatctttacgctttagaaaataaagggaagctcgattctttgttgcaggacgtacattaa

SEQ ID NO: 47294 - protein, 85 aa, Bartonella henselae str. Houston-1
MKEIILYTRPNCPYCKRARDLLDKKGVKYTDIDASTSLRQEMVQRANGRNTFPQIFIGDYHVGGCDDLYALENKGKLDSLLQDVH

SEQ ID NO: 47295 - DNA, 258 bp, Acinetobacter sp. ADP1
  CDS (1)..(258): transl_table=11
atggcggcaaatatcaccatttattcgaccacggtgtgtccgtattgcattcgtgcaaaacaactacttgagcgcaaaggcgttaaatataaagaaatcaatctgtccaatgaagcaccagaagtacgtgttgaattaatgcaacgcacccatcaccgtacagtgcctcaaatttttatcaatgaccagtttattggcggttttgatcagctttatgctttagagcgtgatggtaaactcgacgaattattggcttaa

SEQ ID NO: 47296 - protein, 85 aa, Acinetobacter sp. ADP1
MAANITIYSTTVCPYCIRAKQLLERKGVKYKEINLSNEAPEVRVELMQRTHHRTVPQIFINDQFIGGFDQLYALERDGKLDELLA

SEQ ID NO: 47297 - DNA, 267 bp, Erwinia carotovora subsp. atroseptica SCRI1043
  CDS (1)..(267): transl_table=11
atgttcgctgtaattttcgggcgccctgcttgcccttattgtgtacgtgcgaaagaactggcagagaaactggccgagcaacgtgatgacttcagcttccgctatgtagacattcacgccgaaggcatttcgaaagaagatttgtccaagacggtaggaaaaccggttgaaactgtaccgcagattttcctggatgaaaaacacatcggcggctgcactgattttgaagcttatgccaaagagcatctggcgctgttccagtcataa

SEQ ID NO: 47298 - protein, 88 aa, Erwinia carotovora subsp. atroseptica SCRI1043
MFAVIFGRPACPYCVRAKELAEKLAEQRDDFSFRYVDIHAEGISKEDLSKTVGKPVETVPQIFLDEKHIGGCTDFEAYAKEHLALFQS

SEQ ID NO: 47299 - DNA, 255 bp, Legionella pneumophila subsp. pneumophila str. Philadelphia 1
  CDS (1)..(255): transl_table=11
atgaatgaagtcatactctacactacaggctattgtccttattgcatcaaagcaaaagaactactagatagaaaaaaggttatctataccgaaatccgcgtcgatttacagcctgaattacgtgaagaaatgatacaaaaaagtggccggcgtacagtgcctcaaattttcattaatggccaggcaattggtggctgcgatgatttatatgccctggaagcccagggaacattaaatgaacttttaaaaaaatag

SEQ ID NO: 47300 - protein, 84 aa, Legionella pneumophila subsp. pneumophila str. Philadelphia 1
MNEVILYTTGYCPYCIKAKELLDRKKVIYTEIRVDLQPELREEMIQKSGRRTVPQIFINGQAIGGCDDLYALEAQGTLNELLKK

SEQ ID NO: 47301 - DNA, 261 bp, Azoarcus sp. EbN1
  CDS (1)..(261): transl_table=11
atggcaaaaatcagaatgtatgccacgaacgtgtgcccctactgtgtgcgtgccgaacagctcctcaagcgcaaaggcgtgaccgacatcgagaagatccgcgtcgatcaggacccgtcgttgcgcgacgagatgatcaggctcaccgggcgccggacggtaccgcaaatcttcatcggcgacctgcatgtcggcggttgcgacgatctgttcgatcttgaccacgccggcaaactcgattccttgttggccgcgccctga

SEQ ID NO: 47302 - protein, 86 aa, Azoarcus sp. EbN1
MAKIRMYATNVCPYCVRAEQLLKRKGVTDIEKIRVDQDPSLRDEMIRLTGRRTVPQIFIGDLHVGGCDDLFDLDHAGKLDSLLAAP

SEQ ID NO: 47303 - DNA, 261 bp, Silicibacter pomeroyi DSS-3; identical to SEQ ID NO: 5010
  CDS (1)..(261): transl_table=11

SEQ ID NO: 47304 - protein, 86 aa, Silicibacter pomeroyi DSS-3; identical to SEQ ID NO: 5011

SEQ ID NO: 47305 - DNA, 288 bp, Ehrlichia ruminantium str. Welgevonden
  CDS (1)..(288): transl_table=11
atgatatccacaaacacgtggttaaacattataggatatgcagtgacaaaggttataatatatactaaagacttttgttcttattgtactaaagcaaaggctttattcaatagaaaaaatataccatttgaagaaattaatataacaggcaacagtacccttaaagatgaaatgatacaaaaatccaatggtatgaaaaccttacctcaaatatttattaatgatgtacacataggtgggtgtgatgacttatatagactatatgaatctggtcaattaaagttatag

SEQ ID NO: 47306 - protein, 95 aa, Ehrlichia ruminantium str. Welgevonden
MISTNTWLNIIGYAVTKVIIYTKDFCSYCTKAKALFNRKNIPFEEINITGNSTLKDEMIQKSNGMKTLPQIFINDVHIGGCDDLYRLYESGQLKL

SEQ ID NO: 47307 - DNA, 258 bp, Neisseria gonorrhoeae FA 1090
  CDS (1)..(258): transl_table=11
atgcagaccgttaccatgtacacaggtccgttttgcccctactgcgcgatggcgaaaaggctgctgcacgcggcaggtgtcggacatatcgacgaaatccgtgtcgatgcaagccccgaagcctttgccgaaatgcagcggctttcgggacagcgcagcgtgccgcagattttcatcggcgaaacgcacgtcggaggatttaccgacctctaccgccttcagcaggaaggcgggctggacggactgctgaacccttaa

SEQ ID NO: 47308 - protein, 85 aa, Neisseria gonorrhoeae FA 1090
MQTVTMYTGPFCPYCAMAKRLLHAAGVGHIDEIRVDASPEAFAEMQRLSGQRSVPQIFIGETHVGGFTDLYRLQQEGGLDGLLNP

SEQ ID NO: 47309 - DNA, 252 bp, Pseudomonas syringae pv. syringae B728a
  CDS (1)..(252): transl_table=11
atggctcaagtcatcgtctattccagcgactactgcccgtattgcatacgtgccaaacagcttctgcagagcaagagcgtggccttcgaggaaatccgggtcgacggcaagccgcagctgcgtgccgaaatgacccagaaggccggtcgtacttccgtaccgcaaatctggatcggttcgacccacgtgggcggctgcgatgacctgttcgctctggagcgtgccggcaagctcgatgcgctgctggcctga

SEQ ID NO: 47310 - protein, 83 aa, Pseudomonas syringae pv. syringae B728a
MAQVIVYSSDYCPYCIRAKQLLQSKSVAFEEIRVDGKPQLRAEMTQKAGRTSVPQIWIGSTHVGGCDDLFALERAGKLDALLA

SEQ ID NO: 47311 - DNA, 264 bp, Psychrobacter arcticus 273-4
  CDS (1)..(264): transl_table=11
atgactgtatctgttaaagtttacaccacccctatctgcccatactgctcaaacgccaagcaattgcttaaatcaaaaggtgttgattatgaagagattggtatgcacgacatgagtagcgatgatcgtcgtgctttgatgcaaaaaaccaataactatcgcaccgtgccacaaattttcgttggtgagacctttgtcggtggttttgatgagctgaatcaaatgaaccaacaaggcaaacttgacgagctattagcgggttaa

SEQ ID NO: 47312 - protein, 87 aa, Psychrobacter arcticus 273-4
MTVSVKVYTTPICPYCSNAKQLLKSKGVDYEEIGMHDMSSDDRRALMQKTNNYRTVPQIFVGETFVGGFDELNQMNQQGKLDELLAG

SEQ ID NO: 47313 - DNA, 243 bp, Colwellia psychrerythraea 34H
  CDS (1)..(243): transl_table=11
atggcaaagatagagatatatacccgacctggctgtggttactgtactcacgctaaacggttattaaccaataaagggttggattatgttgaatacgatgtttatgaaaacccaatgtacatacaagagttacagcaaagaacaacgggcagaacctaccctcagatatttatcgaagagttatcggtgggtggttttactgaattactagaaaatgaacaatttaacttactaaaaaaatag

SEQ ID NO: 47314 - protein, 80 aa, Colwellia psychrerythraea 34H
MAKIEIYTRPGCGYCTHAKRLLTNKGLDYVEYDVYENPMYIQELQQRTTGRTYPQIFIEELSVGGFTELLENEQFNLLKK

SEQ ID NO: 47315 - DNA, 261 bp, Colwellia psychrerythraea 34H
  CDS (1)..(261): transl_table=11
atggcaaaagttgaaatatataccaaagaatattgtccttattgtactcatgctgttgccttattaaagagtaaacagacagaatataatgaaattaagattgatgatgatatggaaatgcgtagcaccatgattgaacgcactaatggtggctacacagtgccacaaatattcattaatgatgttcatattggcggttgcgatcaattagtcgccttagaaagaaatactcaattagatgcgcttttagacgcaaaataa

SEQ ID NO: 47316 - protein, 86 aa, Colwellia psychrerythraea 34H
MAKVEIYTKEYCPYCTHAVALLKSKQTEYNEIKIDDDMEMRSTMIERTNGGYTVPQIFINDVHIGGCDQLVALERNTQLDALLDAK

SEQ ID NO: 47317 - DNA, 261 bp, Dechloromonas aromatica RCB
  CDS (1)..(261): transl_table=11
atgactgcgcctgtgctgatgtacacgacggcggtctgcccttactgcattcgtgccaagcagttgctcgccgcacgtggggtgacgcagatcgaggaggttcgggttgatctagatcccgagcgccgcgatgaaatgatgctgaaaaccaagcggcgtaccgtaccgcagatcttcatcggtgacacccacgtgggtggctgtgacgatctttacgctctcgatgcagcgggccagttgaagcccctgctcgaaggttga

SEQ ID NO: 47318 - protein, 86 aa, Dechloromonas aromatica RCB
MTAPVLMYTTAVCPYCIRAKQLLAARGVTQIEEVRVDLDPERRDEMMLKTKRRTVPQIFIGDTHVGGCDDLYALDAAGQLKPLLEG

SEQ ID NO: 47319 - DNA, 258 bp, Ralstonia eutropha JMP134
  CDS (1)..(258): transl_table=11
atggcccgcgtcgtcatgtacagcacgcaggtgtgcccttattgcgtgatggctgagcgcttgctcaagtccaagggcgtcgagacgatcgagaaggtcctgatcgaccgtgaacccggcaagcgcgaggaaatgatgtcgcgcaccggtcgccgcaccgtgccccagatctatatcggcgacacccacgttggcggtttcgacgatctctccgcgctggaccgccagggcggactgacgccgctgctggccgcctga

SEQ ID NO: 47320 - protein, 85 aa, Ralstonia eutropha JMP134
MARVVMYSTQVCPYCVMAERLLKSKGVETIEKVLIDREPGKREEMMSRTGRRTVPQIYIGDTHVGGFDDLSALDRQGGLTPLLAA

SEQ ID NO: 47321 - DNA, 264 bp, Thiobacillus denitrificans ATCC 25259
  CDS (1)..(264): transl_table=11
atggctaaagtcgtgatgtactgcaccgccgtctgcccgtattgcgtcgccgccgagcggctgctgaaaagccgcggcgtcgccgaaatcgaaaagattcgcgtcgacctcgacccctcccgcatggacgagatgatcgagcgctcgggcgggcgccgtaccgtgccccaggtgttcatcggcgacacccacgtcggcggcttcgacgacacctccgcgctcgacgcggccggcgagctgctgccgttgctcgcgcgcgactga

SEQ ID NO: 47322 - protein, 87 aa, Thiobacillus denitrificans ATCC 25259
MAKVVMYCTAVCPYCVAAERLLKSRGVAEIEKIRVDLDPSRMDEMIERSGGRRTVPQVFIGDTHVGGFDDTSALDAAGELLPLLARD

SEQ ID NO: 47323 - DNA, 261 bp, Anabaena variabilis ATCC 29413
  CDS (1)..(261): transl_table=11
atggctgccacagtagaaatttacacttggagaacttgccctttttgcattcgagcgaaaaatctgctgaataacaagggtgttgagtttgtcgaatacagcattgatggtgatgaggaagcgcgggataaaatggctcagagagctaatggcagacgctcattaccacaaattttcatcaacgatcgccatgtaggtggttgtgatgatatccacgctcttgaacgtcaaggccaacttgatgagttattagcaatctaa

SEQ ID NO: 47324 - protein, 86 aa, Anabaena variabilis ATCC 29413
MAATVEIYTWRTCPFCIRAKNLLNNKGVEFVEYSIDGDEEARDKMAQRANGRRSLPQIFINDRHVGGCDDIHALERQGQLDELLAI

SEQ ID NO: 47325 - DNA, 312 bp, Anabaena variabilis ATCC 29413
  CDS (1)..(312): transl_table=11
atgttgaacttatttaatcaatttttcggacgttctccagaaaaaattaaagccaacgtagagatatatacttggcaaacctgcccctactgcattcgtgccaaattgttactgtggtggaaaggcgtacaatttacagaatataaaatcgatggcgacgaagcagccagagctaatatggcagaacgcgccaacggtcgtcgcacagtaccacaaattttcatcaataaccaacacatcggtggttgtgacgatctttatgagctagatacaaaaggtcaacttgatcctctactagtacagccagcgtaa

SEQ ID NO: 47326 - protein, 103 aa, Anabaena variabilis ATCC 29413
MLNLFNQFFGRSPEKIKANVEIYTWQTCPYCIRAKLLLWWKGVQFTEYKIDGDEAARANMAERANGRRTVPQIFINNQHIGGCDDLYELDTKGQLDPLLVQPA

SEQ ID NO: 47327 - DNA, 255 bp, Pseudomonas fluorescens PfO-1
  CDS (1)..(255): transl_table=11
atgagcgacgtcatcgtctactccagcgattactgcccttactgctcgcgcgccaagtacctgctcgcgaacaaaggcgtggccttcgaagagatcaaggtcgatggcaagccgcaggtgcgcgccgccatggcccagaaggccggacgcacgtccgtgccgcagatctggatcggcgacacccatgtcggcggatgtgatgatttgtatgccctggagcgtgccggcaagctcgacgcgctgctcaaggcctga

SEQ ID NO: 47328 - protein, 84 aa, Pseudomonas fluorescens PfO-1
MSDVIVYSSDYCPYCSRAKYLLANKGVAFEEIKVDGKPQVRAAMAQKAGRTSVPQIWIGDTHVGGCDDLYALERAGKLDALLKA

SEQ ID NO: 47329 - DNA, 258 bp, Rhodobacter sphaeroides 2.4.1
  CDS (1)..(258): transl_table=11
atgaagtccgtcgagatctacacgacgcccacctgcggctattgtcaggcggccaagtcgctgctgcgccgcaagggcgtgagctatgccgagaccgacgtcagcaccgatccctcgctgcgcgccgccatgacccagcgggcgcatggccggcggaccgtgccgcagatcttcatcggcggccagcatgtcggcggatgcgacgatctctatgcgctcgaggatgcgggcaagctcgacccgatgctggcagactga

SEQ ID NO: 47330 - protein, 85 aa, Rhodobacter sphaeroides 2.4.1
MKSVEIYTTPTCGYCQAAKSLLRRKGVSYAETDVSTDPSLRAAMTQRAHGRRTVPQIFIGGQHVGGCDDLYALEDAGKLDPMLAD

SEQ ID NO: 47331 - DNA, 258 bp, Synechococcus sp. CC9605
  CDS (1)..(258): transl_table=11
atggccaaggttgagatctacacctggcgcacctgcccgttctgcgtccgcgccaaggggctcttggatcgcaagggagtgagctacaccgaacacagcgtggatggggatgagcccgctcgggatgccatggcggcccggggtgatggtcgccgcagcgttccgcaggtgtacatcgacgatcgccacattggcggttgcgatgacctccacgccctggatcgtggcggtgagcttgatgcgctgctgaaggcctga

SEQ ID NO: 47332 - protein, 85 aa, Synechococcus sp. CC9605
MAKVEIYTWRTCPFCVRAKGLLDRKGVSYTEHSVDGDEPARDAMAARGDGRRSVPQVYIDDRHIGGCDDLHALDRGGELDALLKA

SEQ ID NO: 47333 - DNA, 264 bp, Synechococcus elongatus PCC 7942
  CDS (1)..(264): transl_table=11
gtggccaacgtcgaaatttacacttggagcgcttgccccttctgtgttcgggcgaaagcgctgctcactcgcaagggtgtggcgtttcaggaatacgtgattgacggagacgaagcagcacgagcagtcatggctcagcgtgcgaacggtcgccggagtgtgccgcaaattttcattgatgaccagcacatcggtggttgcgacgacctgcatgccctcgatcgccaaggtggtcttgatccgctattgggtcttagcgcgtga

SEQ ID NO: 47334 - protein, 87 aa, Synechococcus elongatus PCC 7942
MANVEIYTWSACPFCVRAKALLTRKGVAFQEYVIDGDEAARAVMAQRANGRRSVPQIFIDDQHIGGCDDLHALDRQGGLDPLLGLSA

SEQ ID NO: 47335 - DNA, 267 bp, Rhodospirillum rubrum ATCC 11170
  CDS (1)..(267): transl_table=11
atggttgccgttgagattttcaccaccccgagctgtccctattgtcggcgcgccaaggcgctgctgggcgacaagggggtggcctatcgcgagatcgatgtgtcgggcgatccccggttgcgcgaggagatgacccggcgggccggcgggcgcagcaccgttccgcagatcttcatcgacggccgggccttgggcggctgcgatgacatccacgcccttgaccgcctgggcaagcttgatggtcttctgtcgggaagcgcgccatga

SEQ ID NO: 47336 - protein, 88 aa, Rhodospirillum rubrum ATCC 11170
MVAVEIFTTPSCPYCRRAKALLGDKGVAYREIDVSGDPRLREEMTRRAGGRSTVPQIFIDGRALGGCDDIHALDRLGKLDGLLSGSAP

SEQ ID NO: 47337 - DNA, 252 bp, Burkholderia thailandensis E264
  CDS (1)..(252): transl_table=11
gtggtcatgtacagcacgcaggtgtgcccgtattgcatgcaggccgagcggctcctcaagctgcgcggcgtcgagcacgtcgagaaggtgctgatcgacaaggagccggagcgccgcgcggaaatgatggagcgcaccggccgccgcaccgtgccgcaaatctatatcggcgacacgcacgtcggcggctacgacgatttgtcgaagctcgaccgcgaaggcggcctgaagccgcttctcgaagccgcctga

SEQ ID NO: 47338 - protein, 83 aa, Burkholderia thailandensis E264
MVMYSTQVCPYCMQAERLLKLRGVEHVEKVLIDKEPERRAEMMERTGRRTVPQIYIGDTHVGGYDDLSKLDREGGLKPLLEAA

SEQ ID NO: 47339 - DNA, 267 bp, Novosphingobium aromaticivorans DSM 12444
  CDS (1)..(267): transl_table=11
atgcccaatatgcccaaggttgaaatgtacaccaagtggggctgcccctactgctttcgcgccaagcaactgctggacggcaagggcgtatcctacgaggaaatcgacgtgacgatgggcgggccgaagaagaccgagatgctcgagcgcgcgccagggcacaccaccgttccctcgatcttcatcgacggcctccacgtgggcggttccgatgacctcgccgcgctcaacgcgcagggcaagctggacatgatgctgggcctgtga

SEQ ID NO: 47340 - protein, 88 aa, Novosphingobium aromaticivorans DSM 12444
MPNMPKVEMYTKWGCPYCFRAKQLLDGKGVSYEEIDVTMGGPKKTEMLERAPGHTTVPSIFIDGLHVGGSDDLAALNAQGKLDMMLGL

SEQ ID NO: 47341 - DNA, 243 bp, Anaplasma phagocytophilum HZ
  CDS (1)..(243): transl_table=11
atgcgcgatgttgtcatatacaccaaagtcccctgtccatattgtactagggctaaggctttgttcaacaaaaaaagtattcccttcaaagagatagatataactaacgatccagcagcgcaacttgaaatggtagaacgctctggtaggaagacagttccacagatattcatcgacggagaaagcattgggggatgtgacgatttgtacgagctatatgagtcaggaaaactagaactataa

SEQ ID NO: 47342 - protein, 80 aa, Anaplasma phagocytophilum HZ
MRDVVIYTKVPCPYCTRAKALFNKKSIPFKEIDITNDPAAQLEMVERSGRKTVPQIFIDGESIGGCDDLYELYESGKLEL

SEQ ID NO: 47343 - DNA, 270 bp, Neorickettsia sennetsu str. Miyayama
  CDS (1)..(270): transl_table=11
atgaatcacaaggtcgtaatatatgtgaaagaattttgtccttactgtagcagggcgaaggagttgctcgacagaaaaggtgtcttgtacacggtagtggacattaccaatgatccggatctagccgtagttatgatggaaagatcaggtgggaggaagactgttccccaagttttcattaatgacgtgtgtgtaggtggctttgatgatctcaacagcctaaacgagagtggcaagctcaatgagctcttatttttgaacaatcagtaa

SEQ ID NO: 47344 - protein, 89 aa, Neorickettsia sennetsu str. Miyayama
MNHKVVIYVKEFCPYCSRAKELLDRKGVLYTVVDITNDPDLAVVMMERSGGRKTVPQVFINDVCVGGFDDLNSLNESGKLNELLFLNNQ

SEQ ID NO: 47345 - DNA, 261 bp, Francisella tularensis subsp. holarctica
  CDS (1)..(261): transl_table=11
atgaaagtaaaaatatatattagaaatggttgtccatattgtgtttgggcaaaacaatggttcgaagaaaataatatagcttttgatgaaactataattgatgattatgctcaacgttctaagttttatgatgaaatgaatcaaagtggcaaagttatcttccctatttcaactgtgccacaaatattcatagatgatgaacatataggtggctttacagagcttaaggctaatgctgataaaattttaaacaaaaaatag

SEQ ID NO: 47346 - protein, 86 aa, Francisella tularensis subsp. holarctica
MKVKIYIRNGCPYCVWAKQWFEENNIAFDETIIDDYAQRSKFYDEMNQSGKVIFPISTVPQIFIDDEHIGGFTELKANADKILNKK

SEQ ID NO: 47347 - DNA, 255 bp, Saccharophagus degradans 2-40
  CDS (1)..(255): transl_table=11
gtgcctgaagttgtaatttacagttctaattactgcggtttctgttttcgcgctaagcaattgctgcaaagcaaaggcgtgaaatataaagagattgttgttgatggcgacacccagttgcgcacagagcttgcacgtaaggctggtgcgcgcacggttccacaaatttggataggcgataaccatgtgggtggctgcgacgagctgtatacgctagagcgcaccggctcattagatgatttgctggcgctgtag

SEQ ID NO: 47348 - protein, 84 aa, Saccharophagus degradans 2-40
MPEVVIYSSNYCGFCFRAKQLLQSKGVKYKEIVVDGDTQLRTELARKAGARTVPQIWIGDNHVGGCDELYTLERTGSLDDLLAL

SEQ ID NO: 47349 - DNA, 258 bp, Methylobacillus flagellatus KT
  CDS (1)..(258): transl_table=11
atggcgaatgtcctcatgtataccaccggtacttgcccttactgtatgagcgccgagcgcttgctgctgagcaagggcgtgcagcagattaataaggtacgcgtcgaccttgagcctgagctcagggtgaaaatgatggagcagaccggcaggcgcactgttccacaaatctatatcgatgatgtgcatgtgggcgggtttgatgacctgcgtgcgctcgatatggccggcaagttggatgcaatgctggcgaaatag

SEQ ID NO: 47350 - protein, 85 aa, Methylobacillus flagellatus KT
MANVLMYTTGTCPYCMSAERLLLSKGVQQINKVRVDLEPELRVKMMEQTGRRTVPQIYIDDVHVGGFDDLRALDMAGKLDAMLAK

SEQ ID NO: 47351 - DNA, 243 bp, Rubrobacter xylanophilus DSM 9941
  CDS (1)..(243): transl_table=11
atgagcaaggttgtggtcttcacgacgtcgagttgtccgtggtgcgagcgggccaagcggtatctgcgggagaggggcgtggcgttcaaggaggtgaacgtggagcgggatccgggggcggcgcgggatctggtgcgcaggaccggctccacgggggtcccggtgatcaagatcggcggcaagtggatcgtcggtttcgacaggcagcgcatagaccaggagctggcgcgccgcgcctcctga

SEQ ID NO: 47352 - protein, 80 aa, Rubrobacter xylanophilus DSM 9941
MSKVVVFTTSSCPWCERAKRYLRERGVAFKEVNVERDPGAARDLVRRTGSTGVPVIKIGGKWIVGFDRQRIDQELARRAS

SEQ ID NO: 47353 - DNA, 282 bp, Mesorhizobium sp. BNC1
  CDS (1)..(282): transl_table=11
atggcagatgtgacgatctatacccggatgggctgcggttattgcgtggcggccaagcggctgctcgagcgcaagggcattgcctataccgagcaggacgccagtttctcgcccgaattgcgcaaggaaatgatcggccgggcaaacgggcgctccacctttccccagatttttatcgggaatattcatgtaggcggttctgacgatctgcacgcgctggagcgggaaggcaggcttgacgcccttctggaggaacgggacatcgtggggagcagtcgatga

SEQ ID NO: 47354 - protein, 93 aa, Mesorhizobium sp. BNC1
MADVTIYTRMGCGYCVAAKRLLERKGIAYTEQDASFSPELRKEMIGRANGRSTFPQIFIGNIHVGGSDDLHALEREGRLDALLEERDIVGSSR

SEQ ID NO: 47355 - DNA, 318 bp, Trichodesmium erythraeum IMS101
  CDS (1)..(318): transl_table=11
atgcttgattttcttaaccctattcttggtcgtcatccagaacgtatgaaagcaaaggttgaaatttatacttggcaaacttgcccgtattgtattagagcaaaacttttgctttggtggaaaggtgttaactatacagaatacaaaatagatggcaatgaaagtgctagaaatagtatgagtgaacgtgctaatagaagtcgtactgtgccacagatttttattaataatcaacatattggtggctgtgatgatatctatgctttggataacaaaggtcaattagagcctttattgattgaggttctcccagattaa

SEQ ID NO: 47356 - protein, 105 aa, Trichodesmium erythraeum IMS101
MLDFLNPILGRHPERMKAKVEIYTWQTCPYCIRAKLLLWWKGVNYTEYKIDGNESARNSMSERANRSRTVPQIFINNQHIGGCDDIYALDNKGQLEPLLIEVLPD

SEQ ID NO: 47357 - DNA, 261 bp, Trichodesmium erythraeum IMS101
  CDS (1)..(261): transl_table=11
atgtctgttaacatagaaatttatacctggtcaagttgtccgttttgcatcagtgctaaagcactgttagataaaaagcaagtaaactatcaggaataccctatagatggcgatgatatagaacgagaaaaaatggcctgtagagctaatggccgtaattctttgccccaaatctttatcgatgaggaacatatagggggttgtgatgatttatatggactggaagctcaagggaaactagaccgactcttgaagaaatag

SEQ ID NO: 47358 - protein, 86 aa, Trichodesmium erythraeum IMS101
MSVNIEIYTWSSCPFCISAKALLDKKQVNYQEYPIDGDDIEREKMACRANGRNSLPQIFIDEEHIGGCDDLYGLEAQGKLDRLLKK

SEQ ID NO: 47359 - DNA, 264 bp, Synechococcus sp. CC9311
  CDS (1)..(264): transl_table=11
atggccaaggttgagatctacacctggagcacctgtccgttttgcgtgcgcgccaagggtttgctggaccgcaagggtgtggcctactccgaagtctcggttgatggggatgagcctggacgtgatgcgatggccgctcgtggcaacggcaagcgcagcgttcctcagatctttatcaatgaccagcacgtaggaggctgcgatgaactgcatggcctggagcgggcggggaaactagatggcctgctcgccggtcaggcctga

SEQ ID NO: 47360 - protein, 87 aa, Synechococcus sp. CC9311
MAKVEIYTWSTCPFCVRAKGLLDRKGVAYSEVSVDGDEPGRDAMAARGNGKRSVPQIFINDQHVGGCDELHGLERAGKLDGLLAGQA

SEQ ID NO: 47361 - DNA, 261 bp, Shewanella sp. MR-4
  CDS (1)..(261): transl_table=11
atgtacgttgttatttttggccgtcctggctgtccttattgcgtgcgagcagtacaactgtcagagcaactcgttgaaaaacgtgatgactttaaatttagatacgtggatatccacgccgaagggatttctaaagcggatctagagaagactgtcggcaagccagtcgaaactgtgccacagatcttcgttgatgaaaaacacgtaggtggttgcaccgatttcgaacaatatgttcgcgataacaatctgttaggttaa

SEQ ID NO: 47362 - protein, 86 aa, Shewanella sp. MR-4
MYVVIFGRPGCPYCVRAVQLSEQLVEKRDDFKFRYVDIHAEGISKADLEKTVGKPVETVPQIFVDEKHVGGCTDFEQYVRDNNLLG

SEQ ID NO: 47363 - DNA, 261 bp, Hyphomonas neptunium ATCC 15444
  CDS (1)..(261): transl_table=11
atggcgaaggttacgatttatacccgcgcattctgcccttactgcacccgcgctttgcaggtgctcaaggacaagggtgtcgagctcaatgagattgatgcaggtatggaccccgcgctgcgcgaagagatggtccagcgctccaatggtgggcgtacattcccgcagatattcgtgggggagacccacattggcggctgtgacgacatgctcgcgcttgaccgttccggcaagctcgacccgatgcttgccagcgtctga

SEQ ID NO: 47364 - protein, 86 aa, Hyphomonas neptunium ATCC 15444
MAKVTIYTRAFCPYCTRALQVLKDKGVELNEIDAGMDPALREEMVQRSNGGRTFPQIFVGETHIGGCDDMLALDRSGKLDPMLASV

SEQ ID NO: 47365 - DNA, 258 bp, Rhizobium leguminosarum bv. viciae 3841
  CDS (1)..(258): transl_table=11
atggtacccgtcacaatctatacacggcagttctgcggctattgcacccgcgccaagtcccttctcgaagaaaagggtgtcgaatatgtcgagcacgacgcgaccttttcgccggatcttcgccaggagatgatcggcaagtcgaacgggcgtaccacttttccgcagatcttcatcggcgccgatcatgtcggcggttgcgacgatctctttgcgctcgatcgggccggcaagctcgatccgatgctggcagcctga

SEQ ID NO: 47366 - protein, 85 aa, Rhizobium leguminosarum bv. viciae 3841
MVPVTIYTRQFCGYCTRAKSLLEEKGVEYVEHDATFSPDLRQEMIGKSNGRTTFPQIFIGADHVGGCDDLFALDRAGKLDPMLAA

SEQ ID NO: 47367 - DNA, 258 bp, Magnetococcus sp. MC-1
  CDS (1)..(258): transl_table=11
atggctgatattaccatctactccaccaccatctgccccttttgcgtgcgtgctaagcagctgtttaagaaaaaaggcgtggattttaccgagattaatctcgataaacagcccgaccgccgggatgaaatgcttgcaaagtcgggggggcgccgtacggtgccacaaatttttattggggatcggcatgtggggggctgcgacgatctgtatgagctggaattggatggtgagttagatcctctattggggctgtaa

SEQ ID NO: 47368 - protein, 85 aa, Magnetococcus sp. MC-1
MADITIYSTTICPFCVRAKQLFKKKGVDFTEINLDKQPDRRDEMLAKSGGRRTVPQIFIGDRHVGGCDDLYELELDGELDPLLGL

SEQ ID NO: 47369 - DNA, 273 bp, Azoarcus sp. BH72
  CDS (1)..(273): transl_table=11
atgagcacctcgtccatccgcatgtacgcgacggccgtctgtccctactgcgttcgcgccgaacagttgctgcgccgcaagggcgtcaccgcgatcgacaagatccgcatcgacctcgatccggcgcgccgcgatgagatgatggagctgaccggccgccgcacggtgccgcagattttcatcggcgatctccacgtcggcggatgcgacgacctttacgagctggaccgcagcggcggccttgacccgctgcttgccaagctggcgggctga

SEQ ID NO: 47370 - protein, 90 aa, Azoarcus sp. BH72
MSTSSIRMYATAVCPYCVRAEQLLRRKGVTAIDKIRIDLDPARRDEMMELTGRRTVPQIFIGDLHVGGCDDLYELDRSGGLDPLLAKLAG

SEQ ID NO: 47371 - DNA, 258 bp, Acidovorax sp. JS42
  CDS (1)..(258): transl_table=11
atgcaagccgtgaagatgtacaccaccgccgtgtgcccctattgcatccgcgccaagcaattgctgaagctgaagggtgtggagcagatcgaggaaatccgcgtggacaccgaccccgccgcgcgccagcacatgatggagatcaccggccggcgcaccgtcccgcagatcttcattggtgacacccacgtcggcggacacgacgacctcgtggccctggacagccgtggcggtctggtgccgctgctgggcgcctga

SEQ ID NO: 47372 - protein, 85 aa, Acidovorax sp. JS42
MQAVKMYTTAVCPYCIRAKQLLKLKGVEQIEEIRVDTDPAARQHMMEITGRRTVPQIFIGDTHVGGHDDLVALDSRGGLVPLLGA

SEQ ID NO: 47373 - DNA, 258 bp, Magnetospirillum magnetotacticum MS-1; identical to SEQ ID NO: 5014
  CDS (1)..(258): transl_table=11

SEQ ID NO: 47374 - protein, 85 aa, Magnetospirillum magnetotacticum MS-1; identical to SEQ ID NO: 5015

SEQ ID NO: 47375 - DNA, 264 bp, Magnetospirillum magnetotacticum MS-1
  CDS (1)..(264): transl_table=11
atggccgagatcgagatctacaccaccgacgtctgcccctattgcgtcaaggccaagaagctgttcgccaagaagggtgtggactacaccgagatcaacgtctcgaccgatgacggcctgcgccagtacatgaccaaccgggccggtgggcgccgctcggtgccgcagattttcatcgatggggtgcatgtgggcggctgtgacgatctttacgcgctcgacaaggacggcaagcttgatcccatgctggccggtgcgcggtga

SEQ ID NO: 47376 - protein, 87 aa, Magnetospirillum magnetotacticum MS-1
MAEIEIYTTDVCPYCVKAKKLFAKKGVDYTEINVSTDDGLRQYMTNRAGGRRSVPQIFIDGVHVGGCDDLYALDKDGKLDPMLAGAR

SEQ ID NO: 47377 - DNA, 315 bp, Nostoc punctiforme PCC 73102
  CDS (1)..(315): transl_table=11
atgctggactttcttaatcccctattaaatcgccatccagagcgagtcaaagccaacgtcgagctttacacgtggcaaacttgtccttactgcattcgtgccaaaatactgctgtggtggaaaggtgtaaattttaccgaatataaaatcgacggtgatgaaggagccagagctaaaatggcagaacgcgctaatggtcgacgtaccgtaccgcaaatttttattaataaccagcacattggtggctgcgatgacctctatcagctagacacacaaagccaactcgatccccttttagcccaagccgctatttag

SEQ ID NO: 47378 - protein, 104 aa, Nostoc punctiforme PCC 73102
MLDFLNPLLNRHPERVKANVELYTWQTCPYCIRAKILLWWKGVNFTEYKIDGDEGARAKMAERANGRRTVPQIFINNQHIGGCDDLYQLDTQSQLDPLLAQAAI

SEQ ID NO: 47379 - DNA, 264 bp, Nostoc punctiforme PCC 73102
  CDS (1)..(264): transl_table=11
atggctgcaaaagtagaaatttacacttggaggacttgcccgttttgtatccgtgccaaaagtttactgaaaaacaagggcgttgaatttatcgaatacagcatcgacggagatgaagcagccagaaataaaatggctcaaagagcaaatggacggcgctcgttaccgcaaattttcatcaatgacgatcatattggtggttgtgatgatatccacgctttagacagtcaaggcaggctggatgagctactaacttccgtgtaa

SEQ ID NO: 47380 - protein, 87 aa, Nostoc punctiforme PCC 73102
MAAKVEIYTWRTCPFCIRAKSLLKNKGVEFIEYSIDGDEAARNKMAQRANGRRSLPQIFINDDHIGGCDDIHALDSQGRLDELLTSV

SEQ ID NO: 47381 - DNA, 273 bp, Crocosphaera watsonii WH 8501
  CDS (1)..(273): transl_table=11
atggcagctaacgttgaaatttacacttggagtacctgtcccttttgtattcgggcaaaagctttattagacaaaaaaggggtaaactatactgaatactgtatagatggggatgaagacgcaagggagataatggctgaacgagccaacggaaaacggagtttaccccaaattttcatcaacgatggtcatgttggaggttgtaacgagttatatgatacagaattagcaggggaacttgatagcttgttggagcagtcagtcgcctcttga

SEQ ID NO: 47382 - protein, 90 aa, Crocosphaera watsonii WH 8501
MAANVEIYTWSTCPFCIRAKALLDKKGVNYTEYCIDGDEDAREIMAERANGKRSLPQIFINDGHVGGCNELYDTELAGELDSLLEQSVAS

SEQ ID NO: 47383 - DNA, 315 bp, Crocosphaera watsonii WH 8501
  CDS (1)..(315): transl_table=11
atgttgaatctttttaattctttattaggccgcgatccccaaaaaatcaaggcggatgtggaaatctacacttggcaaacttgtccgttttgtatacgtgctaaattacttttatggtggaaaggggtcaacttcactgaatataaaatcgatggggatgagactgctagggaaaaaatggcacaacgatcctctggaaaacggtcagttcctcaaattttcgtcaataatcaacatattggaggatgtgatgatttatattccctcgatggacaaaatcaattagatcctcttttgataatggacaatggataa

SEQ ID NO: 47384 - protein, 104 aa, Crocosphaera watsonii WH 8501
MLNLFNSLLGRDPQKIKADVEIYTWQTCPFCIRAKLLLWWKGVNFTEYKIDGDETAREKMAQRSSGKRSVPQIFVNNQHIGGCDDLYSLDGQNQLDPLLIMDNG

SEQ ID NO: 47385 - DNA, 306 bp, Xylella fastidiosa Ann-1
  CDS (1)..(306): transl_table=11
atgacacaagactctacacgtgatgaagcaggtagcacacccaagattactatttactcaactgctatctgcccctattgcgtggctgctaagaattttctaaagagcaagggttacacctggacagagatcatgatcaacgtgaactcagcagaacgcgaaaaaatgattgcacgcacccaacgtaccagcgtgccccagattttcgttggggatacccatgttggcggctacgacgacatgatggcacttcatcatgcaggcaagctggaaccactgctgaccaatcacagcccgcagggatga

SEQ ID NO: 47386 - protein, 101 aa, Xylella fastidiosa Ann-1
MTQDSTRDEAGSTPKITIYSTAICPYCVAAKNFLKSKGYTWTEIMINVNSAEREKMIARTQRTSVPQIFVGDTHVGGYDDMMALHHAGKLEPLLTNHSPQG

SEQ ID NO: 47387 - DNA, 258 bp, Roseovarius nubinhibens ISM
  CDS (1)..(258): transl_table=11
atgaaacaagtcgagatttacacatcgccgctctgcggcttttgccacgccgccaagcggctgttgaaggaaaagaacgtcaatttcaccgagattgacgtgctcgagaacccgaaccgcaagccggagatgatccagcgcgccaatggcgggcggaccgtgccgcagattttcgtgggtgacacccatgttggcggctgtgacgacctttatgcgcttgagcgggccgggaagctggacgcgcttctggcggcatga

SEQ ID NO: 47388 - protein, 85 aa, Roseovarius nubinhibens ISM
MKQVEIYTSPLCGFCHAAKRLLKEKNVNFTEIDVLENPNRKPEMIQRANGGRTVPQIFVGDTHVGGCDDLYALERAGKLDALLAA

SEQ ID NO: 47389 - DNA, 255 bp, Oceanicola batsensis HTCC2597; identical to SEQ ID NO: 5018
  CDS (1)..(255): transl_table=11

SEQ ID NO: 47390 - protein, 84 aa, Oceanicola batsensis HTCC2597; identical to SEQ ID NO: 5019

SEQ ID NO: 47391 - DNA, 255 bp, Prochlorococcus marinus str. MIT 9211
  CDS (1)..(255): transl_table=11
atggcacaagttgagatttacacctggcaattttgccctttctgtatacgcgcaaaaaatcttcttaacaagaaaggcgtggattacaaagaatacccaattgatggggacccagaaggacgtttaaagatgtccgaacgagcaggtggacgtacaactgtcccccaaatatttattaatgaaaaaggtattggaggctgtgatgagctttatgccctggaagacagccatcaattagacagtcttttgaactaa

SEQ ID NO: 47392 - protein, 84 aa, Prochlorococcus marinus str. MIT 9211
MAQVEIYTWQFCPFCIRAKNLLNKKGVDYKEYPIDGDPEGRLKMSERAGGRTTVPQIFINEKGIGGCDELYALEDSHQLDSLLN

SEQ ID NO: 47393 - DNA, 264 bp, Synechococcus sp. RS9917
  CDS (1)..(264): transl_table=11
atggctgcggttgagatctacacctggcgtttctgtccgttctgcgtgcgggcgaaacagctgctcgatcgcaagggtgtggcttacaccgaatacgccattgatggcgacgagccagcgcgcgatgcgatggcagcccgcggtgacggtcggcgcagcgtgccgcagattttcatcgccgatcgccacatcggcggttgcgacgatttgcatgcgatggaacgggccggagagctcgacgccctgctcgccggcgccgcctga

SEQ ID NO: 47394 - protein, 87 aa, Synechococcus sp. RS9917
MAAVEIYTWRFCPFCVRAKQLLDRKGVAYTEYAIDGDEPARDAMAARGDGRRSVPQIFIADRHIGGCDDLHAMERAGELDALLAGAA

SEQ ID NO: 47395 - DNA, 270 bp, Synechococcus sp. WH 5701
  CDS (1)..(270): transl_table=11
gtgaacacaccagcgaaagtcgagatctacacctggcggttctgccccttctgcatccgggccaaggccctgctcgaccgcaagggtgtggcttacgaggagtacgccatcgatggtgatcaagcggcccggggcgccatggcacagcgggctgacggccgctccagcctgccccagattttcatcaacgaccagggcatcggcggttgcgatgaactccattccctggagcgggccggccggctcgatcctttgctgcaaggggcctga

SEQ ID NO: 47396 - protein, 89 aa, Synechococcus sp. WH 5701
MNTPAKVEIYTWRFCPFCIRAKALLDRKGVAYEEYAIDGDQAARGAMAQRADGRSSLPQIFINDQGIGGCDELHSLERAGRLDPLLQGA

SEQ ID NO: 47397 - DNA, 255 bp, Synechococcus sp. WH 7805
  CDS (1)..(255): transl_table=11
atgccgagcgtcgagatctacacctggcgcacctgtccgttttgtatccgtgccaagcagctgctggatcgcaagggcgttgcttacacggagtactccgttgacggcgatgagccggcccgcgatgccatggctgcgcgtgggaatggccgccgcagtgttccccagatcttcatcgcagatcagcacatcgggggatgcgacgaactccacgctcttgaaagggccgggacactcgatgccctgctctcctga

SEQ ID NO: 47398 - protein, 84 aa, Synechococcus sp. WH 7805
MPSVEIYTWRTCPFCIRAKQLLDRKGVAYTEYSVDGDEPARDAMAARGNGRRSVPQIFIADQHIGGCDELHALERAGTLDALLS

SEQ ID NO: 47399 - DNA, 258 bp, Pseudoalteromonas tunicata D2; identical to SEQ ID NO: 3001
  CDS (1)..(258): transl_table=11

SEQ ID NO: 47400 - protein, 85 aa, Pseudoalteromonas tunicata D2; identical to SEQ ID NO: 3002

SEQ ID NO: 47401 - DNA, 318 bp, Photobacterium sp. SKA34
  CDS (1)..(318): transl_table=11
atgactgaagtaaaaaatctaacaatcgaacagcttgagcaatacgataatttagtaattacgcagccgaattgtccgttttgtgtgaaagccaaagcactacttgatgaacgtggtatcgagtatacaacacttgttttagggctaaatttatcaaaattagtgatggttgatttcatcgaacaaaaaatgggactaacggttcgtactgtacctcaaattattttagatggtaaatatattggcggtcatgatgatttagtcgcttttcttgagcgccaagttaatgcaactgaatttgatgattttgagttataa

SEQ ID NO: 47402 - protein, 105 aa, Photobacterium sp. SKA34
MTEVKNLTIEQLEQYDNLVITQPNCPFCVKAKALLDERGIEYTTLVLGLNLSKLVMVDFIEQKMGLTVRTVPQIILDGKYIGGHDDLVAFLERQVNATEFDDFEL

SEQ ID NO: 47403 - DNA, 234 bp, Oceanospirillum sp. MED92
  CDS (1)..(234): transl_table=11
atgaaagtagagatatacacaaaaggttattgcccctattgccgggcagcaaaaaagctccttaaacaactaaactgggaatataaagaatttgaaatcaccaaccggcctgctctgcagaaagagatgaagttacgttctcgcagacatacggtcccacaaatttttatcaataatcagcatattggtggtttcgacgatttttctgtgttcctcagcaataaagtttcctga

SEQ ID NO: 47404 - protein, 77 aa, Oceanospirillum sp. MED92
MKVEIYTKGYCPYCRAAKKLLKQLNWEYKEFEITNRPALQKEMKLRSRRHTVPQIFINNQHIGGFDDFSVFLSNKVS

SEQ ID NO: 47405 - DNA, 258 bp, Oceanospirillum sp. MED92
  CDS (1)..(258): transl_table=11
atgcaggacgttacaatctataccactgcctggtgcccattttgcattcgtgccaagatgctacttgatcacaaacaaataccttactctgagatcaaagtagatggcgatccagccaaaaggcaggagatgaccaagttaagtggcggtcataccgtgccacagatttttattggcgaaacaccgattggcggctgtgatgatatgtttgcacttgaacgacagggcaaacttgatgaaatgcttaacgccagttaa

SEQ ID NO: 47406 - protein, 85 aa, Oceanospirillum sp. MED92
MQDVTIYTTAWCPFCIRAKMLLDHKQIPYSEIKVDGDPAKRQEMTKLSGGHTVPQIFIGETPIGGCDDMFALERQGKLDEMLNAS

SEQ ID NO: 47407 - DNA, 258 bp, Rickettsiella grylli; identical to SEQ ID NO: 21227
  CDS (1)..(258): transl_table=11

SEQ ID NO: 47408 - protein, 85 aa, Rickettsiella grylli; identical to SEQ ID NO: 21228

SEQ ID NO: 47409 - DNA, 261 bp, Synechococcus sp. RS9916
  CDS (1)..(261): transl_table=11
atggccaaggtcgagatctacacctggcgcacctgcccgttctgtgtgcgtgccaaagccctgctggatggcaaaggggtggcgtacaccgagcacagcgtcgatggggatgagcccgcccgtgatgcgatggcagcgcggggtgatggtcgtcgcagtgtgcctcaggtgttcatcaacgatgtgcacatcggcggctgtgatgatctgcatgcgcgggagcgtgcaggcgatttggatgcgctcctggcccagggctga

SEQ ID NO: 47410 - protein, 86 aa, Synechococcus sp. RS9916
MAKVEIYTWRTCPFCVRAKALLDGKGVAYTEHSVDGDEPARDAMAARGDGRRSVPQVFINDVHIGGCDDLHARERAGDLDALLAQG

SEQ ID NO: 47411 - DNA, 258 bp, Alteromonadales bacterium TW-7
  CDS (1)..(258): transl_table=11
atgagtaacgttgttttatacaccaaggcatattgtccattttgtcagcgcgctatggcgcttttaaaaagcaaaggcgttgaattcactaattttgatattggtgtacaacctgaacttcgcgatgaaatgattactaaagccggtggcgcaagcactgtaccgcaaatttttattaatgatgaacatatcggtggctgtgacgacatgatggctattgaggctcaaggtaaacttgacgctaagcttaacgcttaa

SEQ ID NO: 47412 - protein, 85 aa, Alteromonadales bacterium TW-7
MSNVVLYTKAYCPFCQRAMALLKSKGVEFTNFDIGVQPELRDEMITKAGGASTVPQIFINDEHIGGCDDMMAIEAQGKLDAKLNA

SEQ ID NO: 47413 - DNA, 255 bp, marine gamma proteobacterium HTCC2143
  CDS (1)..(255): transl_table=11
atggctgacgtacagatttataccacccggttttgtcctttttgtatacgggcaaagcagctgcttgacaaaaaaaatgtgccttacaatgaaattagcgtggatggccggccggaattgcgttctgaaatgaacagccgcagtggtcgtcatactgtccctcaaatatggattggcgaccagcatattggcggtaatgatgagttgtgggcactggatcgcaatggtaatctcgatgacctcctgggtgcttga

SEQ ID NO: 47414 - protein, 84 aa, marine gamma proteobacterium HTCC2143
MADVQIYTTRFCPFCIRAKQLLDKKNVPYNEISVDGRPELRSEMNSRSGRHTVPQIWIGDQHIGGNDELWALDRNGNLDDLLGA

SEQ ID NO: 47415 - DNA, 261 bp, marine gamma proteobacterium HTCC2080
  CDS (1)..(261): transl_table=11
atgactgagatcgttatgtacacaacacgctggtgccccttttgcaccggcgccaagacgctgctgaataagaagggcgtagagttttctgaaataccggttgatggagacccggcgttgcgcgcgagcatggccgagcgcgccggcgctacaagtgtgcctcaaatctggattggtgatgcccatatcggtggttgtgatgaacttttcagcctcgagcagcaagggcgcctcgatagtatgctgtcgggacagcgctga

SEQ ID NO: 47416 - protein, 86 aa, marine gamma proteobacterium HTCC2080
MTEIVMYTTRWCPFCTGAKTLLNKKGVEFSEIPVDGDPALRASMAERAGATSVPQIWIGDAHIGGCDELFSLEQQGRLDSMLSGQR

SEQ ID NO: 47417 - DNA, 261 bp, Candidatus Desulfococcus oleovorans Hxd3
  CDS (1)..(261): transl_table=11
atgatcaaggcgattgaaatttacacaacaggcacctgtcctttctgtattcgggccaaggccctgctggacaggaaaaaggtttcctataccgagttccgggtggaccataccccggcctatgtggatgaagccgtgaaacgcagcgggggacgcaccaccgtgccccagatttttatcggcgaggttcacgtgggcgggtgtgatgagctttacgccttggaaaaggagaaaaaactcgacgcgctgctgggactataa

SEQ ID NO: 47418 - protein, 86 aa, Candidatus Desulfococcus oleovorans Hxd3
MIKAIEIYTTGTCPFCIRAKALLDRKKVSYTEFRVDHTPAYVDEAVKRSGGRTTVPQIFIGEVHVGGCDELYALEKEKKLDALLGL

SEQ ID NO: 47419 - DNA, 255 bp, Pseudomonas putida GB-1
  CDS (1)..(255): transl_table=11
atgaagcccgtcatcgtctattccagcgactactgcccctactgcatgcgcgccaagtacctgctcgagagcaagggcgtggccttcgaggaagtcaaggtggacggcaagccgcaagttcgcgctgagatgagccagaaggccggccgtacgtcggtgccgcagatctggatcggcagcacccatgtcggtggatgcgatgacctctatgccctggagcgcgccggcaagctcgacgcgctgctggcggcctga

SEQ ID NO: 47420 - protein, 84 aa, Pseudomonas putida GB-1
MKPVIVYSSDYCPYCMRAKYLLESKGVAFEEVKVDGKPQVRAEMSQKAGRTSVPQIWIGSTHVGGCDDLYALERAGKLDALLAA

SEQ ID NO: 47421 - DNA, 264 bp, Erythrobacter sp. SD-21; identical to SEQ ID NO: 5020
  CDS (1)..(264): transl_table=11

SEQ ID NO: 47422 - protein, 87 aa, Erythrobacter sp. SD-21; identical to SEQ ID NO: 5021

SEQ ID NO: 47423 - DNA, 267 bp, Magnetospirillum gryphiswaldense
  CDS (1)..(267): transl_table=11
atggcccaggttgaaatctataccacccagacctgcccctattgcatccgcgccaagcggctgctgaccactaagggggtggcgttccaggaatacgacgtctccaacgaccccgaattgcgctcggccatgaccgcgcgcgcccatggcgggcggaccgtgccgcaaatcttcatcaacggcgaacatgtgggtggctgtgacgacctgcattcgctcgacggcgccggcgagttggatgtcctgctggcgaaagaatccgcgtga

SEQ ID NO: 47424 - protein, 88 aa, Magnetospirillum gryphiswaldense
MAQVEIYTTQTCPYCIRAKRLLTTKGVAFQEYDVSNDPELRSAMTARAHGGRTVPQIFINGEHVGGCDDLHSLDGAGELDVLLAKESA

SEQ ID NO: 47425 - DNA, 345 bp, Vitis vinifera; identical to SEQ ID NO: 2651
  CDS (1)..(345)

SEQ ID NO: 47426 - protein, 114 aa, Vitis vinifera; identical to SEQ ID NO: 2652

SEQ ID NO: 47427 - DNA, 315 bp, Fritillaria agrestis; identical to SEQ ID NO: 2655
  CDS (1)..(315)

SEQ ID NO: 47428 - protein, 104 aa, Fritillaria agrestis; identical to SEQ ID NO: 2656

SEQ ID NO: 47429 - DNA, 405 bp, Mesembryanthemum crystallinum; identical to SEQ ID NO: 3017
  CDS (1)..(405)

SEQ ID NO: 47430 - protein, 134 aa, Mesembryanthemum crystallinum; identical to SEQ ID NO: 3018

SEQ ID NO: 47431 - DNA, 402 bp, Thellungiella halophila; identical to SEQ ID NO: 2657
  CDS (1)..(402)

SEQ ID NO: 47432 - protein, 133 aa, Thellungiella halophila; identical to SEQ ID NO: 2658

SEQ ID NO: 47433 - DNA, 384 bp, Medicago truncatula; identical to SEQ ID NO: 2667
  CDS (1)..(384)

SEQ ID NO: 47434 - protein, 127 aa, Medicago truncatula; identical to SEQ ID NO: 2668

SEQ ID NO: 47435 - DNA, 366 bp, Medicago truncatula; identical to SEQ ID NO: 2669
  CDS (1)..(366)

SEQ ID NO: 47436 - protein, 121 aa, Medicago truncatula; identical to SEQ ID NO: 2670

SEQ ID NO: 47437 - DNA, 492 bp, Aspergillus oryzae; identical to SEQ ID NO: 2681
  CDS (1)..(492)

SEQ ID NO: 47438 - protein, 163 aa, Aspergillus oryzae; identical to SEQ ID NO: 2682

SEQ ID NO: 47439 - DNA, 309 bp, Aspergillus oryzae; identical to SEQ ID NO: 2683
  CDS (1)..(309)

SEQ ID NO: 47440 - protein, 102 aa, Aspergillus oryzae; identical to SEQ ID NO: 2684

SEQ ID NO: 47441 - DNA, 381 bp, Populus tremula x Populus tremuloides; identical to SEQ ID NO: 2685
  CDS (1)..(381)

SEQ ID NO: 47442 - protein, 126 aa, Populus tremula x Populus tremuloides; identical to SEQ ID NO: 2686

SEQ ID NO: 47443 - DNA, 342 bp, Triticum aestivum; identical to SEQ ID NO: 2689
  CDS (1)..(342)

SEQ ID NO: 47444 - protein, 113 aa, Triticum aestivum; identical to SEQ ID NO: 2690

SEQ ID NO: 47445 - DNA, 249 bp, Serratia marcescens; identical to SEQ ID NO: 3053
  CDS (1)..(249): transl_table=11

SEQ ID NO: 47446 - protein, 82 aa, Serratia marcescens; identical to SEQ ID NO: 3054

SEQ ID NO: 47447 - DNA, 420 bp, Populus tremula x Populus tremuloides; identical to SEQ ID NO: 2691
  CDS (1)..(420)

SEQ ID NO: 47448 - protein, 139 aa, Populus tremula x Populus tremuloides; identical to SEQ ID NO: 2692

SEQ ID NO: 47449 - DNA, 255 bp, Pseudomonas fluorescens
  CDS (1)..(255): transl_table=11
atgtcccacgtcgttgtctattccagcgattactgcccctattgttcccgagccaagttcctgctccagaacaaaggcgtggccttcgaagagatcaaggtcgacggcaagccgcaactgcgcgcccaaatggcccagaaggccgggcgcacgtccgtgccgcagatctggatcggcagcacccacgtgggcggttgcgatgatctgttcgccctggagcgcgccggtaagctcgacgcactgctcaaggcctga

SEQ ID NO: 47450 - protein, 84 aa, Pseudomonas fluorescens
MSHVVVYSSDYCPYCSRAKFLLQNKGVAFEEIKVDGKPQLRAQMAQKAGRTSVPQIWIGSTHVGGCDDLFALERAGKLDALLKA

SEQ ID NO: 47451 - DNA, 348 bp, Tilia platyphyllos; identical to SEQ ID NO: 2693
  CDS (1)..(348)

SEQ ID NO: 47452 - protein, 115 aa, Tilia platyphyllos; identical to SEQ ID NO: 2694

SEQ ID NO: 47453 - DNA, 342 bp, Deschampsia antarctica; identical to SEQ ID NO: 2695
  CDS (1)..(342)

SEQ ID NO: 47454 - protein, 113 aa, Deschampsia antarctica; identical to SEQ ID NO: 2696

SEQ ID NO: 47455 - DNA, 258 bp, Escherichia coli
  CDS (1)..(258): transl_table=11
atgcaaaccgttatttttggtcgttcgggttgcccttactgtgtgcgtgcaaaagatctggctgagaaattgagcaatgaacgcgatgattttcagtatcagtatgtagatattcgtgcggaagggatcactaaagaagatctacaacaaaaggcaggtaaacccgtagaaaccgtgccgcagatttttgtcgatcagcaacatatcggcggctataccgattttgctgcatgggtgaaagaaaatctggacgcctga

SEQ ID NO: 47456 - protein, 85 aa, Escherichia coli
MQTVIFGRSGCPYCVRAKDLAEKLSNERDDFQYQYVDIRAEGITKEDLQQKAGKPVETVPQIFVDQQHIGGYTDFAAWVKENLDA

SEQ ID NO: 47457 - DNA, 309 bp, Rickettsia conorii
  CDS (1)..(309): transl_table=11
atgaataaagctatattacacacaattattgtttatactctcgctagttgtccttattgtataaaagctaaagcattgcttgatgagaaaaatgttgcttatgaggaaattgaagtaagtaactttactcaggaagagaaagaaaaatttattaagaaatccggtggaaaaaagaccgtcccgcagatatttatagataatatgcatgttggcggttgtgatgctctgtttgatcttgaaaaagagggaaggttagataagctgttagaaaatcagccaaagacgacttcacctgctgccggagcgtaa

SEQ ID NO: 47458 - protein, 102 aa, Rickettsia conorii
MNKAILHTIIVYTLASCPYCIKAKALLDEKNVAYEEIEVSNFTQEEKEKFIKKSGGKKTVPQIFIDNMHVGGCDALFDLEKEGRLDKLLENQPKTTSPAAGA

SEQ ID NO: 47459 - DNA, 309 bp, Rickettsia felis
  CDS (1)..(309): transl_table=11
atgaataaagctatattacacacaattattatttatactctcgctagttgtccttattgtataaaagctaaagcattgcttgatgagaaaaatgttgtttatgaggaaattgaagtaagtaattttactcaggaagagaaagaaaaatttattaagaaatccggtggaaaaaagacggtcccgcagatatttatagataatatacatgttggaggttgtgatgctctatttgatcttgaaaaagaaggaaggctagataagttgctggaagggcaaccgaagaagaagatgcctgcagccggggcgtaa

SEQ ID NO: 47460 - protein, 102 aa, Rickettsia felis
MNKAILHTIIIYTLASCPYCIKAKALLDEKNVVYEEIEVSNFTQEEKEKFIKKSGGKKTVPQIFIDNIHVGGCDALFDLEKEGRLDKLLEGQPKKKMPAAGA

SEQ ID NO: 47461 - DNA, 264 bp, Salmonella typhi
  CDS (1)..(264): transl_table=11
atgtttactgttatttttggccgcccagggtgcccttattgcgtgcgtgcaaaagagttggcggaaaaactgagcaaagaacgcgacgatttcaactaccgctatattgatatccatgccgaaggcattactaaagcggatttggaaaaaaccgtaggtaaacctgtagaaaccgtaccgcagatttttgtcgatcaaaaacatatcggcggctgtacggattttgaagcatgggcaaaagaaaatctgaatcttttcgcctga

SEQ ID NO: 47462 - protein, 87 aa, Salmonella typhi
MFTVIFGRPGCPYCVRAKELAEKLSKERDDFNYRYIDIHAEGITKADLEKTVGKPVETVPQIFVDQKHIGGCTDFEAWAKENLNLFA

SEQ ID NO: 47463 - DNA, 306 bp, Schizosaccharomyces pombe; identical to SEQ ID NO: 2697
  CDS (1)..(306)

SEQ ID NO: 47464 - protein, 101 aa, Schizosaccharomyces pombe; identical to SEQ ID NO: 2698

SEQ ID NO: 47465 - DNA, 330 bp, Synechocystis sp
  CDS (1)..(330): transl_table=11
atggctaatttgttcaactggcttcccctcctcagtggccgccaagcggatgggatcaaagccaaagtggaaatatatacttggcaaacttgccctttttgcatccgggcgaaacttttactgtggtggaagggagttaagtttatcgagtacaaaattgacggcgatgaccaagccagacaggccatggcggcaagggcagaaggaagacgcactgtgccccaaatttttgtcaatgaccagggcattggtggctgtgaccaactgtatggcctggacagccgcggccagttagaccccctgttggccactcctcctaacccagcctag

SEQ ID NO: 47466 - protein, 109 aa, Synechocystis sp
MANLFNWLPLLSGRQADGIKAKVEIYTWQTCPFCIRAKLLLWWKGVKFIEYKIDGDDQARQAMAARAEGRRTVPQIFVNDQGIGGCDQLYGLDSRGQLDPLLATPPNPA

SEQ ID NO: 47467 - DNA, 333 bp, Saccharomyces cerevisiae; identical to SEQ ID NO: 3792
  CDS (1)..(333)

SEQ ID NO: 47468 - protein, 110 aa, Saccharomyces cerevisiae; identical to SEQ ID NO: 3793

SEQ ID NO: 47469 - DNA, 267 bp, Synechocystis sp
  CDS (1)..(267): transl_table=11
atggctgtctcggcaaaaattgaaatttatacatggagcacttgccctttttgcatgagagccctggctttattgaaacgtaaaggagtagagttccaagaatattgcattgacggcgacaacgaagcaagggaagccatggcggcaagggccaacggcaaaaggagcttgccccaaatttttattgacgaccaacacattggtggctgtgatgacatctatgccctagatggtgcaggcaagttggaccccctgctccatagttag

SEQ ID NO: 47470 - protein, 88 aa, Synechocystis sp
MAVSAKIEIYTWSTCPFCMRALALLKRKGVEFQEYCIDGDNEAREAMAARANGKRSLPQIFIDDQHIGGCDDIYALDGAGKLDPLLHS

SEQ ID NO: 47471 - DNA, 252 bp, Escherichia coli O157
  CDS (1)..(252): transl_table=11
atggccaatgttgaaatctataccaaagaaacctgcccgtattgccatcgtgcaaaagcactgctgagcagcaagggcgtgagttttcaggagttgccgatcgatggcaatgccgccaagcgtgaagagatgatcaaacgcagcggtcgcaccacggttccccagatttttattgacgcacagcacattggcggctgtgatgacttgtatgcattggatgcacgtggtggactggatcccctgctgaaataa

SEQ ID NO: 47472 - protein, 83 aa, Escherichia coli O157
MANVEIYTKETCPYCHRAKALLSSKGVSFQELPIDGNAAKREEMIKRSGRTTVPQIFIDAQHIGGCDDLYALDARGGLDPLLK

SEQ ID NO: 47473 - DNA, 264 bp, Haemophilus influenzae
  CDS (1)..(264): transl_table=11
atgttcgttgttatttttggtcgtcctggctgcccttactgtgtacgagcaaaaaaccttgctgaaaaattaaaaggcgaagttgctgattttgactatcgttatgtggatattcacgcagaaggcattactaaagaagatttatcaaaatctgttggtaaaccagtagaaaccgtaccacaaatctttattgatgaaaaaccaattggtggttgcactgattttgaagcattaatgaaagaacaatttggtatcgttgcttaa

SEQ ID NO: 47474 - protein, 87 aa, Haemophilus influenzae
MFVVIFGRPGCPYCVRAKNLAEKLKGEVADFDYRYVDIHAEGITKEDLSKSVGKPVETVPQIFIDEKPIGGCTDFEALMKEQFGIVA

SEQ ID NO: 47475 - DNA, 255 bp, Pseudomonas aeruginosa
  CDS (1)..(255): transl_table=11
atgccgcccgtcgtgatctacaccaccgcctggtgtccgtactgcatccgcgccaagcagttgctgcaacgcaagggcgtggacttccaggagatcgcctgcgacggcaagcccgaactgcgcgccgagctggcacgcaaggcgggatcgaccaccgtgccgcagatctggatcggcgagacccatgtcggcggctgcgacgaccttcatgcactggagcgcgccggcaagctggacgcgctgctgtctgcctga

SEQ ID NO: 47476 - protein, 84 aa, Pseudomonas aeruginosa
MPPVVIYTTAWCPYCIRAKQLLQRKGVDFQEIACDGKPELRAELARKAGSTTVPQIWIGETHVGGCDDLHALERAGKLDALLSA

SEQ ID NO: 47477 - DNA, 327 bp, Solanum lycopersicum; identical to SEQ ID NO: 2701
  CDS (1)..(327)

SEQ ID NO: 47478 - protein, 108 aa, Solanum lycopersicum; identical to SEQ ID NO: 2702

SEQ ID NO: 47479 - DNA, 315 bp, Vernicia fordii; identical to SEQ ID NO: 2703
  CDS (1)..(315)

SEQ ID NO: 47480 - protein, 104 aa, Vernicia fordii; identical to SEQ ID NO: 2704

SEQ ID NO: 47481 - DNA, 279 bp, Vibrio cholerae
  CDS (16)..(279): transl_table=11
atgaaggagaaagatatgtttgtggtcatttttggtcgtcctggctgtccttactgtgttcgtgccaaagagcatgctgaaacattgaaagcaaagcgtgatgattttaactatcgctatgttgatatccacgccgaaggcatcactaaagccgatctagaaaaaaccatcggcaagccagtcgaaaccgttccacagattttcatcgatgaacaacacatcggcggctgcacagacttcgaagcgtacgcaaaagagaatctaggtctatttgactaa

SEQ ID NO: 47482 - protein, 87 aa, Vibrio cholerae
MFVVIFGRPGCPYCVRAKEHAETLKAKRDDFNYRYVDIHAEGITKADLEKTIGKPVETVPQIFIDEQHIGGCTDFEAYAKENLGLFD

SEQ ID NO: 47483 - DNA, 540 bp, Arabidopsis thaliana; identical to SEQ ID NO: 2717
  CDS (1)..(540)

SEQ ID NO: 47484 - protein, 179 aa, Arabidopsis thaliana; identical to SEQ ID NO: 2718

SEQ ID NO: 47485 - DNA, 378 bp, Arabidopsis thaliana; identical to SEQ ID NO: 2721
  CDS (1)..(378)

SEQ ID NO: 47486 - protein, 125 aa, Arabidopsis thaliana; identical to SEQ ID NO: 2722

SEQ ID NO: 47487 - DNA, 336 bp, Arabidopsis thaliana; identical to SEQ ID NO: 2723
  CDS (1)..(336)

SEQ ID NO: 47488 - protein, 111 aa, Arabidopsis thaliana; identical to SEQ ID NO: 2724

SEQ ID NO: 47489 - DNA, 393 bp, Arabidopsis thaliana; identical to SEQ ID NO: 2725
  CDS (1)..(393)

SEQ ID NO: 47490 - protein, 130 aa, Arabidopsis thaliana; identical to SEQ ID NO: 2726

SEQ ID NO: 47491 - DNA, 408 bp, Arabidopsis thaliana; identical to SEQ ID NO: 2727
  CDS (1)..(408)

SEQ ID NO: 47492 - protein, 135 aa, Arabidopsis thaliana; identical to SEQ ID NO: 2728

SEQ ID NO: 47493 - DNA, 525 bp, Arabidopsis thaliana; identical to SEQ ID NO: 2729
  CDS (1)..(525)

SEQ ID NO: 47494 - protein, 174 aa, Arabidopsis thaliana; identical to SEQ ID NO: 2730

SEQ ID NO: 47495 - DNA, 402 bp, Oryza sativa; identical to SEQ ID NO: 2763
  CDS (1)..(402)

SEQ ID NO: 47496 - protein, 133 aa, Oryza sativa; identical to SEQ ID NO: 2764

SEQ ID NO: 47497 - DNA, 396 bp, Oryza sativa; identical to SEQ ID NO: 3111
  CDS (1)..(396)

SEQ ID NO: 47498 - protein, 131 aa, Oryza sativa; identical to SEQ ID NO: 3112

SEQ ID NO: 47499 - DNA, 384 bp, Oryza sativa; identical to SEQ ID NO: 2767
  CDS (1)..(384)

SEQ ID NO: 47500 - protein, 127 aa, Oryza sativa; identical to SEQ ID NO: 2768

SEQ ID NO: 47501 - DNA, 411 bp, Oryza sativa; identical to SEQ ID NO: 2775
  CDS (1)..(411)

SEQ ID NO: 47502 - protein, 136 aa, Oryza sativa; identical to SEQ ID NO: 2776

SEQ ID NO: 47503 - DNA, 495 bp, Oryza sativa; identical to SEQ ID NO: 2779
  CDS (1)..(495)

SEQ ID NO: 47504 - protein, 164 aa, Oryza sativa; identical to SEQ ID NO: 2780

SEQ ID NO: 47505 - DNA, 537 bp, Brassica napus; identical to SEQ ID NO: 3157
  CDS (1)..(537)

SEQ ID NO: 47506 - protein, 178 aa, Brassica napus; identical to SEQ ID NO: 3158

SEQ ID NO: 47507 - DNA, 519 bp, Brassica napus; identical to SEQ ID NO: 2809
  CDS (1)..(519)

SEQ ID NO: 47508 - protein, 172 aa, Brassica napus; identical to SEQ ID NO: 2810

SEQ ID NO: 47509 - DNA, 393 bp, Hordeum vulgare; identical to SEQ ID NO: 2835
  CDS (1)..(393)

SEQ ID NO: 47510 - protein, 130 aa, Hordeum vulgare; identical to SEQ ID NO: 2836

SEQ ID NO: 47511 - DNA, 522 bp, Brassica napus; identical to SEQ ID NO: 2847
  CDS (1)..(522)

SEQ ID NO: 47512 - protein, 173 aa, Brassica napus; identical to SEQ ID NO: 2848

SEQ ID NO: 47513 - DNA, 336 bp, Brassica napus; identical to SEQ ID NO: 2859
  CDS (1)..(336)

SEQ ID NO: 47514 - protein, 111 aa, Brassica napus; identical to SEQ ID NO: 2860

SEQ ID NO: 47515 - DNA, 522 bp, Brassica napus; identical to SEQ ID NO: 2863
  CDS (1)..(522)

SEQ ID NO: 47516 - protein, 173 aa, Brassica napus; identical to SEQ ID NO: 2864

SEQ ID NO: 47517 - DNA, 324 bp, Glycine max; identical to SEQ ID NO: 2883
  CDS (1)..(324)

SEQ ID NO: 47518 - protein, 107 aa, Glycine max; identical to SEQ ID NO: 2884

SEQ ID NO: 47519 - DNA, 342 bp, Zea mays; identical to SEQ ID NO: 2923
  CDS (1)..(342)

SEQ ID NO: 47520 - protein, 113 aa, Zea mays; identical to SEQ ID NO: 2924

SEQ ID NO: 47521 - DNA, 399 bp, Zea mays; identical to SEQ ID NO: 2927
  CDS (1)..(399)

SEQ ID NO: 47522 - protein, 132 aa, Zea mays; identical to SEQ ID NO: 2928

SEQ ID NO: 47523 - DNA, 23 bp, Artificial sequence
  primer
atgccgcacatcgtcatctatac

SEQ ID NO: 47524 - DNA, 21 bp, Artificial sequence
  primer
tcaatcctcgagcagcgcgtc

SEQ ID NO: 47525 - protein, 81 aa, Artificial sequence
  consensus sequence
  Variant (3)..(3): Xaa in position 3 is any amino acid
  Variant (5)..(7): Xaa in position 5 to 7 is any amino acid
  Variant (8)..(8): Xaa in position 8 is any or no amino acid
  Variant (10)..(10): Xaa in position 10 is any amino acid
  Variant (12)..(41): Xaa in position 12 to 41 is any amino acid
  Variant (42)..(49): Xaa in position 42 to 49 is any or no amino acid
  Variant (52)..(53): Xaa in position 52 to 53 is any amino acid
  Variant (56)..(58): Xaa in position 56 to 58 is any amino acid
  Variant (59)..(60): Xaa in position 59 to 60 is any or no amino acid
  Variant (62)..(62): Xaa in position 62 is any amino acid
  Variant (65)..(72): Xaa in position 65 to 72 is any amino acid
  Variant (73)..(74): Xaa in position 73 to 74 is any or no amino acid
  Variant (76)..(76): Xaa in position 76 is any amino acid
  Variant (78)..(79): Xaa in position 78 to 79 is any amino acid
  Variant (80)..(80): Xaa in position 80 is any or no amino acid
CPXCXXXXKXLXXXXXXXXXXXXXXXXXXXXXXXXXXXXXXXXXXXXXXVPXXFIXXXXXHXGGXXXXXXXXXXGXLXXXL

SEQ ID NO: 47526 - DNA, 828 bp, Synechocystis sp.
  CDS (1)..(828): transl_table=11
atgttgctcaaaagtgcttttacttggttggctttgacctttaccactggcctggtggcgatcgccccggtccaggcggaaactgtgttggagagggtggcccgcacgggggaattacgggctggaacccgcaccgatgctgtcccgtttggttttgagatggccaatggggaaatggagggttatggggttgatttaatggccttaattgccttgaagttggcagaagagatgggtaagaccattacggttgatttagatagggttgacctccagagtcgttttgaggcgatcgccagtggggaattggatatagtttgtgaagccaccaccattacccaagatcggttggaattagtggatttttcagctccattctttatttccggggccaagtttttgatgaaacaaggcagtgtggagggctttaacattaatggcaccctggagggcattcccattgcctacattcaaaacaccaccacctttgatatcatccccaaaatttatcccctagcccagtgggtgccagtgcaagaccgggaggaaggcattgctaaattggatgggggccaggtgaaggccgttgtcagcgatggcattttgctagtgggggaactgcttaaacagggcaaaaacccagctgaatacgctctaggaccttatcaacccattaccacggaactttacgcttgcattctgccccagggggacggagactggaaacgctttgtggatgaagtaatttctagcacggaaaaccatgatttgctccaggaatggttcaacattgaccaaaccaatgtggtgcgggttgatcccctttaa

SEQ ID NO: 47527 - protein, 275 aa, Synechocystis sp.
MLLKSAFTWLALTFTTGLVAIAPVQAETVLERVARTGELRAGTRTDAVPFGFEMANGEMEGYGVDLMALIALKLAEEMGKTITVDLDRVDLQSRFEAIASGELDIVCEATTITQDRLELVDFSAPFFISGAKFLMKQGSVEGFNINGTLEGIPIAYIQNTTTFDIIPKIYPLAQWVPVQDREEGIAKLDGGQVKAVVSDGILLVGELLKQGKNPAEYALGPYQPITTELYACILPQGDGDWKRFVDEVISSTENHDLLQEWFNIDQTNVVRVDPL

SEQ ID NO: 47528 - DNA, 903 bp, Agrobacterium tumefaciens str. C58
  CDS (1)..(903): transl_table=11
atgcagagatcgacattgtggctgttgttgtttttcctgagctttctgcccgtggcggcggccagcgacaatgcccaaccaccgacacttgaaaccattgccaggaccggcacgatccggctcggttttgccgatcgcaatattcccttttcctatctgggcaccggcccggagccgatcggctacagcatcgaactgtgcctccgcgtggcggattccatcaagagaaagctcgccctgccggaactgaaggtcgaattcgtcaagcgcacgcccagcaaccgcatcatgcttctcaatgacggcaccatagacatggaatgcgtggcgagcacgaatacggaggaaagacgcaaggccgtctggttttcctacagccacttcatcaccggcacgcgttatgtcgcgctgaaatcaagcggcctgaacactgtcgccgatcttgccgggcgaacggtggtggtgacgacaggcaccatcaatatcagccagctcaacgtgctcaatcgcaaactgggaatgaacatcgccgtcctgcagaatgacagcacggagggcagtttcgacatggtgacggaaaatcgcgcctctgccttcgtcatggacgatatcctcctgcgatccttcatcgccgagaccggcaggccggaagattacgtcatctcgaacgaatatcttgccccgccgcagccctatggcctgatgctgcggcacggcgataccggcttccgggacgccgtcaacgaagcgctggggcagatttatcaaagcggcgaaatcgaaaaaatctacgacaaatggttcaacgcgccgatcccgccgaatggcatcaacctgaaacgcccgctgcccggcgatctggcagaagcgtttcgaagccctgtggatacgacggcagaatga

SEQ ID NO: 47529 - protein, 300 aa, Agrobacterium tumefaciens str. C58
MQRSTLWLLLFFLSFLPVAAASDNAQPPTLETIARTGTIRLGFADRNIPFSYLGTGPEPIGYSIELCLRVADSIKRKLALPELKVEFVKRTPSNRIMLLNDGTIDMECVASTNTEERRKAVWFSYSHFITGTRYVALKSSGLNTVADLAGRTVVVTTGTINISQLNVLNRKLGMNIAVLQNDSTEGSFDMVTENRASAFVMDDILLRSFIAETGRPEDYVISNEYLAPPQPYGLMLRHGDTGFRDAVNEALGQIYQSGEIEKIYDKWFNAPIPPNGINLKRPLPGDLAEAFRSPVDTTAE

SEQ ID NO: 47530 - DNA, 894 bp, Agrobacterium tumefaciens str. C58
  CDS (1)..(894): transl_table=11
atgcgcctttcagtattttgccttttcctcacatgctttgctcctgttaccccgctgcaggccgccgatgaaggcgacacgcttcagcagattgccaaaaccgcaaaaatccgtatcggttatcgcgaggccgaaccgcccttttcctatcaattgccaaacggggaaatcaccggtttctctaccgatctctgtagggcaatcagcgaggatattcgcagcaagctgaagctcgacaagatcgagctcgaatatgtcaaggcaacgcccgcgacccgcttcattcttgtccgcagtggccagatcgacattgaatgcgccgccacgaccaataatagcgaacgtcgcaagatcgtcgatttctcctatcccaatttcatgaccgcgacacagtttctctcccgcaagcaggacaatttgaaaagccttgccgatctcgccgggcgatccgtcacatccgcttccggcaccgtcaatatcgaacagctgaacgccgtgaaccgggcgaagaacctcaatatctctgtcatgccgaccaagaccaatgaagaagccttcgacctcgttgttgccggcaaggcctccgccttcgtgatggatggcatattgctggcggcgctggcggcgacctcggaaaatcctgacctttatgcactctccgaggaaacgctcagcgctcccgaaccctatggtctggttttccggcggaacgacccggcgttcaaggcggcggtcaatgatagtcttcggcatatgtacaccagttcgaccattcacggcctttatgaaaagtggttcaccaaacccattccgccgaacggcatgaacctgaacctgccgatggccgcctccctgaaacaggcctacgaccatccgagcgaataccaggactga

SEQ ID NO: 47531 - protein, 297 aa, Agrobacterium tumefaciens str. C58
MRLSVFCLFLTCFAPVTPLQAADEGDTLQQIAKTAKIRIGYREAEPPFSYQLPNGEITGFSTDLCRAISEDIRSKLKLDKIELEYVKATPATRFILVRSGQIDIECAATTNNSERRKIVDFSYPNFMTATQFLSRKQDNLKSLADLAGRSVTSASGTVNIEQLNAVNRAKNLNISVMPTKTNEEAFDLVVAGKASAFVMDGILLAALAATSENPDLYALSEETLSAPEPYGLVFRRNDPAFKAAVNDSLRHMYTSSTIHGLYEKWFTKPIPPNGMNLNLPMAASLKQAYDHPSEYQD

SEQ ID NO: 47532 - DNA, 897 bp, Synechocystis sp. PCC 6803
  CDS (1)..(897): transl_table=11
atgaaaaaatttgcctgtttagccttgtctgtattactcagtggagccgcgagcttacccagttgggcaggggaggtattggaccgcattgaacaaacgggggtgattaatgccggcactagaaaggatgcggtgcccttcgcctacgttgacgaccaaggggaatgggtgggtttttccattgatctgctggaattgattcgccaggaagcggaagccagactgggtaaaccaatcaagttaaacatggtggaagccaccgccgataatcgctttgacttgattaccaatcagaccatcgacttggaatgtgcttcttccaccttcacctggaatagaacggcagtggtggatttttcagtcagttactttgccgatggtaccaaaattatcaccggggtggatagtgatctagaatctgccgattccctagcgggacgggcgatcggggttattcccgacaccaccaatgcaaaagctattctcgactttcaaccgggggcaaccatcgttgaagttaaagaccaggccgatggcatggccaagcttgaagctggagaaatcgaagcttttgctggagatggcattgttttggcaggattgaaaaaaacctctgataatccccaacagtggaaagtggtgcctaattttccctatcagtacgaagcctatgcctgtttattacccaaagatgattctgactggcgcaatttggtcaactacagtctagtcaaatatatggaaggggtaatcagcgatcagaccgcagcggtggaaatttacgagcgttggtttgatgaagaaactggcgttgcgccctatccccgggaaacgatcaacgattattaccaaggcattgtggatagttttgagtggattcccattgttagctattag

SEQ ID NO: 47533 - protein, 298 aa, Synechocystis sp. PCC 6803
MKKFACLALSVLLSGAASLPSWAGEVLDRIEQTGVINAGTRKDAVPFAYVDDQGEWVGFSIDLLELIRQEAEARLGKPIKLNMVEATADNRFDLITNQTIDLECASSTFTWNRTAVVDFSVSYFADGTKIITGVDSDLESADSLAGRAIGVIPDTTNAKAILDFQPGATIVEVKDQADGMAKLEAGEIEAFAGDGIVLAGLKKTSDNPQQWKVVPNFPYQYEAYACLLPKDDSDWRNLVNYSLVKYMEGVISDQTAAVEIYERWFDEETGVAPYPRETINDYYQGIVDSFEWIPIVSY

SEQ ID NO: 47534 - DNA, 906 bp, Nostoc sp. PCC 7120
  CDS (1)..(906): transl_table=11
atgtataaaaatttggcgatcgctcttttcagtttgacgttgacgacagttataccaggtgcagcattagcagaaacggtgatgcagaaagtctctcgtacaggggtgctaacagctggtactagtaaagatgccatgccttttgcctatactaatgctcagggacagttgactggttactctgtcgatatgttgtctgagattaagcggcatttagaaaaagaattaggtaaaaaaatacaactaaaattagtgccattaactcctgcacaaaggattcccaaaatagttaatcggcaagttgatattgtttgtgatgctagtagttttacctgggaaagagataaaaaggtagatttttctgtcagctatggggcgactggtactcaattattagtgaagtctggcagcaatcttggttcccctgaatccctcattggtaaacgcattggtgtgttagcacaaactaccaatgaacaggctatcaagcgggtacaaccccaagctaaactggtgtatttgaaaagtcgttcagaaggttacacggctttgcaagaaggcaaaatagatgctttctcatctgatagcattttgttagagggttggttgcaaagggtcgaaaatcctgatgattttgcgattgtccccgatcgcccttattcacgagagggtattgcctgcatggttcctgaagataactctaaatttttggatgcagtcaattattctctagtgaagtttatgcagggatttgtcaatggtgatactcgatatgtgacgatttttgatcgctggtttggggctaaaggtgctttgctgttgaatcgggatttgcgcgatttaatgaaagaaacgatgcagttgtttatcgagtttcgggaagaaattcctcagcgtgaactttaa

SEQ ID NO: 47535 - protein, 301 aa, Nostoc sp. PCC 7120
MYKNLAIALFSLTLTTVIPGAALAETVMQKVSRTGVLTAGTSKDAMPFAYTNAQGQLTGYSVDMLSEIKRHLEKELGKKIQLKLVPLTPAQRIPKIVNRQVDIVCDASSFTWERDKKVDFSVSYGATGTQLLVKSGSNLGSPESLIGKRIGVLAQTTNEQAIKRVQPQAKLVYLKSRSEGYTALQEGKIDAFSSDSILLEGWLQRVENPDDFAIVPDRPYSREGIACMVPEDNSKFLDAVNYSLVKFMQGFVNGDTRYVTIFDRWFGAKGALLLNRDLRDLMKETMQLFIEFREEIPQREL

SEQ ID NO: 47536 - DNA, 897 bp, Burkholderia vietnamiensis G4
  CDS (1)..(897): transl_table=11
atggatcgccgctttcgttggctggccctcgtgctggccggtgcgctggccggcgccgcgcacgcgcaggcgctgaccggcacactgaagaagatcaaggacaccggcgtcgtgtcgctgggtatccgtgaatcgtcggtgccgttctcgtattcggacaaccagcagaacaacatcggctactcgcgcgacatcgcggcgcgcatcatcgacgcgctgaaggccgaattgaaggcgccgaacctgacggtgaaggagattccgatcacgtcgcagaaccgcattccgctgctgcagaacggcacgatcgacttcgaatgcggatcgacgaccaacacgctggagcgccagaagcaggccgcgttctccaacagcatctttctgtacgggatccgcttcagcacgcgcaaggattccggcgtgaaggacttcgcggatctggccggcaagaccgtcgcgacgacggccggcacgtcggacgagcggctgctgcgcaagctcaacgaagagaaggcgatgaacatgacgatcatcagcgcgaaggaccacgccgaagcgttcatgaacgtcacgaccgggcgtgcggtcgcgttcgtgatggacgagccgctgctgtacggcgaaatcgcgaaggatcgcaatccgggcgcctacacggtggcgggcacgccgctcgtccacgaaaactacgcgtgcatgctgcgcaaggacgatcccgcgttcaagcagctggtcgatcgcgtgatcgcgcagttgcagacctccggcgcggccgagcaactctacgaccgctggttcatgcagccgataccgccgaagggcgtgagcctgaactacccgttgtcgcccgagatgaagcagctgttcagaaacccgaccgatcgcgcgcagtactga

SEQ ID NO: 47537 - protein, 298 aa, Burkholderia vietnamiensis G4
MDRRFRWLALVLAGALAGAAHAQALTGTLKKIKDTGVVSLGIRESSVPFSYSDNQQNNIGYSRDIAARIIDALKAELKAPNLTVKEIPITSQNRIPLLQNGTIDFECGSTTNTLERQKQAAFSNSIFLYGIRFSTRKDSGVKDFADLAGKTVATTAGTSDERLLRKLNEEKAMNMTIISAKDHAEAFMNVTTGRAVAFVMDEPLLYGEIAKDRNPGAYTVAGTPLVHENYACMLRKDDPAFKQLVDRVIAQLQTSGAAEQLYDRWFMQPIPPKGVSLNYPLSPEMKQLFRNPTDRAQY

SEQ ID NO: 47538 - DNA, 897 bp, Azoarcus sp. EbN1
  CDS (1)..(897): transl_table=11
atgcacaagtccctcaccgtcattgcgctatgtctgtccgcggccggcatggtcgcgcccgctcacgcacagtcgagcggcacgctgcagaagatcaaggatacgggcaccatcactgtcggacaccgcgagtcgtcggtgccgttttcctacctcgatgcgaaccagaagccggtcggctatgcgatggacctgtgtgcaaaggtcgtcgacgccgtcaagaccgaactgaagatgcccaacctgcaggtcaaataccaaccggtgacgtcgcagaaccgcattccgctgatgcagaacggcacgatcgacctcgagtgcggctcgacgacgaacagcgtcgcgcgtcagcagcaggtgggcttcagcgttgcgtacttcatcaccagcgtgcgcatgggcgtgcgcaaggattcgggcatcgacgacatcggcgatctcgacggcaagccggtcgtgacgacgacgggcacgacgtcggacgagctgatcaagcagaacgagaaaggcaggacgatcaacgtgaagaacatctacggcaaggaccacgccgactcgttcctgatggtcgatagcgggcgcgccgcggcgttcgtcatggacgacatcctgcttgccggcctgatcgcgaattcgaagaatccgtccgcgttcgagatcgtcggtccgtcgctgcgcgatgagccgtacggcgtgatggtgcgcaaggacgatgcgccgttcaaggcgatcgtcgacaagactctcgtcgggctgatgaagtccggcgaggcggaaaagctttacgacaagtggttcatgaaaccgattccgccgcgcaacgtgaacctgaacttcccgatgagccccgcgctcaaggccgcgttcgagaacccgaccgacaaaggcgtcgaataa

SEQ ID NO: 47539 - protein, 298 aa, Azoarcus sp. EbN1
MHKSLTVIALCLSAAGMVAPAHAQSSGTLQKIKDTGTITVGHRESSVPFSYLDANQKPVGYAMDLCAKVVDAVKTELKMPNLQVKYQPVTSQNRIPLMQNGTIDLECGSTTNSVARQQQVGFSVAYFITSVRMGVRKDSGIDDIGDLDGKPVVTTTGTTSDELIKQNEKGRTINVKNIYGKDHADSFLMVDSGRAAAFVMDDILLAGLIANSKNPSAFEIVGPSLRDEPYGVMVRKDDAPFKAIVDKTLVGLMKSGEAEKLYDKWFMKPIPPRNVNLNFPMSPALKAAFENPTDKGVE

SEQ ID NO: 47540 - DNA, 1002 bp, Pseudomonas syringae pv. syringae B728a
  CDS (1)..(1002): transl_table=11
atgtggacgccgttgaagcattcgccaagaagcgggccgactctgatggcggccccatcaataaaaaatgaaatcaaggactcacccatgcgcatcgttccccacctgttgggcgcagcaatcactgccgctctgatcagcacgcctgttttcgccgccgaactcaccggcactctgaagaagatcaaggagtccggcaccatcacgctgggccatcgtgacgcctccattccgttttcctacatagcggatgcttcaggcgtacctgtgggctactcccatgacatccagctgaaaatcgtcgaagccatcaagaaagacctggacatgcctgacctcaaggtcaagtacaacctggtgacttcacagacccgtatcccgctggtgcagaacggcaccgtcgatgtggaatgtggctcgaccaccaacaatgtcgagcgtcagcagcaggtcgatttctccatcggcatctttgaagtcggcacacgcctgctgtcgaaaaagaactccagctacaaggatttcgacgacctgaaaggcaagaacgtcgtcaccacggccggcactacttccgagcgcatcctcaaggcgatgaacgctgacaagcagatgggcatgaacgtgatctccgccaaagaccacggtgaatccttccagatgctcgagtccggccgtgccgtcgcgttcatgatggacgacgcgctgctggcaggcgaaatggccaaggccaagaagccggacgactgggcagtgaccggcactgcacaatcctacgaaatatacggctgcatggttcgcaagggtgacgccccgttcaagaaggccgtggatgacgccattgtcgccacctacaagtctggcgaaatcaatgccatctacagcaagtggttcatgtcgaaagtcccgcctaaagggctgaacctgaatttcccgatgagcgacaagctcaaggagctgattcagaacccgaccgacaaagcggctgacgacaaaaaagcctga

SEQ ID NO: 47541 - protein, 333 aa, Pseudomonas syringae pv. syringae B728a
MWTPLKHSPRSGPTLMAAPSIKNEIKDSPMRIVPHLLGAAITAALISTPVFAAELTGTLKKIKESGTITLGHRDASIPFSYIADASGVPVGYSHDIQLKIVEAIKKDLDMPDLKVKYNLVTSQTRIPLVQNGTVDVECGSTTNNVERQQQVDFSIGIFEVGTRLLSKKNSSYKDFDDLKGKNVVTTAGTTSERILKAMNADKQMGMNVISAKDHGESFQMLESGRAVAFMMDDALLAGEMAKAKKPDDWAVTGTAQSYEIYGCMVRKGDAPFKKAVDDAIVATYKSGEINAIYSKWFMSKVPPKGLNLNFPMSDKLKELIQNPTDKAADDKKA

SEQ ID NO: 47542 - DNA, 936 bp, Ralstonia eutropha JMP134
  CDS (1)..(936): transl_table=11
atgatcgaaacgggtctgccgcgccgggtttcatgcccgaacgctgtgcttgtcttgtcctccctttcctgcgctgccatgctggccaccggcgcagcttccgccggcgctgccaccgcgccggtcctgaatcacatccagcaaaccggcgttatccgcattgcgcaccgcgaaagctcggtaccgttctcgttcgtggccgacggcaagccggtcggctatgccgtcgacctgtgcctgaagatcgccgatgcggtacgcacctcgctgcacctgcccggcctgcgcgtcgagtgggtcccggtcacgccggccaaccgcattcccgctatcgtcgagggcaaggcggacctggaatgcggctcgaccaccaacaaccgggaacggcgcgagcaggtggccttcacgatcccgcactacattgccggcagccgcatgatcgtgaagaccgattccggcatcagcaagtgggcggatctgcgcggcaagacggtcgtctccacgtcaggcaccacgccgctggccatgctgcgcaagatggacgaaggcaaggtcatgcagtggcggctggtcgaggccaaggatcacgcccaggcctttgccatggtggaagccggcaaggccgatgccttcgtgatggacgacgtgctgctgtacggcctgcgcgcgaacgccagccgaccgggcgatttcaaggtcaccggcgaaatgctgaccatcgagccgtacgccatcatgctttccaaaagcgacccggagttcaagaagctcgtcgacaagacgctgatcgccgcagtctacgaccaggaaacgccgaggctctacaagaagtggttccaggcaccgattccgccgcacggcatcacgctcgacattccgatgagctacctgctgcgcgattccttcaagttcccgagcgacaaagtggcggactga

SEQ ID NO: 47543 - protein, 311 aa, Ralstonia eutropha JMP134
MIETGLPRRVSCPNAVLVLSSLSCAAMLATGAASAGAATAPVLNHIQQTGVIRIAHRESSVPFSFVADGKPVGYAVDLCLKIADAVRTSLHLPGLRVEWVPVTPANRIPAIVEGKADLECGSTTNNRERREQVAFTIPHYIAGSRMIVKTDSGISKWADLRGKTVVSTSGTTPLAMLRKMDEGKVMQWRLVEAKDHAQAFAMVEAGKADAFVMDDVLLYGLRANASRPGDFKVTGEMLTIEPYAIMLSKSDPEFKKLVDKTLIAAVYDQETPRLYKKWFQAPIPPHGITLDIPMSYLLRDSFKFPSDKVAD

SEQ ID NO: 47544 - DNA, 912 bp, Anabaena variabilis ATCC 29413
  CDS (1)..(912): transl_table=11
atgactatgtataaaaatttagcgatcgctcttttcagtttgaccttgacgacagtcataccagatgcagcattcggggaaactgtcatgcagaaagttgctcgtacaggggtattaactgctggcactagtagagatgcaatgccctttgcctatactaatgctcagggacagttgactggttactctgtcgatatgctgtctgtaatcaagcaacagttagaaaaagaattagggaaaaaaatacaactaaaattagtggcattaactcctgcacaaaggattcccaaaatagttaatcagcaagttgatattgtttgtgatgctagtagttttacctgggaacgagataaaaaggtagatttttctgtcagctatggggctactggtactcaattattagtaaagtctggtagcaatcttggttcccctgaatcgctaattggtaaacgcattggtgtattagcacaaactaccaatgagcaggcaatcaagcgggtacaaccccaagctaaactagtttatttgaaaagtcgttcagaaggttatacagctttgcaagagggcaaaatagatgctttctcatctgatagcattttgttagaaagctggttgcaaaaggcaaaaaatcccgatgattttgcgatcgtccctgatcgcccttattcacgagagggcattgcctgcatggttcctgagaataattctaaatttttggatgcagtcaattattctctggtgaagtttatgcagggatttgtcaatggtgatactcgatatgtcacaacttttgatcgctggtttggggctaagggtgtcgttttgctaaatcgggatttgcgcgatttaatgaaagaaacgatgcagttgtttatcgaatttcgggaagaaattcctcaacaagaactttaa

SEQ ID NO: 47545 - protein, 303 aa, Anabaena variabilis ATCC 29413
MTMYKNLAIALFSLTLTTVIPDAAFGETVMQKVARTGVLTAGTSRDAMPFAYTNAQGQLTGYSVDMLSVIKQQLEKELGKKIQLKLVALTPAQRIPKIVNQQVDIVCDASSFTWERDKKVDFSVSYGATGTQLLVKSGSNLGSPESLIGKRIGVLAQTTNEQAIKRVQPQAKLVYLKSRSEGYTALQEGKIDAFSSDSILLESWLQKAKNPDDFAIVPDRPYSREGIACMVPENNSKFLDAVNYSLVKFMQGFVNGDTRYVTTFDRWFGAKGVVLLNRDLRDLMKETMQLFIEFREEIPQQEL

SEQ ID NO: 47546 - DNA, 933 bp, Ralstonia metallidurans CH34
  CDS (1)..(933): transl_table=11
atgaccaattcgggcctgccacgccgcgcctcgttcgggggcgtcgcgtctgtcttcctttcccttgccgcattgctgacgccggccgccatcccggcggcgcaggcggcatccagtccggttatccagcgcatccagcagaccggcacgatccgcatcgcgcaccgcgaaagctccgtgccgttctcgttcattgccgacggcaagccggtcgggtacgccgtcgatctgtgcctgaaggcggctgacgccgtgcgcgcccaactgaaaatgccgcagttgcgcgtggagtgggtgcccgtgacgccggccacgcgcatcccggccatcgtcgatggcaaggccgatctggaatgcgggtcgaccaccaacaatcgcgagcgtcgcgaacaggtcgccttcacgatcccacactacatcgccggcagccgcatgcttgtcaagtcggattccggcatccgccgctggagcgacctgcgcggcaagaccgtcgtctccaccaccggcaccacgccgctggccatgatccgcaagatggatgagtccggcgcgatgggctggaaggtcctggaggccaaggaccatgccgaggcgttcgcgatggtggaatcgggccgcgccgatgcgttcgtgatggacgacgtgctgctgttcggcctgcgcgcaaacgcgaagaacccggcttcgctggcggtgaccggcgacctgctgacgatcgaaccctacgcgatcatgctgtcgaagcaggacgccgagttcaagaagatcgtcgacaaggccctggtcaacgcgatctatgaccaggaaacccagaagctctaccgcaagtggttccagcagccgatcccgccccatgggatcacgctggatattccgatgagctacctgctgcgggactcgttcaagttcccgagcgacaaggtggcggattga

SEQ ID NO: 47547 - protein, 310 aa, Ralstonia metallidurans CH34
MTNSGLPRRASFGGVASVFLSLAALLTPAAIPAAQAASSPVIQRIQQTGTIRIAHRESSVPFSFIADGKPVGYAVDLCLKAADAVRAQLKMPQLRVEWVPVTPATRIPAIVDGKADLECGSTTNNRERREQVAFTIPHYIAGSRMLVKSDSGIRRWSDLRGKTVVSTTGTTPLAMIRKMDESGAMGWKVLEAKDHAEAFAMVESGRADAFVMDDVLLFGLRANAKNPASLAVTGDLLTIEPYAIMLSKQDAEFKKIVDKALVNAIYDQETQKLYRKWFQQPIPPHGITLDIPMSYLLRDSFKFPSDKVAD

SEQ ID NO: 47548 - DNA, 900 bp, Azoarcus sp. BH72
  CDS (1)..(900): transl_table=11
atgcgcacctccctttccgtcctcgccctctgcttcgccgctgccggcctcgccgcgcccgcccatgccgccgaaccgaccggcacgctgaagaagatcaaggacagcggcacgatcacggtcggccaccgcgaatcctcggtgcccttctcctacctggacgcggaccagaagccggtgggctacgcgatggacctgtgtgcgaaggtggtcgatgcggtgaaggacgagctgaagctgcccaagctggaggtgaagtaccaggcggtgacctcgcagaaccgcatcccgctgatgcagaacggcaccatcgacatcgaatgcggctccaccaccaacagcgtgcagcgccagcagcaggtgggcttctcggtgaactacttcgtcaccagcgtgcgcatggcggtgcgcaaggattccggcatcaaggatatcggcgacctcaacggcaagccggtcgccaccaccaccggcaccacctcggacgcgctgatcaagcagaacgaaaagggcaagtcgatcgacgtgcgcaacatctacggcaaggaccacgccgattccttcctgatggtcgagagcggtcgcgccgccgccttcgtgatggacgacatcctgctcgccggcctgatcgccagctccaagaaccccgccgcctacgagatcgtcggcccctcgctgcgcgacgaaccctatggcgtgatgctgcgcaaggacgacaccgagttcaaggcggtggtcgacaaggcgctgaccgggctgatgaagtcgggcgaggccgagaagatgtacaccaagtggttcacgcagccgatcccgccgcgcaacgtgaacctgaacttcccgatgagcgccgccaccaaggccgcgctgaccaatccgaccgacaagggcgtggagtaa

SEQ ID NO: 47549 - protein, 299 aa, Azoarcus sp. BH72
MRTSLSVLALCFAAAGLAAPAHAAEPTGTLKKIKDSGTITVGHRESSVPFSYLDADQKPVGYAMDLCAKVVDAVKDELKLPKLEVKYQAVTSQNRIPLMQNGTIDIECGSTTNSVQRQQQVGFSVNYFVTSVRMAVRKDSGIKDIGDLNGKPVATTTGTTSDALIKQNEKGKSIDVRNIYGKDHADSFLMVESGRAAAFVMDDILLAGLIASSKNPAAYEIVGPSLRDEPYGVMLRKDDTEFKAVVDKALTGLMKSGEAEKMYTKWFTQPIPPRNVNLNFPMSAATKAALTNPTDKGVE

SEQ ID NO: 47550 - DNA, 891 bp, Acidovorax sp. JS42
  CDS (1)..(891): transl_table=11
atgaattgcaagcaaggatggaaggcgctgggcgccgcggtggcgctgtgctgcgccgtgggcgcgcaagcccaaggggtgctggagcgtgtgcgcggcggcggaccgctggtgctggcgcaccgtgaatcgtcggtgccgttttcgtacgtgcacgagggcaagcccatgggctacgccctggacctgtgcctgcatatcgccgaagtggtgcgcaagaagaccggcatgaagaacatgccggtgcagttggtgcaggtgacacccgccaatcgcattgagatggtgaagaccggcaaggccgatatggaatgcggctccaccaccaacaacgccgagcgccgcaaggatgtggccttcaccattccgcacttcatcacgggtgcgcgcctgctggtgcccgcggccagctcggtgacgcgcatggaggatctggaaggcaagaagctcgtgtccaccaaaggcacgacgccctacaaagcggccgagcaggccaaccgcgaacggctgatgcgcatccagctggtggaggcgcccgaccatgaggccgcggtggtcatggtggagaagggccaggccgacgccttcgtgatggacgatgtgctgttgtatggcttggcggccaaccgccccgaccccaaggcgctgaaggtggtgggccgcttcgtcaccaccgagccgctggcgatcatgcttgccaagaacgatcccgagttcaagaagttggtggacgaggagatgcgccgcctgatcgtgagcaatgagatcaacgccatctacgacaagtggttcatgcagcccattgcgcctacccaccgtgcgctgaacctgcccgtgagctacctgctgcgggacttctggaaataccctaccgatcaggtccccttctga

SEQ ID NO: 47551 - protein, 296 aa, Acidovorax sp. JS42
MNCKQGWKALGAAVALCCAVGAQAQGVLERVRGGGPLVLAHRESSVPFSYVHEGKPMGYALDLCLHIAEVVRKKTGMKNMPVQLVQVTPANRIEMVKTGKADMECGSTTNNAERRKDVAFTIPHFITGARLLVPAASSVTRMEDLEGKKLVSTKGTTPYKAAEQANRERLMRIQLVEAPDHEAAVVMVEKGQADAFVMDDVLLYGLAANRPDPKALKVVGRFVTTEPLAIMLAKNDPEFKKLVDEEMRRLIVSNEINAIYDKWFMQPIAPTHRALNLPVSYLLRDFWKYPTDQVPF

SEQ ID NO: 47552 - DNA, 951 bp, Nostoc punctiforme PCC 73102
  CDS (1)..(951): transl_table=11
atgtttgttagtactaaaataaatctctcgtgtttacctgcttttactaagtcaaagatatatagtgccatattcggtttgatattatcagtatccctacctggtgttgcaggggcagaaactgtgatgcaaaaagtagcacgaacaggagtattaacggcaggtacaagtagagatgctttaccctttgcatactctgacagtcaaggaaaattgatcggttattctgtggatatgctgactttgatccagaagcaattagaaaaagaattaggcaaaaagattcaacttaaattagttggagttaccccagcagaaagaattcctaagataattaaccggcaagttgatattatctgtgatgctagtagctttacttgggagcgagataaaaagattgatttttcagttagctatggtgtcacaggtactcaaattttaattaagaaggacagcaatttaggttcgcctgaatctctcattaacaagcgtgtgggtgtactggctggaactaccaacgaagaaaccatcaagcaggtacaaacccaagctaaacttgtatattttaagactagagcagaaggatttgctgctttggaacagggcaaaattgacgcttttgcatccgatagcattattttagagggatggttacaaacagcaaaaaatcaagatagttttgccatcgcaccccctcgtccctattcacgagaaggaattgcttgtatggttcctgagaataactctaaattcctcgattcagtgaactattccctcgtcaagtttatgcaaggatttgtcaacgataaccccaaatatgttgcgatttttgatcgttggtttggttctcaaggtgttgtatttctaaatcgagacttacgtgatttagctgtggaaaccatgcaattgatgatagagtttcacgaagatattccccagaaagatttgtag

SEQ ID NO: 47553 - protein, 316 aa, Nostoc punctiforme PCC 73102
MFVSTKINLSCLPAFTKSKIYSAIFGLILSVSLPGVAGAETVMQKVARTGVLTAGTSRDALPFAYSDSQGKLIGYSVDMLTLIQKQLEKELGKKIQLKLVGVTPAERIPKIINRQVDIICDASSFTWERDKKIDFSVSYGVTGTQILIKKDSNLGSPESLINKRVGVLAGTTNEETIKQVQTQAKLVYFKTRAEGFAALEQGKIDAFASDSIILEGWLQTAKNQDSFAIAPPRPYSREGIACMVPENNSKFLDSVNYSLVKFMQGFVNDNPKYVAIFDRWFGSQGVVFLNRDLRDLAVETMQLMIEFHEDIPQKDL

SEQ ID NO: 47554 - DNA, 885 bp, Crocosphaera watsonii WH 8501
  CDS (1)..(885): transl_table=11
atggaaaaagttatgaaaaatattaaagtttctggaataattattaatttgtttttgttatttttctctagtttccctagtcatggacaagaagaaactgtcttagaaagaattgataaaacagggttattaaaagtcggtattagagaagatgctgtcccttttggttatcgagatattaacggagatttagaggggttatgtttggactttattgctgtacttagagacaaactgaaacaagaattaaataaacaagtgattgctattaaggtgtataaatcaaccttatttaatcgctttgaattggtgagcgatcgcattgtagatatagagtgtggaccaaatacaatccgagaacttcctgaatatcaaatccaattttctaccccctttctcttaacaggaactcaattattaattgaggccgataaagcaaaaactattgatcctgatggtagtttagaaaatgttaatattggggttctcaaaaacaccactaatgaacaattaatggctgaaaaatatcctctagcaaatttagttcagtttcaaggtgtaactggtagatatagaggaatacaagcattaagaggggataaaattgatgcttttgctagtgatggtattctcttggttggggaagcaatagtacaagatttaagactaggtgcagattatctgttagtaccaaggaaccccatcgactgtgaaaaatatgggctaattttacccaataatgatccacaatggttgagttttattaattcattgattgggaatgcaccagcaagaaatctttatcttgattggtttggagacattgctacacaactggagtctgtgcaatcgttttgtagagaaaaaaatggggatattgattaa

SEQ ID NO: 47555 - protein, 294 aa, Crocosphaera watsonii WH 8501
MEKVMKNIKVSGIIINLFLLFFSSFPSHGQEETVLERIDKTGLLKVGIREDAVPFGYRDINGDLEGLCLDFIAVLRDKLKQELNKQVIAIKVYKSTLFNRFELVSDRIVDIECGPNTIRELPEYQIQFSTPFLLTGTQLLIEADKAKTIDPDGSLENVNIGVLKNTTNEQLMAEKYPLANLVQFQGVTGRYRGIQALRGDKIDAFASDGILLVGEAIVQDLRLGADYLLVPRNPIDCEKYGLILPNNDPQWLSFINSLIGNAPARNLYLDWFGDIATQLESVQSFCREKNGDID

SEQ ID NO: 47556 - DNA, 903 bp, Crocosphaera watsonii WH 8501
  CDS (1)..(903): transl_table=11
atgatgaaaaaaaaatttgttttatttgctttaactttattgttaactgcgacttctcaaaatgcagtttgggctggagaaattctcgaaagaattagacaaacaggggttattaccgcaggaactcgtaaagatgcaactccttttgcctacatcaatgaaaagggagaatgggtgggttattctattgatattttagagattattcgtcaaaatgtggaaaaagaactagggaaacctattcgcttaaaattggtagaagttacgccacaaaatcgttttaataaagttaaaaataaagagattgatatagaatgtgcctcttctacttttacctgggaacgggataagattattgatttttctgttagttattttgctagtgggacaaaaattatgaggaaaaaaggcagtagtttaggtactattgactccttagcaggtaggagaattggtgttattccgaatacaactaatgaacaagcgattaaaattcaacaacctgctgcaattattgttcctattaaaaatagaattgaagggttagaaaagcttaaaaaaggtgaaattgaagctattgctggtgatgggattgttttacaggcattacaattagaaaataataatggcgatcgctttgaggtggttccagaatttccttacgtttatgaagcttatgcttgtatgattcccgaagatgaatcagcttggcgaggtatggtaaattacagtttagttaagtttatggaaggtattattagtgatcaaccgcaacaagtagaaatgtatgaaaaatggtttggagaagaaacgggagttacaccttattctagagaagctattaacgattattttcaaggtattgtagatggttacgaatggattcctttaattagttattga

SEQ ID NO: 47557 - protein, 300 aa, Crocosphaera watsonii WH 8501
MMKKKFVLFALTLLLTATSQNAVWAGEILERIRQTGVITAGTRKDATPFAYINEKGEWVGYSIDILEIIRQNVEKELGKPIRLKLVEVTPQNRFNKVKNKEIDIECASSTFTWERDKIIDFSVSYFASGTKIMRKKGSSLGTIDSLAGRRIGVIPNTTNEQAIKIQQPAAIIVPIKNRIEGLEKLKKGEIEAIAGDGIVLQALQLENNNGDRFEVVPEFPYVYEAYACMIPEDESAWRGMVNYSLVKFMEGIISDQPQQVEMYEKWFGEETGVTPYSREAINDYFQGIVDGYEWIPLISY

SEQ ID NO: 47558 - DNA, 864 bp, Roseovarius nubinhibens ISM
  CDS (1)..(864): transl_table=11
atgacaatcatcaagagtttcatggcggcagccatcgcggcgagccttgccgttccggccatcgcgcagaatgcgggcggtacgctcgagaaaatcgcggcctcgggcgagatcgtgctcggccatcgcgaaagctcggtgcctttcgcctatctcgatgagaaccaaaagcccatcggctattccatcgacctctgccacaagatcgtcgaggccgtgtcggccgagctcggcaaagagatttcgatcaaatatgtgccggtcaacccgaagacccgtatcgcgctcatggcgaatggcacgattgacctcgaatgcggctcgaccaccaacaacctgacccgtcaggaacaggtcgaatacctgcccaccaccttcatcaccggcaccaagcttctggtgcgcaaggatggcggcatcgccaccatcgacgatctcgacggcaaggccgtggcgctggcccaaggcacgaccaacgagcgcgcggtgaaggccgcgatcgaagagaagggcctcgacgtcaagatcctgccggtgcgtgaccacgccgaaggcatgctgtcgctcgagaccgaccgggtcgacgcctattcgaccgaccacatcctgctctttggtctgatctccaagtcgaaatcccccgatgatttcgccgttgtcggcgatttcctctccttcgacccctatgccctcatggtgcgccgcgacgacagcgcctttgagcttgtcggcaagaaggccctcgccgcggtgttccgctcgggcgagatcaacgacatctatgcaaaatggttcgatcccctcggcgtggaacagaccgacctcctgaaggcggcgttccagctcaacgctctgccggaataa

SEQ ID NO: 47559 - protein, 287 aa, Roseovarius nubinhibens ISM
MTIIKSFMAAAIAASLAVPAIAQNAGGTLEKIAASGEIVLGHRESSVPFAYLDENQKPIGYSIDLCHKIVEAVSAELGKEISIKYVPVNPKTRIALMANGTIDLECGSTTNNLTRQEQVEYLPTTFITGTKLLVRKDGGIATIDDLDGKAVALAQGTTNERAVKAAIEEKGLDVKILPVRDHAEGMLSLETDRVDAYSTDHILLFGLISKSKSPDDFAVVGDFLSFDPYALMVRRDDSAFELVGKKALAAVFRSGEINDIYAKWFDPLGVEQTDLLKAAFQLNALPE

SEQ ID NO: 47560 - DNA, 900 bp, Synechococcus sp. WH 5701
  CDS (1)..(900): transl_table=11
ttgctgctgaaacgtctgctcccgctgcttcaactccttgcctgtctggccctggcggctccggcctccgccggctccctgctgcagtcggtggcggcctcgggcgtcctggtggggggtaccagccgtgatgcctttcccttcgcttaccagaacgaggagggtcagctcgttggctactcgatcgacatgatgaatctgatccgggaggagatcgagcgccagacgggccgtccgatcaagctgaagctggtgccgctcgacaccgaccagcgcctctccagcctggaatcaggggcggtgaacctggtctgcgatgccagcagcttcacctggagccgcgatgagaaggtggatttctcggtgagttacggcatcaccggcacccagttgctcgtgccccggggctcggggctctcctctcctgaatccctggcagggaagcgggtgggtgtcctgccgcgcaccaccagtgtcctggcagtggccagccgtcagccggctgcctcgctggtgctgctcaaggaccgccaggagggctatgaggccctccagcaaggccgcatcgatgccttcgccgacgacggcatgctgctctatgcctggttgcagcgtcagggcggccaggctcccttcaaggtgtcggcggacacttactccagggagggcatcgcctgcatggtgccccagaacaattcatccttccagcgggtggtggacctggctctgatccgttacatgcaggggtttctgcgtcagcagcccagggagcggggcatcttcgatcgctggttcggcccccagggcaaaacgccccttacccaggacgtcaccggcctgttcaccgaaaccatgcagttgatggttgacttcaaggaagaagtgccgtccaaaccctga

SEQ ID NO: 47561 - protein, 299 aa, Synechococcus sp. WH 5701
MLLKRLLPLLQLLACLALAAPASAGSLLQSVAASGVLVGGTSRDAFPFAYQNEEGQLVGYSIDMMNLIREEIERQTGRPIKLKLVPLDTDQRLSSLESGAVNLVCDASSFTWSRDEKVDFSVSYGITGTQLLVPRGSGLSSPESLAGKRVGVLPRTTSVLAVASRQPAASLVLLKDRQEGYEALQQGRIDAFADDGMLLYAWLQRQGGQAPFKVSADTYSREGIACMVPQNNSSFQRVVDLALIRYMQGFLRQQPRERGIFDRWFGPQGKTPLTQDVTGLFTETMQLMVDFKEEVPSKP

SEQ ID NO: 47562 - DNA, 23 bp, Artificial sequence
  primer
atgttgctcaaaagtgcttttac

SEQ ID NO: 47563 - DNA, 21 bp, Artificial sequence
  primer
ttaaaggggatcaacccgcac

SEQ ID NO: 47564 - protein, 242 aa, Artificial sequence
  consensus sequence
  Variant (2)..(5): Xaa in position 2 to 5 is any amino acid
  Variant (7)..(12): Xaa in position 7 to 12 is any amino acid
  Variant (15)..(15): Xaa in position 15 is any amino acid
  Variant (17)..(23): Xaa in position 17 to 23 is any amino acid
  Variant (24)..(25): Xaa in position 24 to 25 is any or no amino acid
  Variant (28)..(29): Xaa in position 28 to 29 is any amino acid
  Variant (31)..(42): Xaa in position 31 to 42 is any amino acid
  Variant (44)..(54): Xaa in position 44 to 54 is any amino acid
  Variant (55)..(55): Xaa in position 55 is any or no amino acid
  Variant (57)..(59): Xaa in position 57 to 59 is any amino acid
  Variant (61)..(69): Xaa in position 61 to 69 is any amino acid
  Variant (71)..(72): Xaa in position 71 to 72 is any amino acid
  Variant (74)..(81): Xaa in position 74 to 81 is any amino acid
  Variant (83)..(87): Xaa in position 83 to 87 is any amino acid
  Variant (89)..(95): Xaa in position 89 to 95 is any amino acid
  Variant (97)..(112): Xaa in position 97 to 112 is any amino acid
  Variant (113)..(114): Xaa in position 113 to 114 is any or no amino acid
  Variant (116)..(116): Xaa in position 116 is any amino acid
  Variant (118)..(125): Xaa in position 118 to 125 is any amino acid
  Variant (128)..(156): Xaa in position 128 to 156 is any amino acid
  Variant (157)..(160): Xaa in position 157 to 160 is any or no amino acid
  Variant (162)..(164): Xaa in position 162 to 164 is any amino acid
  Variant (167)..(168): Xaa in position 167 to 168 is any amino acid
  Variant (170)..(171): Xaa in position 170 to 171 is any amino acid
  Variant (174)..(195): Xaa in position 174 to 195 is any amino acid
  Variant (196)..(198): Xaa in position 196 to 198 is any or no amino acid
  Variant (200)..(215): Xaa in position 200 to 215 is any amino acid
  Variant (217)..(231): Xaa in position 217 to 231 is any amino acid
  Variant (232)..(240): Xaa in position 232 to 240 is any or no amino acid
GXXXXGXXXXXXPFXYXXXXXXXXXGYXXDXXXXXXXXXXXXLXXXXXXXXXXXXTXXXRXXXXXXXXXDXXCXXXXXXXXRXXXXXFXXXXXXXGXXXXXXXXXXXXXXXXXXLXGXXXXXXXXTTXXXXXXXXXXXXXXXXXXXXXXXXXXXXXXXXXGXXXAFXXDXXLLXXXXXXXXXXXXXXXXXXXXXXXXXEXXXXXXXXXXXXXXXXVXXXXXXXXXXXXXXXXXXXXXXXXWF

SEQ ID NO: 47565 - protein, 30 aa, Artificial sequence
  protein pattern
  Variant (2)..(11): Xaa in position 2 to 11 is any amino acid
  Variant (12)..(14): Xaa in position 12 to 14 is any or no amino acid
  Variant (16)..(16): Xaa in position 16 is any amino acid
  Variant (17)..(17): Xaa in position 17 is Ile or Leu
  Variant (18)..(18): Xaa in position 18 is any amino acid
  Variant (19)..(19): Xaa in position 19 is Ala, Gly, Ile, Leu or Val
  Variant (20)..(20): Xaa in position 20 is Ala or Gly
  Variant (21)..(24): Xaa in position 21 to 24 is any amino acid
  Variant (25)..(25): Xaa in position 25 is Ala, Asn or Ser
  Variant (26)..(26): Xaa in position 26 is any amino acid
  Variant (29)..(29): Xaa in position 29 is Ala, Gly or Ser
  Variant (30)..(30): Xaa in position 30 is Phe or Tyr
AXXXXXXXXXXXXXGXXXXXXXXXXXPFXX

SEQ ID NO: 47566 - DNA, 1056 bp, Synechocystis sp.
  CDS (1)..(1056): transl_table=11
atggggaatgaaaaagctagagtcggtatcattggcgcgtcgggctatggcggcattcagctagtacgtttattgttggaacatccccaggtggaattgacctacctagcggggcacagcagtgcaggcaagccctacagtgatctttatccccatttaacccaccgggtaaacctcaccatcgaacccattgacctagaggcgatcgccagccgttgtgatgcggtgttccttggtctgcccaatggtttagcctgtgacatggccccggcattattggccaaaggttgtaaagttttagatctgtcggcggactatcgtttccgcaatcttaacacctacacggaatggtacaaaaaggatcgtcaggaccaagccaccaataaccaagctgtttacggcctgccggaattgtaccgggatgctattagggatgcccaactaattggttgccccggctgttatcccaccgccagtttactagccctttccccgttgctgaaacagggtttcattgtgcccgaaactgccattattgacgctaagtccggtacttccgggggaggtagagaggcaaaagttaacatgctcctagcagaagcagaaggatctttgggggcctacggagtagctaaacaccgccatacccctgaaattgaacagattgccagtgatttggccggtacggagctaagggtacagttcacgcctcacttgatccccatggtgcgcggtatcctagccaccgtttatgccaccctgcgggatccgggtttggtgcgggatgatctgatcaccatttacagtgctttttaccgggcttccccctttgtgaaaattctgccccacggggtttacccccaaacgaaatgggcttgggggacgaatctttgctacattggcatcgaagtggacccccgcactgggcgggtaattgtcctttccgccattgataatctggtcaaaggccaggcagggcaggcagtgcaatgcttaaacctcatgatgggttgggaagaatccttaggcttgccccaactggctttttatccctaa

SEQ ID NO: 47567 - protein, 351 aa, Synechocystis sp.
MGNEKARVGIIGASGYGGIQLVRLLLEHPQVELTYLAGHSSAGKPYSDLYPHLTHRVNLTIEPIDLEAIASRCDAVFLGLPNGLACDMAPALLAKGCKVLDLSADYRFRNLNTYTEWYKKDRQDQATNNQAVYGLPELYRDAIRDAQLIGCPGCYPTASLLALSPLLKQGFIVPETAIIDAKSGTSGGGREAKVNMLLAEAEGSLGAYGVAKHRHTPEIEQIASDLAGTELRVQFTPHLIPMVRGILATVYATLRDPGLVRDDLITIYSAFYRASPFVKILPHGVYPQTKWAWGTNLCYIGIEVDPRTGRVIVLSAIDNLVKGQAGQAVQCLNLMMGWEESLGLPQLAFYP

SEQ ID NO: 47568 - DNA, 1542 bp, Arabidopsis thaliana
  CDS (249)..(1328)
  misc_feature (1069)..(1069): m is a or c
cttgcgttttcgtcccacaatctttgtcgtggttttctgctgtcttcttctccgtcgaacttctccgaccacttcgtatagagagagagagtgacgaagagtttacggaatcgaatccaataatgagtactgcgtcggcttttagttcaatccaaggatgctggttcaagggcgaaaggaaaattcgtgtagcggataagcgagccaagaggcttactttgggatcccatgtggcttcgccatcttcaatgagcttcagagtttcagctagtagttctgttaaacctgaaaaggatattaggattggtcttcttggtgcaagtggctacactggtgctgagatcgttaggcttcttgcaaatcatccgcatttccaggtcactttgatgactgctgatagaaaagctggccagtcaatggaaagcgttttcccacacctgagagctcaaaaactacctactttggtctcggtaaaggatgcagatttttctactgtggatgctgtattctgctgtttacctcacggaacaactcaggaaatcatcaaggaactgcctactgcattgaaaatcgttgatctttcagcggacttccggttgcgtaatattgcagaatatgaagaatggtatggtcagcctcacaaggcagtagagttacagaaagaagttgtgtatggtctaacagagatactaagggaggacataaaaaaggcacgacttgtggctaacccaggctgttacccgactacgattcaacttcctcttgttcctttactaaaggcaaatctcatcaaacatgaaaacatcattatcgatgcaaaatctggtgttagtggagcaggacgtggtgctaaggaggcaaatctttactctgagatagctgaaggcatttcttcttatggtgtcacccgtcatcgccatgttcctgaaattgaacagggattatctgatgttgcacagtcaaaagtaacagtcagttttacgccacatctcatgccaatgatccgtggaatgcaatcgactatatatgtggaaatggctcccggggttagaaccgaagatttacaccmgcaattgaagacgtcttatgaggatgaagaatttgtcaaagtgttggatgaaggagttgttcctcggacacacaacgttagaggatccaactattgtcatatgagtgtctttcctgatcgaattcctggaagagctatcataatctcagtgattgataatcttgtgaaaggagcttcgggacaagcgttgcagaatcttaacataatgttgggatatcccgaaacaacggggctcctacaccagccgcttttcccttaaaaatcccacctttaaatcgatgaccaatctgaagctgttgagacggcaatgttaagcataaagatggttggttatatgattcatatttatagacaataaagcctcttcttttaccattacaaataaatggttttgttgtttgtttattaaggttttgatgaacctttattcttgttatctctattttctgaattgcaattttcgtttgagtcgc

SEQ ID NO: 47569 - protein, 359 aa, Arabidopsis thaliana
  misc_feature (274)..(274): The Xaa at location 274 stands for Gln, or Pro.
MSFRVSASSSVKPEKDIRIGLLGASGYTGAEIVRLLANHPHFQVTLMTADRKAGQSMESVFPHLRAQKLPTLVSVKDADFSTVDAVFCCLPHGTTQEIIKELPTALKIVDLSADFRLRNIAEYEEWYGQPHKAVELQKEVVYGLTEILREDIKKARLVANPGCYPTTIQLPLVPLLKANLIKHENIIIDAKSGVSGAGRGAKEANLYSEIAEGISSYGVTRHRHVPEIEQGLSDVAQSKVTVSFTPHLMPMIRGMQSTIYVEMAPGVRTEDLHXQLKTSYEDEEFVKVLDEGVVPRTHNVRGSNYCHMSVFPDRIPGRAIIISVIDNLVKGASGQALQNLNIMLGYPETTGLLHQPLFP

SEQ ID NO: 47570 - DNA, 1507 bp, Glycine max
  CDS (107)..(1282)
agaagaatcgtggaatcttcatgcaatgcttcttcccattttcacactttgttaacacttaattttctgatcccaatctcgttaagcttcttagcaacaacacaaaatgagcgccatctctttcagttccatccattttcacacttggaaaaaccccaaggggtttggaaaggtgagaaaacaaccacatgggaagctacttgtaaagtgttccagccagagtgggaacccatcttcttcgcaaaatgcggttcgtgttggtgttgttggagctagtggctacactggttctgaggttctgcgactcttggcaaatcatccacagtttgggattgcactgatgactgcggataggaaagctgggcagccaatctcttctgtgttcccacatttgagcacttgggacttgccagatttgatttcaataaaggatgcaaacttttctgatgtggatgctgtattctgttgtttgcctcatggaactactcaggaaattattaaaggcctaccaaagcacctgaagattgttgatctttctgcagattttcgtctaaaagatctttctgagtatgaagaatggtatggtcagccgcatagagcaccagatttacagaaagaagctatatacggattgacagaggttttaagggaggaaatacagaatgctcgtctagttgctaatcctggttgttatccaacttctgttcaacttcctcttgtcccattgataaaggctagtcttattgagcttaaaaatattatcattgatgctaaatctggtgtgagtggagcaggacgcagtgccaaagaaaatttattgttcactgaagtaactgaaggtctcaattcttatggtgttacccggcatcgccatgttcctgaaattgaacagggacttgctgatgcttcaggttcaaaagtaactgttagttttacaccacacctaattccaatgagccgtggtatgcaatcaactatttatgtggaaatggctccaggagtgagaattgaggacctgtaccagcaactgaagctctcatatgaggacgaagaatttgttgttgtgttggaaaatggagccattcctcgaactcacagcgttaaagggactaattactgtttaatcaatgtttttccagaccgaattcctggaagagcaatcattatatctgttattgataatttagtgaagggagcttcaggtcaagctttacaaaaccttaatttgttaatgggatttccagaaaatttgggacttcattacctgcctctttttccttagagtagttgtcttgtccaactagagctccaaatctgaagccacagttccaccaaaatacttgatggagcagaggaaatattttcaagttatgtattttcattctctagattgtaatgtgagattcttcaagaatttagaagggaattggttatgacattggcagggatattaaagcaatttctgttttttttaaaaaaaaaaaaaaaaaaaaaaaaaaaaaaaaat

SEQ ID NO: 47571 - protein, 391 aa, Glycine max
MSAISFSSIHFHTWKNPKGFGKVRKQPHGKLLVKCSSQSGNPSSSQNAVRVGVVGASGYTGSEVLRLLANHPQFGIALMTADRKAGQPISSVFPHLSTWDLPDLISIKDANFSDVDAVFCCLPHGTTQEIIKGLPKHLKIVDLSADFRLKDLSEYEEWYGQPHRAPDLQKEAIYGLTEVLREEIQNARLVANPGCYPTSVQLPLVPLIKASLIELKNIIIDAKSGVSGAGRSAKENLLFTEVTEGLNSYGVTRHRHVPEIEQGLADASGSKVTVSFTPHLIPMSRGMQSTIYVEMAPGVRIEDLYQQLKLSYEDEEFVVVLENGAIPRTHSVKGTNYCLINVFPDRIPGRAIIISVIDNLVKGASGQALQNLNLLMGFPENLGLHYLPLFP

SEQ ID NO: 47572 - DNA, 1711 bp, Triticum aestivum
  CDS (102)..(1349)
ctgtaactcccgctttcagctcactccgatcaatctcgatttgccagccctccgcgacgccggcaggtcgctgttgagcctgactactccccgtagcggacatgggatcgacggcgctcggtggtgcggctccggcgcgcgccggattggcccccaagagtggagtccttggatctactttcaagccatgtggtggtttcaagctcaaaacaactactaaggttggacgctcttcagtttgtgtgagggtatccattgcttcttcaccacaaaaacagtactctcctaagacatcagcagttaaatcaggggaggaagtgcgcattgcggtgctaggagccagcggttataccggggctgagattgttcggcttctagcaaaccaccctcagttccgtatcacagtgatgaccgcagacagaaaagctggtgaacagtttggatctgtatttcctcacttgataacacaagacctgccaaatttagttgcgattaaagatgcagatttttcagatgttgatgctgttttttgttgcttgccacatggaacaacacaggaaattattaaaggcttaccccaacaactgaagattgttgatctctctgcggatttccgattgcgtaacatcaatgagtatgctgagtggtatggccatgctcatagggcaccagaacttcaggaagaggctgtttatggtttgacggaggttcttcgagatgaaataagaaatgcacggcttgttgccaacccgggatgttatcccacgtctattcagctccctcttgttcctctaataaaggcaaaactgatcaagctgagcaatataataattgatgcaaaatctggggttaccggggcaggacgtggagctaaggaagcaaatctgtacaccgagatagctgaaggcattcatgcttatggaataaaaggccaccgtcatgttcctgaggttgaacaaggattgtcagaggctgctgaatccaaagttactatcagcttcactccaaatcttatctgcatgaaacgtgggatgcaatctactatgtttgttgaaatggcacctggagtgactgtcagtgatttgtatcagcatctcaagtctacttatgagggtgaagaatttgtcaagctgttaaatggcagcaatgttcctcacacacgccatgttgttggatcaaattactgcttcatgaatgtcttcgaggacagaattcctggaagggcaatcatcatctctgtcatagacaatcttgtaaagggagcatctggccaggccgtgcagaacctcaatctgatgatgggactgcctgagaacatggggctgcaatatcagcccctatttccttgatatgttgtgcctttgttgtgctctttctcgatgatgctttggagttaagcacccatctctgttttccgttgagaagcaaagagctgaatgtcggagtgtaaccaaactcgctcaacagcaaaacttggtttgtgctggtgtagtatttagagaggagcaacaattagcagttgaataagagtatgaactgagtggcttggtgtaatgaaagtccaaaggctattatatcctacagtggattgttgtcatgagatcaataaagcagtgtaaaacccgattcagagacatcaaccattgctgtcagcattggataatagttagaagtgtgttacttttaaatattaaaggataaattagttttc

SEQ ID NO: 47573 - protein, 415 aa, Triticum aestivum
MGSTALGGAAPARAGLAPKSGVLGSTFKPCGGFKLKTTTKVGRSSVCVRVSIASSPQKQYSPKTSAVKSGEEVRIAVLGASGYTGAEIVRLLANHPQFRITVMTADRKAGEQFGSVFPHLITQDLPNLVAIKDADFSDVDAVFCCLPHGTTQEIIKGLPQQLKIVDLSADFRLRNINEYAEWYGHAHRAPELQEEAVYGLTEVLRDEIRNARLVANPGCYPTSIQLPLVPLIKAKLIKLSNIIIDAKSGVTGAGRGAKEANLYTEIAEGIHAYGIKGHRHVPEVEQGLSEAAESKVTISFTPNLICMKRGMQSTMFVEMAPGVTVSDLYQHLKSTYEGEEFVKLLNGSNVPHTRHVVGSNYCFMNVFEDRIPGRAIIISVIDNLVKGASGQAVQNLNLMMGLPENMGLQYQPLFP

SEQ ID NO: 47574 - DNA, 1776 bp, Zea mays subsp. mays
  CDS (216)..(1466)
aaagaaaaacggtccaccacaccttgtatgtgccctccggcgggcgggtcagagctcgcaactcgcaccagcacagcagcaccggcagcaccaccaaccccagggcagccgcgccgccagccacgacaagcttagcagcccctcgcactcgctagggtatttattggtacaatcgggtgatctgcgtgccgcatcgcgccgggacacgggagacaatggcgttcacgacgctcggcggctgtggggcgcaggcttcagtgcggttggctccccagaatggaatccttggatctaattcgaagccattcgcgggcatcatactcaagaaacctcagcaggttggatccctgcccctccgtgcaaggggatccattttttcttcaccacgcaggcttttctcccctaaggcagcagcccctaaatcaggggattccatacgcattgcagtgctaggggccagcggttatactggagctgagattgttcggattctagcgaaccaccctcagtttcatataaaagtgatgactgcagatagaaaagctggcgagcaatttggatcagtatttcctcacttgataacacaggacctgccgagactggtcgcaataaaagacgctgacttttcagatgttgatgctgttttttgctgcttgccacatggtacaacccaggaaattatcaaaagcttaccccgacacttaaagattgttgatctctcagcggacttccgactacgcgacattaatgagtatgctgagtggtatggacattcccacagggcaccggaacttcagggggaagctgtgtatggtttgaccgaacttaaacgagatgacataagaaatgcacgcctggtagcaaatccagggtgttatcccacatctattcaacttccgctcgttcctttggtaaaggcaaaactgatcaagctaaccaacattattattgatgcaaaatctggagtcagtggtgcaggacgtggggctaaggaagcaaatctttacactgaaatcgctgagggtatccatgcttatgggataacaagccatcggcatgtgcctgagattgagcaaggacttacagatgctgctgaatcaaaagttactatcagctttactccacatttgatgtgtatgaaacgtgggatgcaatctactgtgtatgttgaattggcatctggagtgactcccagggatttgtatgaacacctaaagtctacttacgagaatgaagaatttgtcaagctgttacatggtagcaatgttccttgcacaagccatgttgtgggatcaaattactgcttcatgaatgtctatgaggatagaatacctggaagggccatcatcatctctgtcatagataatcttgtgaagggagcatctggtcaggctttgcaaaatcttaatctgatgatgggactgcctgagaatatggggctgcaataccagcccctgttcccttgatcttttgtgtcattatctattattacattatttaggagtccagaaaccaaattatcattactgtcaagaggtggcaaggagcctgacatcagaattcagtcaagtcgaagttagacagttagtgtagcttggtctgtgttgttttagctttattaaaccattaagagaataatgatgatggcaatttagcagtacaatggtagtattatgtgggcagcttggttccaataaaatcataagcctatacacatcttgtgcccgcaatgttgtttgctattttgatcacgaaatcaatattgagcttgaatcc

SEQ ID NO: 47575 - protein, 416 aa, Zea mays subsp. mays
MAFTTLGGCGAQASVRLAPQNGILGSNSKPFAGIILKKPQQVGSLPLRARGSIFSSPRRLFSPKAAAPKSGDSIRIAVLGASGYTGAEIVRILANHPQFHIKVMTADRKAGEQFGSVFPHLITQDLPRLVAIKDADFSDVDAVFCCLPHGTTQEIIKSLPRHLKIVDLSADFRLRDINEYAEWYGHSHRAPELQGEAVYGLTELKRDDIRNARLVANPGCYPTSIQLPLVPLVKAKLIKLTNIIIDAKSGVSGAGRGAKEANLYTEIAEGIHAYGITSHRHVPEIEQGLTDAAESKVTISFTPHLMCMKRGMQSTVYVELASGVTPRDLYEHLKSTYENEEFVKLLHGSNVPCTSHVVGSNYCFMNVYEDRIPGRAIIISVIDNLVKGASGQALQNLNLMMGLPENMGLQYQPLFP

SEQ ID NO: 47576 - DNA, 1041 bp, Vibrio cholerae O1 biovar eltor str. N16961
  CDS (1)..(1041): transl_table=11
ttgttcgctctctttcaccacttaatacggatgtttttgatgttaaaaaccaccatcatcggcgcaagcggttacaccggagcagaactggctcttatggtgcacaaacacccacaactcacgctatcaggtttatacgtttccgccaacagtgtggatgcgggcaaatcgctggcgcagttgcatggtcgagtggcagggctgattgatatgccagtgcaagccttgactgatgtggatactgttgcggccgagtgtgatgtggtctttctggccaccgcgcatgaagtgagtcatgacctcgcgccgcaatttctcgctcaaggttgtcaggtctttgatctgtctggtgcatttcgggtgcagagcgaagcgttttatccaaccttttatggctttgcgcatcagcattctgaatggttggaaaaagcggtgtatggcctggctgagtggaatgcggaagcaatcaaaaccagccctatgattgctgttgcgggttgctacccaacggcatcgcaactggcgattaagcctctgttggtggatgggttaatcgacactacccaatggccagtgattaacgcggtgagtggtgtctctggtgcggggcgtaaagccaccatgaccaacagcttctgtgaagtgagcttgcagccctacggtgtgtttaaccaccgtcatcaaccagaaattgcgactcatctaggctgtgaggtgatcttcaccccgcatcttggcaactttaagcgcgggattctggccaccatcacaatgaaattagcggatggtgtcaccgagcagcaagtcgcagaagcttttagcaaggcgtatcaagataagccattggtgcgtttcagcaatggtttaccacggattcaagatgtcgagtttaccccattttgtgacctcggctggaaggtacaaggacgtcacatcatagtggtgtctgctatcgacaatttattgaaaggcgcatcgagtcaagcgatgcagtgtttaaatattcactacggtttcgatgaattaaccgcgttggtgtaa

SEQ ID NO: 47577 - protein, 346 aa, Vibrio cholerae O1 biovar eltor str. N16961
MFALFHHLIRMFLMLKTTIIGASGYTGAELALMVHKHPQLTLSGLYVSANSVDAGKSLAQLHGRVAGLIDMPVQALTDVDTVAAECDVVFLATAHEVSHDLAPQFLAQGCQVFDLSGAFRVQSEAFYPTFYGFAHQHSEWLEKAVYGLAEWNAEAIKTSPMIAVAGCYPTASQLAIKPLLVDGLIDTTQWPVINAVSGVSGAGRKATMTNSFCEVSLQPYGVFNHRHQPEIATHLGCEVIFTPHLGNFKRGILATITMKLADGVTEQQVAEAFSKAYQDKPLVRFSNGLPRIQDVEFTPFCDLGWKVQGRHIIVVSAIDNLLKGASSQAMQCLNIHYGFDELTALV

SEQ ID NO: 47578 - DNA, 1128 bp, Methanocaldococcus jannaschii DSM 2661
  CDS (1)..(1128): transl_table=11
ttgagaattataattaagttaagtctggaaatattattaatattaattaggatatttattcccaaagaaaatcctaataataaaaagaaaattggtgaaaggatgaaagaagttgctataattggggctactggctatactggggcagagttattgagattattagcaaatcatgaaaaagttaatgtaacatatataacctcaagaaaagaagctggaaagcatgtttttaaagttcatcctcatttaaaaggtattgaaaagtataaaaacctatgttttactggagatattgataaggttgatgcttatttggtatttactgcaactccacacggagcttcaatggatatagttccagattttattgagagagggatgaaagttattgacttaagtggagattatagatttgaggatttaagcttgtatgaaaaatactataagataaaacataaaggattacctgatgtaaaaattgcttatggattgccagaattacatagagaggaaataaaagaagctcaacttgtagcaaatcctggatgtttcccaactggagctattttggcagtagctccattagttaaagagaatattatagaggaaaggattatatttgattcaaaaacgggagttagtggagctggaataaagccaacggaaacaacccacttcccaaatgtaaatgaaaatataaacccatacaaaataacaacccacagacacactccagagattgagaaggagttaaaaaagcttggaaaggctaaggtttcattcactcctcacttagctccaataacaagaggaattttaacaactgcacacacattcttagctaaagatgttgatagagaggagataattaagatttatgaaaaattctatgggagtgaggtttttgttaggatattttcagaagagattccaaaattaacatgggttagaggaacaaacttctgtgatatcggaggatttgagattgatgagcatggtagattggtagttatctcagcaatagataatttagttaaaggagcgagtgggcaagcaatacaaaacatgaatataatgtttggatttgatgaaaaagaggggttatttgatgtagggttaaatccataa

SEQ ID NO: 47579 - protein, 375 aa, Methanocaldococcus jannaschii DSM 2661
MRIIIKLSLEILLILIRIFIPKENPNNKKKIGERMKEVAIIGATGYTGAELLRLLANHEKVNVTYITSRKEAGKHVFKVHPHLKGIEKYKNLCFTGDIDKVDAYLVFTATPHGASMDIVPDFIERGMKVIDLSGDYRFEDLSLYEKYYKIKHKGLPDVKIAYGLPELHREEIKEAQLVANPGCFPTGAILAVAPLVKENIIEERIIFDSKTGVSGAGIKPTETTHFPNVNENINPYKITTHRHTPEIEKELKKLGKAKVSFTPHLAPITRGILTTAHTFLAKDVDREEIIKIYEKFYGSEVFVRIFSEEIPKLTWVRGTNFCDIGGFEIDEHGRLVVISAIDNLVKGASGQAIQNMNIMFGFDEKEGLFDVGLNP

SEQ ID NO: 47580 - DNA, 1149 bp, Methanothermobacter thermautotrophicus str. Delta H
  CDS (1)..(1149): transl_table=11
gtgggaggcgtaccgccgtcacaggtgattagaggtggccgccagcacggattatcatatcagttaaggcatctaaaccataacaccttattaaatcagttcaccaaagtaattatcacagtcaagtcaattaaggtgatcaagatgataagtgtgggtattatcggagccagtggatacactggaggtgaactgctgcgactcctcgagaaccacagggaggtggaggtggtctcagccacatcgaggcagtacagtggtgttcccgtgtcgagggtgcatccacacctccaggacactgacctgaagtttgaagacgtcggtgccggtgaaatagacgcggaccttgtcttcacagccaccccccacggggcctcaatgaagatcgtcccccagcttatagagaggggtataagggtggtggacctcagcggtgactaccgctttgatgacactgaaacctatgaggaatggtatggaatcaaacacgaaagccccctcgaagcggtttatggtcttcctgagatacacagggaggaaatagcctccgcagatcttgtggcaaatcctggctgtttcccgacgggtgcaatacttgcatgtctccccctggtatatgagaagattgcagatacattcataatcgattcgaagacaggggtgagtggtgcgggtgttaagccaacagccctgacccattaccctcactgcagtgataatgtaattccctacaatgtaacaggccacaggcatacaccggagataaggcaggaactctcaaggctgaatcctgtgaggctcagcttcacaccacacctcgtcccggtgacaaggggcatccttacaacagcccacaccttcctccttgaggacctggagcagggcgaaatcgcagacatattcatgggattctatgatggagaaccctttgtaagggttgttgagggtatccctgggctcagtgcagtcaggggctccaacttctgccagatcggatgctttgaggttgatgataatcagagggctgttatagtatcagccatagacaaccttgtgaagggcgcatccggtcaggccatccagaacatgaacataatgttcgggttcagggaggtcgagggtcttgatttccccgggatgtacccatag

SEQ ID NO: 47581 - protein, 382 aa, Methanothermobacter thermautotrophicus str. Delta H
MGGVPPSQVIRGGRQHGLSYQLRHLNHNTLLNQFTKVIITVKSIKVIKMISVGIIGASGYTGGELLRLLENHREVEVVSATSRQYSGVPVSRVHPHLQDTDLKFEDVGAGEIDADLVFTATPHGASMKIVPQLIERGIRVVDLSGDYRFDDTETYEEWYGIKHESPLEAVYGLPEIHREEIASADLVANPGCFPTGAILACLPLVYEKIADTFIIDSKTGVSGAGVKPTALTHYPHCSDNVIPYNVTGHRHTPEIRQELSRLNPVRLSFTPHLVPVTRGILTTAHTFLLEDLEQGEIADIFMGFYDGEPFVRVVEGIPGLSAVRGSNFCQIGCFEVDDNQRAVIVSAIDNLVKGASGQAIQNMNIMFGFREVEGLDFPGMYP

SEQ ID NO: 47582 - DNA, 1251 bp, Deinococcus radiodurans R1
  CDS (1)..(1251): transl_table=11
gtgcacctgagaaatgccgccgaccaagcgccatcactgccatttgcccagtgccaacgtcaactccccttgcccctctggggtaaggggctgggggatggggcaaaaagctcaagcctgggcttcaatgccatacacagctcccgcccacgctccctagacccacccccccaccaacccccgccacccactacactcctccccatgagcaccgagaaaaagaccgtcgccatcgtgggcggcagcggctacgcgggcggcgaattcctgcgcctcgccctgggccacccccacctcgaagtgacgcaggtgaccagcgaacgcagcgccaaactccccgtgagcatggtgcaccccaacctgcgtggggcgaccaacctcaagttccgcaaggccgccgaactcgaagaggccgacatcatcgtgctggcgctgccgcacaactcggcggcgaagcggattaccgaattcgaggcgaaggggaaggtcatcgtggacctctccgccgactttcgcctgaaagatcccgaggtctacgagcgcttctacggcgagccgcacccagcccccgagcagctcgggcagtgggtctacggcaaccccgaacttcaccgcgaggacctgcggggtgccacccgcatcgcctgcgcgggctgctttgccacgtcggtgattctggcgctctacccgctgctgaggctcggagcgctcgcccccaaggacatcatcgccaccgggctggtcggctcaagcgcggcgggcgcgagtgcctccgaatcgtcgcaccaccccgagcgggcgggcagcttacgcgtctacaagcccgtcggccaccgccacaccgccgaggcgcagcaggagcttcccggcaagtttccgctgcacctcaccgccatttccaccccccgcgtgcgcggcatcctgaccaccattcaggcgtgggtgcccgacggctggtccgacaaggacgtgtggagcgcctaccgcgaggtctacggccaggagccgtttatccgcatcgtcaaggtcgccaagggcattcaccgttaccccgaccccatgctgctcgacggcaccaacttctgcgacatcggcttcgagatggacgtggacaccgggcgcgtggtgctgatgtcggccatcgacaacctcgtcaagggcacggcggggcacgccattcagtcgctcaatgtcgcgcagggctgggacgaacgcgccgggctgggcttcctggggctgcacccgacctga

SEQ ID NO: 47583 - protein, 416 aa, Deinococcus radiodurans R1
MHLRNAADQAPSLPFAQCQRQLPLPLWGKGLGDGAKSSSLGFNAIHSSRPRSLDPPPHQPPPPTTLLPMSTEKKTVAIVGGSGYAGGEFLRLALGHPHLEVTQVTSERSAKLPVSMVHPNLRGATNLKFRKAAELEEADIIVLALPHNSAAKRITEFEAKGKVIVDLSADFRLKDPEVYERFYGEPHPAPEQLGQWVYGNPELHREDLRGATRIACAGCFATSVILALYPLLRLGALAPKDIIATGLVGSSAAGASASESSHHPERAGSLRVYKPVGHRHTAEAQQELPGKFPLHLTAISTPRVRGILTTIQAWVPDGWSDKDVWSAYREVYGQEPFIRIVKVAKGIHRYPDPMLLDGTNFCDIGFEMDVDTGRVVLMSAIDNLVKGTAGHAIQSLNVAQGWDERAGLGFLGLHPT

SEQ ID NO: 47584 - DNA, 954 bp, Agrobacterium tumefaciens str. C58
  CDS (1)..(954): transl_table=11
ttgaaaaggcaggacaaggacatgacagcgaagatcttcatcgatggcgaacacggcaccacgggtctgcagatccgcacgcgccttgccggtcgccgcgatatcgagctgctgtccattccagagaccgagcgccgcaacgcggcgatgcgcgaggatttgctcaacaacgccgacatttcgatcctctgcctgccggatgatgcctcgaaggaggctgtctccatggtggccggcaacaataatgtccgcattatcgacacctccaccgcctatcgcgtccatcaggactgggcttacggttttgccgaaatggaccgggaccagggcgagaaggttcgctcggcccgtttcgtcgccaatcccggctgctacccgaccggcgcaatcggcctcatccgtccgctgcgcgctagcggcatcctgcccgacggttatccggtcagtgtcaatgcggtctccggttacaccggcggtggcaagcagatgatcgcgcagatggaggaccaaagccgcgacgatgcgatcagcgccaataatttcctgtatggcctgacgctgaagcacaagcacgtgccggaaatgaccattcacggtcagctcgaccgcgcaccgctgtttgcgccctccgtcgggcgtttcccgcagggcatgatcgtgcaggttccgctgtttgcagcggaccttgcggaaggcaccacgatcgaaaccatccatgcggcgctgaccgcccattatgcgggccaggacatcgtcagcgtcgtgccgcttgccgaaagcaaggggatttcccgcatcgacgctgaggagctggcgggcaaggacacgatgaagctcttcgttttcggtacgccgggcggtgagcatatcaatctcgtggcgctgctcgacaatctcggcaagggtgcctccggcgctgcggtacagaacatggagttgatgctctcggcatga

SEQ ID NO: 47585 - protein, 317 aa, Agrobacterium tumefaciens str. C58
MKRQDKDMTAKIFIDGEHGTTGLQIRTRLAGRRDIELLSIPETERRNAAMREDLLNNADISILCLPDDASKEAVSMVAGNNNVRIIDTSTAYRVHQDWAYGFAEMDRDQGEKVRSARFVANPGCYPTGAIGLIRPLRASGILPDGYPVSVNAVSGYTGGGKQMIAQMEDQSRDDAISANNFLYGLTLKHKHVPEMTIHGQLDRAPLFAPSVGRFPQGMIVQVPLFAADLAEGTTIETIHAALTAHYAGQDIVSVVPLAESKGISRIDAEELAGKDTMKLFVFGTPGGEHINLVALLDNLGKGASGAAVQNMELMLSA

SEQ ID NO: 47586 - DNA, 1092 bp, Sulfolobus tokodaii str. 7
  CDS (1)..(1092): transl_table=11
atgcttaaattacttataatcctattgctttatggtcaaaagatgataagagttgctgtaataggaggttcaggttatactggtggagaattgctaagaattctggcagttcaccccaaaatagaagtaacgtatgtaacatctagagaatatgccggtaaacccataacattagtacatccaaatttaagaggattttataatatgaatttttcacagttttcatttgataaactaggagataaagcggatgctgtatttctagggttaccgcataaagtttcattagaatatgtaccaaagattctagaaatgggaattcaagtaattgatttaagtgcagattttaggttaaaagatcctactctatataaaatatggtatggttatgagcatccatacccagatttactgaaaaaagctgtgtatggcttaccagaacttcactatgaagaacttaaaaatgcaaaacttatcgcttctccaggctgtaatgctactgcaactatattagctggtgctcctttagttgcatcaagtctattagagacttacaaattaatcagcgatgtaaaagttggaagtagtgaaggaggtgcgaaacctcatgaaggtagccatcatccagaaagacaaaatgcaataagaccttatgaggccgatgggcatagacacgcagctgaagctgagcaagaacttagtttaatagcaaaaagggatgtaaaagtaagtttggttcctcacgccgttagtagtgtgagaggtgctttggcttcagttcatggttggctaagtagtgatataagcgaaatggatatgtggaagaaatccatagaattctataaaggaagaaaattcatacgtataataaggagtaatattcatccttatccagacccaaaatttgttataggtagtaattttgcagatataggttttgcaatagaaaaaagaatgcaaagaataacaatgttttctgcaatagataacttgatgaaaggtgctgctggtcaagcagtacaagcttttaacatatcaagaggttttgaagaagatgagggtttaagaatacctcctctgaggcctgcttaa

SEQ ID NO: 47587 - protein, 363 aa, Sulfolobus tokodaii str. 7
MLKLLIILLLYGQKMIRVAVIGGSGYTGGELLRILAVHPKIEVTYVTSREYAGKPITLVHPNLRGFYNMNFSQFSFDKLGDKADAVFLGLPHKVSLEYVPKILEMGIQVIDLSADFRLKDPTLYKIWYGYEHPYPDLLKKAVYGLPELHYEELKNAKLIASPGCNATATILAGAPLVASSLLETYKLISDVKVGSSEGGAKPHEGSHHPERQNAIRPYEADGHRHAAEAEQELSLIAKRDVKVSLVPHAVSSVRGALASVHGWLSSDISEMDMWKKSIEFYKGRKFIRIIRSNIHPYPDPKFVIGSNFADIGFAIEKRMQRITMFSAIDNLMKGAAGQAVQAFNISRGFEEDEGLRIPPLRPA

SEQ ID NO: 47588 - DNA, 999 bp, Sinorhizobium meliloti 1021
  CDS (1)..(999): transl_table=11
ttgattcaattctatgccagactgattccggaaacgccgctaacggactgcaggagcagggaaatcatgaaaccgaagatctttatcgatggcgaacacggcacgacgggcctgcagatccgtgtgcgcatggccgggcgtacggatctcgaactcctgtccattccggaagcggagcgacgcaatgcggcgatgcgtgaggatctactgaacagcgccgatatcgccatcctctgcctgccggacgacgcctcgcgggaggccgtagccatggttgccggaaacaatcgcgtgcgcatcatcgacacttcgaccgcgcatcgcgtcgctcccgactgggcctatggctttgccgagatggacaaggcgcagccccagcggatccgcgacgcgcgccatgtcgccaatcccggctgctacccgaccggagcgatcgccctgatccgccctctgcgccaggctggtatcctgccggacggctatcccgtcaccgtcaatgcggtttcgggctataccggcggcggcaaacagatgatcgcgcagatggaggacgatcagaatccggaccacatcggcgcgccgcatttcctttatgggcttaccctgaagcacaagcacgtgccggaaatgaagatgcacgggctcctcgagcgcgcaccggtcttcagcccttccgtcggcaagttcgcgcaggggatgatcgtgcaggtgccactctatctcgaggacctggctgccggtgcaacgctcgaaacgatccatcgtgccctcgtcgaccattatgcgggacagtcgattgtcgaagtcgtgccgcttgacgagagcgccaagctcgcccggatcgatgcgacggagctcgccggcagcgacgccatgaagcttttcgtcttcggcaccaagggcggagcgcatgtcaatctggtcgcgctgctcgacaatctcggcaagggcgcctcgggcgccgccgtccagaacatggacctgatgctgtccgcctga

SEQ ID NO: 47589 - protein, 332 aa, Sinorhizobium meliloti 1021
MIQFYARLIPETPLTDCRSREIMKPKIFIDGEHGTTGLQIRVRMAGRTDLELLSIPEAERRNAAMREDLLNSADIAILCLPDDASREAVAMVAGNNRVRIIDTSTAHRVAPDWAYGFAEMDKAQPQRIRDARHVANPGCYPTGAIALIRPLRQAGILPDGYPVTVNAVSGYTGGGKQMIAQMEDDQNPDHIGAPHFLYGLTLKHKHVPEMKMHGLLERAPVFSPSVGKFAQGMIVQVPLYLEDLAAGATLETIHRALVDHYAGQSIVEVVPLDESAKLARIDATELAGSDAMKLFVFGTKGGAHVNLVALLDNLGKGASGAAVQNMDLMLSA

SEQ ID NO: 47590 - DNA, 1041 bp, Bacillus subtilis subsp. subtilis str. 168
  CDS (1)..(1041): transl_table=11
ttgaaaataggaattgtaggtgctacaggatatggaggcaccgaacttgtcaggattctttcgcatcatcctcatgcagaggaatgcatactttattcatccagcggagaagggaatgtctatagcgagggttatcctcatcttaccggcttagcggatcagcagctgaagccgattgatatgaatacgatcaaacacgaaatagatatcatgtttctcgctgcgccgcccggagtatcaagtgaattgactccaaagctggcagacgcgggaattacggttattgatctgtcaggtgatctgaggataaaagaaccggctgaatatgaaaaatggtataaacggacagcggcaccgaaggcggtgattcaagaggcggtatacggtctggcagaactgaatcaactgcaaattcaacaggcgaaactcattgccaatccaggctgttttccaacagctgttttgcttggcctcgcgccattggctcaaaagaaactgctcgatgaatctttcgttatcgttgacgcgaagaccggtgtttccggagcgggaagaaaagcatccatgggaactcatttttctgagctgaacgacaattttaaaatttataaagtcaatgaacatcagcacacgccggaaattgagcaggcgctgaatgaatggcagccaggtctcgggcccattacattttcggctcacttggttccgatgacaaggggcatcatggcgacgatgtataccagattaacctgtgacctaaccgcagatgacctgcatgatttatattcggaattttaccaagattcatattttgtgagagtgaggccaaaaggtcagtacccgcaaacgaaagaagtgtacggcagcaatttctgtgatatcgccgtgaccctcgatgagagaacgaacagagtcacgatcgtctcggtaatcgataatttaatgaagggtgccgccggtcaggcagtgcaaaactttaatttgatgaatggctggaatgaagaaactggactcaccatcatcacgccaatttatccatag

SEQ ID NO: 47591 - protein, 346 aa, Bacillus subtilis subsp. subtilis str. 168
MKIGIVGATGYGGTELVRILSHHPHAEECILYSSSGEGNVYSEGYPHLTGLADQQLKPIDMNTIKHEIDIMFLAAPPGVSSELTPKLADAGITVIDLSGDLRIKEPAEYEKWYKRTAAPKAVIQEAVYGLAELNQLQIQQAKLIANPGCFPTAVLLGLAPLAQKKLLDESFVIVDAKTGVSGAGRKASMGTHFSELNDNFKIYKVNEHQHTPEIEQALNEWQPGLGPITFSAHLVPMTRGIMATMYTRLTCDLTADDLHDLYSEFYQDSYFVRVRPKGQYPQTKEVYGSNFCDIAVTLDERTNRVTIVSVIDNLMKGAAGQAVQNFNLMNGWNEETGLTIITPIYP

SEQ ID NO: 47592 - DNA, 1080 bp, Arabidopsis thaliana
  CDS (1)..(1080)
atgagcttcagagtttcagctagtagttctgttaaacctgaaaaggatattaggattggtcttcttggtgcaagtggctacactggtgctgagatcgttaggcttcttgcaaatcatccgcatttccaggtcactttgatgactgctgatagaaaagctggccagtcaatggaaagcgttttcccacacctgagagctcaaaaactacctactttggtctcggtaaaggatgcagatttttctactgtggatgctgtattctgctgtttacctcacggaacaactcaggaaatcatcaaggaactgcctactgcattgaaaatcgttgatctttcagcggacttccggttgcgtaatattgcagaatatgaagaatggtatggtcagcctcacaaggcagtagagttacagaaagaagttgtgtatggtctaacagagatactaagggaggacataaaaaaggcacgacttgtggctaacccaggctgttacccgactacgattcaacttcctcttgttcctttactaaaggcaaatctcatcaaacatgaaaacatcattatcgatgcaaaatctggtgttagtggagcaggacgtggtgctaaggaggcaaatctttactctgagatagctgaaggcatttcttcttatggtgtcacccgtcatcgccatgttcctgaaattgaacagggattatctgatgttgcacagtcaaaagtaacagtcagttttacgccacatctcatgccaatgatccgtggaatgcaatcgactatatatgtggaaatggctcccggggttagaaccgaagatttacaccagcaattgaagacgtcttatgaggatgaagaatttgtcaaagtgttggatgaaggagttgttcctcggacacacaacgttagaggatccaactattgtcatatgagtgtctttcctgatcgaattcctggaagagctatcataatctcagtgattgataatcttgtgaaaggagcttcgggacaagcgttgcagaatcttaacataatgttgggatatcccgaaacaacggggctcctacaccagccgcttttcccttaa

SEQ ID NO: 47593 - protein, 359 aa, Arabidopsis thaliana
MSFRVSASSSVKPEKDIRIGLLGASGYTGAEIVRLLANHPHFQVTLMTADRKAGQSMESVFPHLRAQKLPTLVSVKDADFSTVDAVFCCLPHGTTQEIIKELPTALKIVDLSADFRLRNIAEYEEWYGQPHKAVELQKEVVYGLTEILREDIKKARLVANPGCYPTTIQLPLVPLLKANLIKHENIIIDAKSGVSGAGRGAKEANLYSEIAEGISSYGVTRHRHVPEIEQGLSDVAQSKVTVSFTPHLMPMIRGMQSTIYVEMAPGVRTEDLHQQLKTSYEDEEFVKVLDEGVVPRTHNVRGSNYCHMSVFPDRIPGRAIIISVIDNLVKGASGQALQNLNIMLGYPETTGLLHQPLFP

SEQ ID NO: 47594 - DNA, 1074 bp, Corynebacterium glutamicum ATCC 13032
  CDS (1)..(1074): transl_table=11
atgatcatgcataacgtgtatggtgtaactatgacaatcaaggttgcaatcgcaggagccagtggatatgccggcggagaaatccttcgtctccttttaggccatccagcttatgcatctggtgaactagaaatcggagcactcaccgcggcatcaaccgcaggcagcacgctcggtgaattgatgccacacattccgcagttggcggatcgtgttattcaagacaccacagctgaaactctagccggtcatgatgtcgtatttctaggacttccacacggattctctgcagaaattgcacttcagctcggaccagatgtcacagtgattgactgtgcagctgactttcgtctgcaaaatgctgcagattgggagaagttctacggctcagagcaccagggaacatggccttatggcattccagaaatgccaggacaccgcgaggctcttcgtggtgctaagcgtgtagcagtgccaggatgtttcccaaccggtgcaaccttggctcttcttcctgcggttcaagcgggacttatcgagccagatgtttccgtagtgtccatcaccggcgtatcaggtgcaggtaagaaagcatctgttgcactacttggctcggaaaccatgggttcactcaaggcgtacaacacctccggaaagcaccgccacaccccggaaattgcccagaacctcggcgaagtcagcgacaagccagtcaaggtgagcttcaccccagtgcttgcaccgttacctcgcggaattctcaccactgcaaccgcacctttgaaagaaggcgttaccgcagaacaggctcgcgcagtatatgaagagttctatgcacaggaaaccttcgtgcatgttcttccagaaggtgcacagccacaaacccaagcagttcttggctccaacatgtgccacgtgcaggtagaaattgatgaggaagcaggcaaagtccttgttacctccgcaatcgataacctcaccaagggaactgccggcgccgctgttcagtgcatgaacttaagcgttggttttgatgaggcagcaggcctgccacaggtcggcgtcgcaccttaa

SEQ ID NO: 47595 - protein, 357 aa, Corynebacterium glutamicum ATCC 13032
MIMHNVYGVTMTIKVAIAGASGYAGGEILRLLLGHPAYASGELEIGALTAASTAGSTLGELMPHIPQLADRVIQDTTAETLAGHDVVFLGLPHGFSAEIALQLGPDVTVIDCAADFRLQNAADWEKFYGSEHQGTWPYGIPEMPGHREALRGAKRVAVPGCFPTGATLALLPAVQAGLIEPDVSVVSITGVSGAGKKASVALLGSETMGSLKAYNTSGKHRHTPEIAQNLGEVSDKPVKVSFTPVLAPLPRGILTTATAPLKEGVTAEQARAVYEEFYAQETFVHVLPEGAQPQTQAVLGSNMCHVQVEIDEEAGKVLVTSAIDNLTKGTAGAAVQCMNLSVGFDEAAGLPQVGVAP

SEQ ID NO: 47596 - DNA, 1065 bp, Methanopyrus kandleri AV19
  CDS (1)..(1065): transl_table=11
ttggcgaaggttcgggtcggagtcctgggcgccacgggtatcgtaggtcagcggttcatcagcctgctggccgaccatccgtggttcgagctcgaggccgtgacggcgtcgccgcgctctgccgggaagacctacgccgaggccgctaagtggtacctcgaggagccgatgccggaggacgtggcggagcttaccgttctggagaccgacccgaaggaggtggagcgcgaggcggacgtggacctggtgttctccgcgctaccgtcggacgtggcgcgcgacgtcgagccggcgttcgcggaggctggcttcgccgtcgccagtaacgccagcgcgtaccgcatggaggaggacgtccccctggtggtgcccgaggtcaacccggaccatctgggactgatcgacgtgcagcgggacgagcgggactgggacggtttcatcgtgactaatcccaactgctcgacgatccagatggtcctgaccctcaagccgctgatggacgagtacgggatcgagagcgtagtagtctcaacgatgcaggcggtctccggcgccggttacgcgggcgtaccctcgatggctatcatcgacaacgtgattccctacatcgagggcgaggaggagaagatggagaccgagaccctgaagatcctgggcgagctggacggcgaccgtgtcgagttcgcggacgtcaaggtctctgcatcgtgtcaccgagtgcccgtgctggacggtcacaccgaggcgatcttcgtggcgaccgagaaggaggctgacccggaggaggcggcggaggttctggccgggttccggggagtcccgcaggagaagggtctaccgagtgcaccggagcgtcccgtcgtggtcagggaggaagaggacagaccgcagccgaggttcgaccgcgacgtcgacggcggcatggccgtggtcgtcggcaggatccgtaaggacccggtgttcggcggtctgaagtacgtgtgcgtcggtcacaacgcggtgaggggtgctgcgggcgcttccgtgctgaacgccgagctcctcgttgaggaaggctacctgtaa

SEQ ID NO: 47597 - protein, 354 aa, Methanopyrus kandleri AV19
MAKVRVGVLGATGIVGQRFISLLADHPWFELEAVTASPRSAGKTYAEAAKWYLEEPMPEDVAELTVLETDPKEVEREADVDLVFSALPSDVARDVEPAFAEAGFAVASNASAYRMEEDVPLVVPEVNPDHLGLIDVQRDERDWDGFIVTNPNCSTIQMVLTLKPLMDEYGIESVVVSTMQAVSGAGYAGVPSMAIIDNVIPYIEGEEEKMETETLKILGELDGDRVEFADVKVSASCHRVPVLDGHTEAIFVATEKEADPEEAAEVLAGFRGVPQEKGLPSAPERPVVVREEEDRPQPRFDRDVDGGMAVVVGRIRKDPVFGGLKYVCVGHNAVRGAAGASVLNAELLVEEGYL

SEQ ID NO: 47598 - DNA, 945 bp, Haemophilus ducreyi 35000HP
  CDS (1)..(945): transl_table=11
atgagcaaatataaaatttttgttgatggagccgttggcacaacaggattaggtatttttgaacgacttcgtgcggctaaagatatcgaactgttaactttagccgatgaacagcggaaagatttaaaggctcgtttagcgaatgttgcagctgccgatttaactttactttgcttgcctgatactgcttctaaacaattagtgttacatgcaccgcctagtgctaaaatttgtgatacttcaacagcacatcgtgttgatccggcatgggtatatggttttgctgaattaagcggtcaatttaataatattcaaaccgcaacgcgagttgccataccaggttgccatgctacaggctatattgcattgctccgaccattgattgaaaggcattatttaaatgcagattacccttttacgtgtcattctttaaccggttattccggtggcgggaaagcgatgattgcagattatcaagctcctattagagatgataagtttaaggcgcctagaatgtatggattaacattacaccataaacaccttgctgaaatgtgtgcttttactggttcgtcaaaccctccgattttcacgccaattgttgctgattattacagcggtatgttagttaatgtaccgcttcctcttgccgcttttactcaagaggcgaatgatggcgaaaaaatttctggtatattagcagactattatcgtgaggctagcttgattaatgttcattatgttaatgatctgccaacagatggcatggtcgcggcgaatagcttagcgggtaaagatcgtttagatatttttgtatatgctaatcaaacacaagtcgtattatcagctatttttgataacttggggaaaggggcttctggtgcggctattcaatgtatgaacattatgttaggtcgtgatcaacttgcagatttacatatttag

SEQ ID NO: 47599 - protein, 314 aa, Haemophilus ducreyi 35000HP
MSKYKIFVDGAVGTTGLGIFERLRAAKDIELLTLADEQRKDLKARLANVAAADLTLLCLPDTASKQLVLHAPPSAKICDTSTAHRVDPAWVYGFAELSGQFNNIQTATRVAIPGCHATGYIALLRPLIERHYLNADYPFTCHSLTGYSGGGKAMIADYQAPIRDDKFKAPRMYGLTLHHKHLAEMCAFTGSSNPPIFTPIVADYYSGMLVNVPLPLAAFTQEANDGEKISGILADYYREASLINVHYVNDLPTDGMVAANSLAGKDRLDIFVYANQTQVVLSAIFDNLGKGASGAAIQCMNIMLGRDQLADLHI

SEQ ID NO: 47600 - DNA, 1116 bp, Prochlorococcus marinus str. MIT 9313
  CDS (1)..(1116): transl_table=11
atgaaggcaatggaaagtccccctcgctctccagcctctgacatttctcaggttcgaggcagccgagtagcggttatcggcgctacgggctacggcggtcttcaaaccatcagattgcttgaggaccatccccacctccatgtgacctacctgggcggcgaacgaagtgccggcaggcgatggagtgagctttgcccttttttacccatccttgatgatcctgaagttcaatctcccgatcctgacaagatcgctgaattcgccgattacgcagtcctcagccttcccaatggacttgcctgccaattagcaccgcaactgctgaaacgcaatgttcgggttgtagacctctctgctgactttcgctatcgctcactggaacaatggaaacaagtttatgtccatgaagctcaaaacctcaatcgagatgatgttcagctttgtagagaggctgtttatgggttacctgaatggaagggacctgaaattgcagttgcaaatcttgtcgctgcaccgggatgcttcccaaccgcaagtttgttgcccttgctgccttttctaaagcagggattgatcgaaaacgatggtttgattatcgatgcaaaaactggcacctctggtggagggagggtggccaaagaacaatttcttctggcagaggcctcggagtcgatcatgccttatggcgtggtaggacatcgacatacatcagaaatcgaacaacttgctagtgaggttgccggacagccgattgagcttcagttcacaccccatctcgtaccgatggtgcgtggactgctagcgacggtttatggacgtttgagagatcctggattgaccgctgaggattgcacaactgtgcttaaagcggtctatcgacatcatccctgcatcgatgttcttcctgtgggaacgtatccagcgactaagtgggtgaagtactccaacaaagctgttctttctgttcaggtcgacaaccgcaacagccggcttgtcttgatgagcgctgttgacaacctgattaaaggccaagctggtcaaggggttcaatgtctaaacctgatggctggattaccaccaaccacagggatgtctttactgaccttctacccttaa

SEQ ID NO: 47601 - protein, 371 aa, Prochlorococcus marinus str. MIT 9313
MKAMESPPRSPASDISQVRGSRVAVIGATGYGGLQTIRLLEDHPHLHVTYLGGERSAGRRWSELCPFLPILDDPEVQSPDPDKIAEFADYAVLSLPNGLACQLAPQLLKRNVRVVDLSADFRYRSLEQWKQVYVHEAQNLNRDDVQLCREAVYGLPEWKGPEIAVANLVAAPGCFPTASLLPLLPFLKQGLIENDGLIIDAKTGTSGGGRVAKEQFLLAEASESIMPYGVVGHRHTSEIEQLASEVAGQPIELQFTPHLVPMVRGLLATVYGRLRDPGLTAEDCTTVLKAVYRHHPCIDVLPVGTYPATKWVKYSNKAVLSVQVDNRNSRLVLMSAVDNLIKGQAGQGVQCLNLMAGLPPTTGMSLLTFYP

SEQ ID NO: 47602 - DNA, 996 bp, Rhodopseudomonas palustris CGA009
  CDS (1)..(996): transl_table=11
atgaccctgaccgacagcaccatcccaggccaggcgaaggctgcgagcggcaaaccggtggtgttcatcgacggcgccgccgggaccacgggcctcggcatccgcgaacggctggcccgccacggccaggtcaccgtgaaggatatcccggacgacaagcgcaaggatcccggcgccaagcgtgcgctgatggccgaggtcgatctcgtcatcctgtgcctgccggacgatgccgccaaggagacggtggcgctgatcgacgacctcggtgcgtcgggcccgaaggtgctcgacgcctcgaccgcgttccgcgtcgcgccggactgggtctatggcttcgccgagctggcgccggatcaggccgacaacatccgcgccgccaagaaggtggccaatcccggctgctacccgaccggcggcatcgcgctgctgcggccgctggtcgacgccggcctgctgccggccgactatccggtgacgatcaacgccgtcagcggctattccggcggcggcaagtcgatgatcgcggcttacgaggccggtaccgcgccggcgttcgagctgtacggcctcggcttcgcgcacaagcatctgccggaaacccagaagtacgcgggcctgtcgcgccggccgatcttcattccctcggttggtaacttccgccaggggatgctggtgtcggtgccgctgcatctcgatacgctgccgggcaagccggcggccgccgacctgcacgccgcgctgacacagcgctatgccggcagcacctatgtgtcggtgccgccgctggatgctgcgccttacgcggccggccggatcgagccggaagcgctgaacgacaccaaccggcttgaactctacgtgttcggcagcgatgcccaccgccaggcggtgctggtggcgcggctcgacaatctcggcaaaggcgcctccggtgctgccgtccagaacatgcgcctgatgctcggcctggccgacaccggctcggtcgactag

SEQ ID NO: 47603 - protein, 331 aa, Rhodopseudomonas palustris CGA009
MTLTDSTIPGQAKAASGKPVVFIDGAAGTTGLGIRERLARHGQVTVKDIPDDKRKDPGAKRALMAEVDLVILCLPDDAAKETVALIDDLGASGPKVLDASTAFRVAPDWVYGFAELAPDQADNIRAAKKVANPGCYPTGGIALLRPLVDAGLLPADYPVTINAVSGYSGGGKSMIAAYEAGTAPAFELYGLGFAHKHLPETQKYAGLSRRPIFIPSVGNFRQGMLVSVPLHLDTLPGKPAAADLHAALTQRYAGSTYVSVPPLDAAPYAAGRIEPEALNDTNRLELYVFGSDAHRQAVLVARLDNLGKGASGAAVQNMRLMLGLADTGSVD

SEQ ID NO: 47604 - DNA, 2703 bp, Magnaporthe grisea 70-15
  CDS (1)..(2703)
atgctttctgccgcacggggcgccttcagggccggagcccgccggtgcattggcgcccgagctatcgctgcgcctgctcgcaccctccccgttcctcgcctcgccgcagctcacgccgcccgccgctccttctccgcctcggcgccagtcctctcccagtccaatacccgaggcgtcgtcgtccaggccatcagcagcgtcgcttcccagagggaggtccagcagtacctctccctctttacctcggtcgagtcacagaagtttgccgtcatcaaggttggtggtgccattctcaccgactaccttgacgagctctgccaatccctcgccttcctttacgaggtcggcctcttccccatcatcgtccacggagccggtccccagctcaacaagcttctcgaggatgccggcgtcgagccccagttcgaggagggcatccgcgtcaccgacgccaagactcttgccattgcccgccagctcttccttgaggagaacctaaacttcaccaagaagctcgaggactacggtgtcaatgtgcgtccggccaccgcaggcgtcttctacgccgactacctcaacaaggacaaatggggatacgtgggcaagatcaccaaggtcaacacggatatcatcgagggggctatcaaccgtggctgcttgccggtgctgacctccctcgcctggaccgctgacggccaactgctcaacgtcaatgccgatgttgccgctgccgagctcgccagggctcttgagccgcttaaggtcgtctacctctctgagaagggtggcctttttgacggcgatggcagcaagatttcgaccatcaaccttgacgaggaattcgactggtacatgggacaggagtggtgcaagtatggcaccaggctcaagatcaaagagaccaagcagttacttgacaccctcccccgcacctctagtgtcgccatcatccacccccgcgacctgcagaaggagctgttcaccgactccggagccggtacgcttatcaggcgaggcggcaagttccttactgcgaccaaggtctccgagtttggtgaccttgccaagatcaaggaggccttcttgcgtgaccataccgacgatcccgaggccaagacccagatggagaactactttgactatctgagcaaggacgtcaacttcaaggcctactacgacgagcacgtcagggtctttgccgttgtcctgccccccaagcaggatggcggtctggcaaagcttgccaccctgaccatgacttctagcggttggctcagcggtgtggctgacaccattttcgctgccatcaggaaggaccacaagaagcttgtctgggttgtcgacgataacgatgagaacatctcatggttccaggagaaggccgatggtgccgtgaaccagaacggcaaggttttcttcttctacggagtccaggacatgaacgaggtggtgcctgccatgaaccagttcttcaaggagggtaacgcgactctgtacagcgaaggagatatggccaaggtcgagcagctcagctctggcgtgagcacctctggcgccactcgccccgttggccgtccgcaaggccagcagatcaggtcgtaccacacttcccctcgcaggcctaccgtcactcagccgttccgtaccagcagggggccagccttttcccgtagctacgtcagcactacgaaccccaaccctccattgggcaagaagaacgcgtcgaacaccaggcaggccaaagttgcactgattggcgctcgtggttacactggccaggccttgatcaccctcctcaactcacacccacacatggagctgaagcacgtcagctcgagggagttggcgggcaagaagcttgagggctacaacaagagcgaaatcatctacgagaacctcagcccggaggacatgacggatatggaggagagtggcgagatcgactgctgggtgatggcactgcctaacggcgtttgtgcgccatatgtcaacgctatttaccagggccgccgcggacgttctgatgctctcaacagtgtcatcgtcgacctgtcagcagactaccgcttcgacgacagctggacttatggtcttcctgagcttgtttcgcgtgactccatctcccaggccaagcgcatctcaaacccgggttgctacgccacaggcgcgcagctcgccatctctcctctccttgagcacgtcggcggtcagccttggatcgcaggcgtctcgggctactctggcgcaggaaccaagccgtcgcgcaagaacgacacgaccttcctggcggacaacatgcttccctacagtctgactgaccacatgcacgagcgtgagattagcaggcagttgggcgtcgatgtggctttcgtgccgcacgtcgcaccctggttctctggcatccagctcaccatcggcatcccgctcaacaagaccatgaacagccgtgacattaggcacatctaccaggaccgttacgccggcgagaggctagtcaagatcattggcgagcctccttttgtcaaggatattgccaacaagcacggtgtcgaaattggtggcttccaggtgcactcgtcgggcaagagggtcgtcgtctgtgctaccatcgacaacctcctgaagggtgctgcgactcagtgtttgcaaaacatgaaccttgctctcggctacgccgagtatgacggcattcccatcatgtag

SEQ ID NO: 47605 - protein, 900 aa, Magnaporthe grisea 70-15
MLSAARGAFRAGARRCIGARAIAAPARTLPVPRLAAAHAARRSFSASAPVLSQSNTRGVVVQAISSVASQREVQQYLSLFTSVESQKFAVIKVGGAILTDYLDELCQSLAFLYEVGLFPIIVHGAGPQLNKLLEDAGVEPQFEEGIRVTDAKTLAIARQLFLEENLNFTKKLEDYGVNVRPATAGVFYADYLNKDKWGYVGKITKVNTDIIEGAINRGCLPVLTSLAWTADGQLLNVNADVAAAELARALEPLKVVYLSEKGGLFDGDGSKISTINLDEEFDWYMGQEWCKYGTRLKIKETKQLLDTLPRTSSVAIIHPRDLQKELFTDSGAGTLIRRGGKFLTATKVSEFGDLAKIKEAFLRDHTDDPEAKTQMENYFDYLSKDVNFKAYYDEHVRVFAVVLPPKQDGGLAKLATLTMTSSGWLSGVADTIFAAIRKDHKKLVWVVDDNDENISWFQEKADGAVNQNGKVFFFYGVQDMNEVVPAMNQFFKEGNATLYSEGDMAKVEQLSSGVSTSGATRPVGRPQGQQIRSYHTSPRRPTVTQPFRTSRGPAFSRSYVSTTNPNPPLGKKNASNTRQAKVALIGARGYTGQALITLLNSHPHMELKHVSSRELAGKKLEGYNKSEIIYENLSPEDMTDMEESGEIDCWVMALPNGVCAPYVNAIYQGRRGRSDALNSVIVDLSADYRFDDSWTYGLPELVSRDSISQAKRISNPGCYATGAQLAISPLLEHVGGQPWIAGVSGYSGAGTKPSRKNDTTFLADNMLPYSLTDHMHEREISRQLGVDVAFVPHVAPWFSGIQLTIGIPLNKTMNSRDIRHIYQDRYAGERLVKIIGEPPFVKDIANKHGVEIGGFQVHSSGKRVVVCATIDNLLKGAATQCLQNMNLALGYAEYDGIPIM

SEQ ID NO: 47606 - DNA, 1227 bp, Gibberella zeae PH-1
  CDS (1)..(1227)
atgttctcaaccacctcaatggtcttccgggccggcgctcgtcgcgtcgtgagacgatccatccccgtcctccctgccatgggccccagccctacccgatacctcgccggtcgacagaacaacttcgttatcagcgtgagccagcaactgcagcagcgacgtggttatgttaccgagacaaaccccaaccctcctctgggcaagaagaatgcgtcaaacgaaggtccttctcgaattggcctaataggcgcccgaggatacactggttcagctctggttgagcttcttaacgagcaccccaacatggagctcacccatgtgtcgtctcgagagcttgctggacaggaacttcagggatacaccaagcgcaaggtcatctacgagactttgtcgcctgaggatattgcccaattggacagccagggcaaggttgactgctggatcatggctcttcccaacggcgtttgcaagccttatgttgatgctctggatggaatcaacagccagagcgttgttgtcgatctctctgccgactaccgatgggatgaaaagtggacatacggtctccccgagcttgtaaagcgctccaagattgcgcagtccaaccgcatctccaaccccggatgctacgccactggtgctcagatcggtcttgctggagctcttgatctgatcgagggaacacccactgttttcggtgtctcaggttactctggagccggatccaagcccaaccccaggaacaacgtcgaggttctcaaggacgccatcattccttactctctaaccggacacatccacgagcgcgagatttctacgcaactcaacacccctgttgctttcattccccacgttgctggatggttcaggggtatcactctgactattagcattccccttagcaaggagatgacttcacgagatattcgacaactgtaccaggaccgctacgctggagagaagctcatcaaggttgtgggtgagccacccctggtgagtgccatctctggacgccacggagtcgagattggaggttttgctgtcgacagcaccggaaagcgcgttgtcgttgtcgccgccatcgacaacctcgccaagggtgccgccactcaatgtctgcaaaacatgaacctcgccctgggttacggagagtacgagggtatccccgtcattttcactgtcatgcaagctggaaatgaaacaacatctcacaccatcatggcttag

SEQ ID NO: 47607 - protein, 408 aa, Gibberella zeae PH-1
MFSTTSMVFRAGARRVVRRSIPVLPAMGPSPTRYLAGRQNNFVISVSQQLQQRRGYVTETNPNPPLGKKNASNEGPSRIGLIGARGYTGSALVELLNEHPNMELTHVSSRELAGQELQGYTKRKVIYETLSPEDIAQLDSQGKVDCWIMALPNGVCKPYVDALDGINSQSVVVDLSADYRWDEKWTYGLPELVKRSKIAQSNRISNPGCYATGAQIGLAGALDLIEGTPTVFGVSGYSGAGSKPNPRNNVEVLKDAIIPYSLTGHIHEREISTQLNTPVAFIPHVAGWFRGITLTISIPLSKEMTSRDIRQLYQDRYAGEKLIKVVGEPPLVSAISGRHGVEIGGFAVDSTGKRVVVVAAIDNLAKGAATQCLQNMNLALGYGEYEGIPVIFTVMQAGNETTSHTIMA

SEQ ID NO: 47608 - DNA, 2622 bp, Candida glabrata CBS 138
  CDS (1)..(2622)
atggtgagtgtcctcgtttccacaaagggttttaacccagctaagttcaagcaggcctctaaattgctgaataagagcacagttgggttcttgagcacatcagccaagaacaagtactccttacagagcaaagtccaaaacataaagaacagtgaagtacccaagacttttactagatctaaagttggtttctcaaagagaagtctgtcgtcctcgaacggcattggcacttcaggtaccaggtccacagtgattcaactactaaacaatatcagcacaaaaagagaggttgagcagtaccttaaatacttcacctctgtatcgcaacaacaatttgccgttattaaggtaggtggtgctattatcagtgacaacttacctgagctagcatcatgcctggcgttcttataccatgtcggactctacccaattgttctgcacggtacaggtccacaggtcaatggcagattggaagcccagggcattgaaccagactatatagacggtattagaattacagatgagcacaccatggcagttgtcagagaatgtttcctagaacaaaacttgaagctagtgacagctcttgaacaattgggtgtccgtgccagacctatcacatctggtgtgttccaagccgaatacttggacaagagcaaataccaactagttggtgatattacaaaggtcaacaaggatgccatcgaggcctctatcaaagccggtgctctaccgatccttacttcactagctgaaactccatcaggccaaatgctgaacgtcaacgcagatgttgctgctggtgaactagctcgtgtgttcgagcctttaaagattgtctacctgaatgaaaagggtggtataattaatggtgaaactggggaaagaatatcaatgatcaacttggatgaggaatacgaagatttattgaaacaaagttgggttaagtatggtaccaaattaaagattaaggaaattaaggaattactagattacttaccacgttcttcctcggttgcaattatcaacgtacaagacttgcaaaaagaactgtttaccgactctggtgctggtactatgatcagaagaggatacaaactgttgaagagatcaagtctatctgaatttcaatcggctgatgctctaagaaatgtgcttcagagagatgcagacattgcttccaaagctcaatcagcagctacatatttaagagagcttgaaaaagctcaatttgtatcatactctgatgaaccattagaagctttagccatcgtcagaactgaacctaagattccaaagttagagaagttcctatgctcaaactctgcgtggttgaacaatgttacggataatgtgtttagcactctgaagcgcgatttccctgctttgcaatggattgtttctgaagatgatgccaacattgcttggcactttgacaagtcccaaggttcttatttgaaggatggcaaggttctgttctggtatggtgttaaggatttgaacactgtctccgagttgattggggaatttactaaaggtgtaaccaacagtgggcactccagcggtgtctttggctcccaacaagctaagagggcgtactctactgtcagaagaacaccacccaagccagaggcaactaacacttctccagctcgagttgcattgattggtgccagaggttacaccggtagaaatcttgttgcattgatcgatagccacccttattttgaaatctcgcatgtttccagtcgtgaattgaagggtcaaaagctgccagattacaagaaggctgagattatctatgacaacttacaaatcgaggatatcaagaagttagaatctgagaatgctgtagacttctgggtgatggctttaccaaacaatgtctctgagccattcatcgaagccattgacagctgcaatggtaagtccaagatcattgatctatctgctgaccacagatttgtctctgaggaagaatgggcttatggtctacctgagatcaatgacagagaacacatctacaaagccaagaagatatcaaacccaggctgctatgccactggttcccaattgtctattgcaccattgttgaagtacgttgatggtctaccaactgtctttggtgtctctggttactctggtgctggcgcaaaaccttcacctaagaatgatcccgagaatctaaacaataacattattccatacgctttaaccaaccacatacacgaaagagagatctccactcgtttgggacatgaagtggcattcatgccccatgttggccaatggttccaaggcattgccctgactgtatccattccaatcaagaaaggcagtatccaaagcaacgaggaagccatgaacatctacaaagatttctacaaaggtgaaaatctggtacacataatggaagacatcccatccgtgaaggagatagctggcacccacggcgtggtcattggtgggttcaagctgaacgacaacaaggacagaatagtggtctgtggcacaatcgacaacttgctaaaaggtgcagccacccaatgtttacaaaacatgaacctagccatgggctacggggaatacgacggtattccaaaggacaagatagtctcttag

SEQ ID NO: 47609 - protein, 873 aa, Candida glabrata CBS 138
MVSVLVSTKGFNPAKFKQASKLLNKSTVGFLSTSAKNKYSLQSKVQNIKNSEVPKTFTRSKVGFSKRSLSSSNGIGTSGTRSTVIQLLNNISTKREVEQYLKYFTSVSQQQFAVIKVGGAIISDNLPELASCLAFLYHVGLYPIVLHGTGPQVNGRLEAQGIEPDYIDGIRITDEHTMAVVRECFLEQNLKLVTALEQLGVRARPITSGVFQAEYLDKSKYQLVGDITKVNKDAIEASIKAGALPILTSLAETPSGQMLNVNADVAAGELARVFEPLKIVYLNEKGGIINGETGERISMINLDEEYEDLLKQSWVKYGTKLKIKEIKELLDYLPRSSSVAIINVQDLQKELFTDSGAGTMIRRGYKLLKRSSLSEFQSADALRNVLQRDADIASKAQSAATYLRELEKAQFVSYSDEPLEALAIVRTEPKIPKLEKFLCSNSAWLNNVTDNVFSTLKRDFPALQWIVSEDDANIAWHFDKSQGSYLKDGKVLFWYGVKDLNTVSELIGEFTKGVTNSGHSSGVFGSQQAKRAYSTVRRTPPKPEATNTSPARVALIGARGYTGRNLVALIDSHPYFEISHVSSRELKGQKLPDYKKAEIIYDNLQIEDIKKLESENAVDFWVMALPNNVSEPFIEAIDSCNGKSKIIDLSADHRFVSEEEWAYGLPEINDREHIYKAKKISNPGCYATGSQLSIAPLLKYVDGLPTVFGVSGYSGAGAKPSPKNDPENLNNNIIPYALTNHIHEREISTRLGHEVAFMPHVGQWFQGIALTVSIPIKKGSIQSNEEAMNIYKDFYKGENLVHIMEDIPSVKEIAGTHGVVIGGFKLNDNKDRIVVCGTIDNLLKGAATQCLQNMNLAMGYGEYDGIPKDKIVS

SEQ ID NO: 47610 - DNA, 2571 bp, Kluyveromyces lactis NRRL Y-1140
  CDS (1)..(2571)
atgtctgtcccatctgcgagattgttgatgtcaacgaagggtttgaatccatctcgtttgagcaaagttgcttcgattttggctagatgttctccttcaatcccaaagagagttggttattcgaaaagatttgtttctagtgctaacggtgttggatctactgggactagatctacggttattcaattattgaacaatattggatcgaaaagagaagtagaacaatatttgaagtacttcacttcggtttcgcaacagcaatttgctgttattaaagtcggtggtgctattatcagtgataacttgcaggaattggcatcgtgccttgcatttttgtatcacgttgggttgtacccaatcgtcttgcatggtactggtcctcaagtgaacggtagattggaagcccaaggtatcgaacctgattatattgatggtattagaattaccgatgatcataccatggctgttgttagacagtgtttcttggaacagaatttgaaattagttactgctttggaacaacttggtgttcgtgctagaccaattacttctggtgttttcaccgctgaatatttggataaggataagtataaattagtaggtgacatcacctctgtagctagagatccaattgaagcttcaatcaaggctggtgtcttaccaattttgacttcgttggccgaaactccttctggtcaaatgttgaatgtcaatgctgatgtcgctgctggtgaacttgctagagtctttgaacctctaaaaattgtttacttgaatgagaagggcggtatcattaacggtagcaccggtgagaaggtttcagtgattaacttagatgaagaatacgatgaattgatgaagcaaagttgggtcaagttcggaactaagttgaaaatcaaagaaattaaagatttgttggacttcttgccaagatcttcgtccgtggccatcatcaatgttcaagatttgcaaaaagaattgttcaccgattctggtgcaggtactttgattagaagaggctacaagttaattcgaagatctactttacaggaattcccatcctctgacgctttgagagatatcttacaaagtgacccagacatccaatccggtgctcaatcagttgcttcttatttgagagacttgaacgaatcagatttcacttcttacgctgatgaaccactagatgttcttgccattgtcaagaaagattctgtggtggcaaaactagataaattcctatgttcccagaccggctggttgaataacgtcaccgataacgttttcaaagctttgaaacgtgacttccctgccctacaatgggtgatcaatgaagatgatgcgaacatcgcttggcatttcaacaaatctgatggttcctatttgaagaacggtaaggttctattctggtatggtgtcaaagatttgaacactgtatccgaattaatatccgagttcattaagacctcccctgaaagcggtaccgctccatccttctctggttcctccagtggtgtattttccagtggtcaatcatccagatcttactccactagggccagatctgctcctaaagtagaaggcactaacaagagccctgctaaagttgctttgattggtgccagaggttacacaggtcaaaatcttatttcattgatagactcacatccatttttggaattatctcacgtctcctctcgtcaaaacgctggtaagaagttggaaggatataacaagtctgagattatttattcgaatctacaaattgatgacataaagaaactagaaagtgaaggtgctgtcgatgtgtgggtcatggcgttgccaaacaaagtgtgcgaaccattcgttgaggccattgagtcggttgccaacggtaaatccaaaattgtcgatctatccgctgatcatagatttgtcccggagacggaatggagctacggattaccagagttaaacaacagagaagcaattgccaatgctaaaaagattgctaaccccggttgttacgccaccggtgcccaagtagcgattgctcctctatcggaatacatcacaggattacccacagtctttggtgtttctggttattctggtgctggtactacaccatctccaaagaatgatccaaaattcttgaacaacaatctaattccttactccttaacaaaccatatccatgagcgtgaaatttcaactcgtttgggtttggaagtcgcatttgttcctcatgttgcccaatggttccaaggtatttctcatactatttctattcctattaagaagaactcactatcttcagaacaaattaaggccttgtacaccgaattctacgctaacgaaaagttggtacatgttgccgatgatattccgttagttaaggacgtttctggtactcacggagtagttgttggtggtttcaaggtaaatgatgcaaaagaccgtgtcgtagtctgtgctactattgacaacttattgaagggtgctgccactcaatgcttacagaacatcaacctggccttgagttacggtgaatacgacggtattccagacaataagattattcaataa

SEQ ID NO: 47611 - protein, 856 aa, Kluyveromyces lactis NRRL Y-1140
MSVPSARLLMSTKGLNPSRLSKVASILARCSPSIPKRVGYSKRFVSSANGVGSTGTRSTVIQLLNNIGSKREVEQYLKYFTSVSQQQFAVIKVGGAIISDNLQELASCLAFLYHVGLYPIVLHGTGPQVNGRLEAQGIEPDYIDGIRITDDHTMAVVRQCFLEQNLKLVTALEQLGVRARPITSGVFTAEYLDKDKYKLVGDITSVARDPIEASIKAGVLPILTSLAETPSGQMLNVNADVAAGELARVFEPLKIVYLNEKGGIINGSTGEKVSVINLDEEYDELMKQSWVKFGTKLKIKEIKDLLDFLPRSSSVAIINVQDLQKELFTDSGAGTLIRRGYKLIRRSTLQEFPSSDALRDILQSDPDIQSGAQSVASYLRDLNESDFTSYADEPLDVLAIVKKDSVVAKLDKFLCSQTGWLNNVTDNVFKALKRDFPALQWVINEDDANIAWHFNKSDGSYLKNGKVLFWYGVKDLNTVSELISEFIKTSPESGTAPSFSGSSSGVFSSGQSSRSYSTRARSAPKVEGTNKSPAKVALIGARGYTGQNLISLIDSHPFLELSHVSSRQNAGKKLEGYNKSEIIYSNLQIDDIKKLESEGAVDVWVMALPNKVCEPFVEAIESVANGKSKIVDLSADHRFVPETEWSYGLPELNNREAIANAKKIANPGCYATGAQVAIAPLSEYITGLPTVFGVSGYSGAGTTPSPKNDPKFLNNNLIPYSLTNHIHEREISTRLGLEVAFVPHVAQWFQGISHTISIPIKKNSLSSEQIKALYTEFYANEKLVHVADDIPLVKDVSGTHGVVVGGFKVNDAKDRVVVCATIDNLLKGAATQCLQNINLALSYGEYDGIPDNKIIQ

SEQ ID NO: 47612 - DNA, 2550 bp, Debaryomyces hansenii CBS767
  CDS (1)..(2550)
atgttaagacaagtagttggtagatctgttgtcaagagattaagttctgttgccaataaagagatagttggatctgtttctttgagtaatagactcagaagcacgaaaacaaccacaaggttctactccactagatcaaccgtagttcaattattgaataacattggatctaaaagagaagtagagcaatatttaaagtattttacttctgtatctcagcaacagtttgctgttattaaagttggtggagcaattataacacaacaattacctgaattagcttcatgtcttgcattcttataccatgttgggttgtatccgattgtcttacatggcactggtccacaaattaatgagttattagaaaatgaaggtgttgaaccagaatatctggatggaattcgtatcaccaatcctaaaactatggaagtggtcagaaaatgtttcttagaacagaatttaagattagttacagcacttgaaaaaatgggtgttcacgccagaccaataacggcaggtgtttttggagctgactatttggataaggataaataccaattagttggtaaagttaattctgtgaataaatcgcctgttgaatcagccattgaagcaggttatttgccgattttaacttctttagcagaaaccccttctggtcaactcttgaatgtaaatgccgacgtagctgctggtgaattagccagagagtttgaacctttgaagattgtttacttgaatgagaagggtggtattattaacggtaataccggtgaaaaggtaagcatgatcaacttagatgaggaatatgatgacttgatgaaggaaagttgggtcaaatatggtacaaagttgaagatcaaagaaattcacgatttgttacaacatttaccaagatcttcatctgtcgctattattgatgttgatgatttacaaaaggaattatttactgattctggggctggaactttaattagaagaggttataaattaattagccgtaattctttgaaagaatttggtaatcctgatttgttaagagctgctttgttaagagacccagaaataaaatctggcaaattatctgttgcatcttacttaaagcatttagaatcaatcgaattcaaatcttatggtgacgaacctttagaagttttagccattgttactaaaaatggctctcgttttccaaagttggataagtttttgtcatcaagaactggctggttaaataacgtcacggataacatttttaactctattaagaaggattataaatcgttatattggatagtgagtgaaaatgattccaacttgtcgtggtacttttcaaaatctgacggttcgttctcaaagaacggtgaaatcttattctggtacggtttgaatacagaggaagtttcccaattaattaatcaatttgattcttctagtattggctccgcattgtcatcctctagtgagtctggtattttcagttccccaacccaaaagaagggattacatacaatggcccgccgttcttactcaagtaacccaaacccaccaattcgtgaaggtaagaatactcaaaaagccaaggttgcgcttattggtgccagaggttatactggacaaaatttaatcaatatgattgatagtcatccatttttagagttgtctcatgtttcttctcgtgaattaaagggacaaaagttaaagggctataataaggataatattgtttattctaacttacaagtcgaggacattaaagaacttgaaaagaacaatgaagttgatgtttgggttatggcattaccaaatggtgtctgtaaaccatttgttgaagcaattgaatctattccaaataataaatcgaaaattatcgatttatctgccgattacagatttgatactactggtgagtgggtttatggtttacctgaattgaatgatcgtaatgcaattgcatcggctaagaaaatctcaaatccgggctgttacgcaacagccgcccaatgtgcaatcgcacccttagtctcttatattaacggcaccccatcaatatttggtgtttcaggttattctggggctggtactaaaccatcccctaaaaatgatgtcaagtttttggctaataatataattccttactcgttgacagaccatatacatgaaaaggaaatcagcagccaattaggtttagatgttgcatttacaccacacgttgcacaatggttccagggtatctctcacactatttcaattcccattaaaccaaaatccttaagttctcgtgaaattagaaatatttatcaagacagatatcaaggtgaacagttgatcaccataagcggtgaagctcctttagttaaggatatcagtggtaaacatggtgtagttgttggtggttttgcagtgaattcaaaacaagatagagttgtgattgttgctactatcgataacttattaaaaggtgcatccactcaatgcttacaaaacattaatttgactatgggttatggcgaatttgaaggaattcctgacgatttagtcataagaggttag

SEQ ID NO: 47613 - protein, 849 aa, Debaryomyces hansenii CBS767
MLRQVVGRSVVKRLSSVANKEIVGSVSLSNRLRSTKTTTRFYSTRSTVVQLLNNIGSKREVEQYLKYFTSVSQQQFAVIKVGGAIITQQLPELASCLAFLYHVGLYPIVLHGTGPQINELLENEGVEPEYLDGIRITNPKTMEVVRKCFLEQNLRLVTALEKMGVHARPITAGVFGADYLDKDKYQLVGKVNSVNKSPVESAIEAGYLPILTSLAETPSGQLLNVNADVAAGELAREFEPLKIVYLNEKGGIINGNTGEKVSMINLDEEYDDLMKESWVKYGTKLKIKEIHDLLQHLPRSSSVAIIDVDDLQKELFTDSGAGTLIRRGYKLISRNSLKEFGNPDLLRAALLRDPEIKSGKLSVASYLKHLESIEFKSYGDEPLEVLAIVTKNGSRFPKLDKFLSSRTGWLNNVTDNIFNSIKKDYKSLYWIVSENDSNLSWYFSKSDGSFSKNGEILFWYGLNTEEVSQLINQFDSSSIGSALSSSSESGIFSSPTQKKGLHTMARRSYSSNPNPPIREGKNTQKAKVALIGARGYTGQNLINMIDSHPFLELSHVSSRELKGQKLKGYNKDNIVYSNLQVEDIKELEKNNEVDVWVMALPNGVCKPFVEAIESIPNNKSKIIDLSADYRFDTTGEWVYGLPELNDRNAIASAKKISNPGCYATAAQCAIAPLVSYINGTPSIFGVSGYSGAGTKPSPKNDVKFLANNIIPYSLTDHIHEKEISSQLGLDVAFTPHVAQWFQGISHTISIPIKPKSLSSREIRNIYQDRYQGEQLITISGEAPLVKDISGKHGVVVGGFAVNSKQDRVVIVATIDNLLKGASTQCLQNINLTMGYGEFEGIPDDLVIRG

SEQ ID NO: 47614 - DNA, 2568 bp, Yarrowia lipolytica CLIB122
  CDS (1)..(2568)
atgattcgagctactcgtggaatggcccgagtggtccctcgggtgtgtgcctctgtggccgcccctcagattgccgcacccgcgaccaagtttgttgctctcaaacagtccattcgacccatctccacccgatccaccgtggtccagctgctcaacaacattggtagcaagcgggaggtggagcagtacctcaagtacttcacctccgtcaaccagcagcagtttgccgtcatcaaggttggcggcgctatcattactcagcagctccaggagctggcttcttgtctggcctccctctaccatgtgggtctctaccccattgtgctgcacggaaccggcccccagatcaacgagattctggagcaggagggcgtggagcctgattacattgatggcattcgaatcacagaccccaagactatgtctgtggtccgacgatgtttcctggagcagaacctcaagctggtggaggctctggagtccatgggagtgaaggcccgtcccatcaccggaggcgtcttccaggccgaatacctcgataaggataagtggcagctggttggaaagatcacccgagtcgacaagacccccattgagtcttctatcaaggccggagctcttcccattctcacttctcttgccgagactgctgacggccagattctcaacgtcaacgctgacgttgctgccggcgagctctcccgagtgattgagcctctcaagattgtctacctcaacgagaagggcggtctccacaacggtactaccggcgagaagatctccatcatcaaccttgacgaggagtacgaggaccttctcaaggagccctgggtcaagtacggcaccaagctcaagatcaaggaaatcaaggagctgctggacttccttccccgatcttcctccgtcgctatcatttccgtcgagtctctgcagaaggagctcttcaccgactctggagccggaaccctgatccgacgaggttataagcttgtcacccgagacaaccttaaccagtttgcctcgactgatgcccttcgagccgctctgtctcgagacaaggatattgcttccaacaaggtctctgttgcttcttacttgcgagagcttgagacatctcccttcaaggcctacggagatgagcctttggaggtgcttgccattgtccgagagtccccccacggagcttatctcgataagctcctggcctccaagaacggctggctcaactcggtcaccgataatgtgtggaccgccatcaagaaggaccacaacaagatgtggtggactgtccccgaggaggacgaaaacacctcgtggcattttgacaaggccgacggatcatttgccaagaacggccaggtcctgttctggtacggatttgaggccgacgaggtgtccaagctcattgcctcgtttgttgctaacgccaaggccgaggccttcactggtgtgcgatccatgcacaccggcaccggccttggtaacggtcgaaagacaggtgcccccggtgtcggtcgatacttccgacccactatccattcgtctctgacccctaagacccgacacttcaccaccaaccccaacccccctattgagaagggcaccaacaccaagccagccaaggttgctctgattggtgctcgaggatacaccggcaaggccctcattgatctgatcgacaaccaccctcatctcgagctgtctcacatttcttctcgagagctcgacggtaagcccctcgagggttacaagaaggcccagatgaagtactgcaacctgcaggttgaggatatcgttcgtctggaggagaagggtgcagttgacgtctgggtcatggctctgcccaacggagtctgcaagccttttgtcgacgccattgagggagtccgaaacaagtctatcatgatcgacctgtctgctgattaccgatttgacactaccggtgattggacctacggtctgcctgagctggttgatcgacaggccattgtcaacgccaagaagatctctaaccccggatgctacgctactggttcccagctggccatcgctcctcttctaccttaccttggtggccagcccaccatctttggtgtttctggctactctggagccggcaccaagccttctcctcgaaacgacattgacaacctgcgagataacctgatcccctactctctgactgaccacattcatgaacgagaggtgtcttcgcagctcggcactcccgttgcctttgtcccccacgttgcctcatggttccaaggcatctccctcactgtttccatccccctggctaagcctctgacctctcgagatattcgaaacatttaccaggatcgatacgccggcgagaagctggttcaggtgaccggtgaggcccccgaggtgcgacacatttctgagaagcaccacgtctctatcggaggctttggcgtttcttctaaggaggaccgagtggttgttgtcggcaacattgacaacctgctcaagggagccgccacccagtgtctgcagaacattaacctggccatgggttacggcgagtatgatggtattcctttgtag

SEQ ID NO: 47615 - protein, 855 aa, Yarrowia lipolytica CLIB122
MIRATRGMARVVPRVCASVAAPQIAAPATKFVALKQSIRPISTRSTVVQLLNNIGSKREVEQYLKYFTSVNQQQFAVIKVGGAIITQQLQELASCLASLYHVGLYPIVLHGTGPQINEILEQEGVEPDYIDGIRITDPKTMSVVRRCFLEQNLKLVEALESMGVKARPITGGVFQAEYLDKDKWQLVGKITRVDKTPIESSIKAGALPILTSLAETADGQILNVNADVAAGELSRVIEPLKIVYLNEKGGLHNGTTGEKISIINLDEEYEDLLKEPWVKYGTKLKIKEIKELLDFLPRSSSVAIISVESLQKELFTDSGAGTLIRRGYKLVTRDNLNQFASTDALRAALSRDKDIASNKVSVASYLRELETSPFKAYGDEPLEVLAIVRESPHGAYLDKLLASKNGWLNSVTDNVWTAIKKDHNKMWWTVPEEDENTSWHFDKADGSFAKNGQVLFWYGFEADEVSKLIASFVANAKAEAFTGVRSMHTGTGLGNGRKTGAPGVGRYFRPTIHSSLTPKTRHFTTNPNPPIEKGTNTKPAKVALIGARGYTGKALIDLIDNHPHLELSHISSRELDGKPLEGYKKAQMKYCNLQVEDIVRLEEKGAVDVWVMALPNGVCKPFVDAIEGVRNKSIMIDLSADYRFDTTGDWTYGLPELVDRQAIVNAKKISNPGCYATGSQLAIAPLLPYLGGQPTIFGVSGYSGAGTKPSPRNDIDNLRDNLIPYSLTDHIHEREVSSQLGTPVAFVPHVASWFQGISLTVSIPLAKPLTSRDIRNIYQDRYAGEKLVQVTGEAPEVRHISEKHHVSIGGFGVSSKEDRVVVVGNIDNLLKGAATQCLQNINLAMGYGEYDGIPL

SEQ ID NO: 47616 - DNA, 2703 bp, Aspergillus nidulans FGSC A4
  CDS (1)..(2703)
atgttctcccttcgcaccgctgtgcggagagcttccaccaccaagtccttccgagcgctctccgcaccgcacaccgtcgcgtttgccagactctgctcgcccacagcccgtgcctcgttgagggcgtctgcagtgccgctgctgcaaagccgtcactactctcgcgcctccgacacccaactctcttctacccggtccaccgtcgttcagctgttgagcaacatcggctcgaagcgtgaggtccagcaatacctttcgcactttacttcggtctcgtcccagcagtttgccgttatcaaggttggtggtgctattatcactgagcacctcgaaaccctctcctctgcgctcgccttcctgaaccatgtcggtctgtacccgatcgtcgtgcacggcgccggccctcagctgaaccgcatgctcgaggctgctggtgtcgagccccagtttgaggatgggatccgcgtcacagatggcaagacactggctttggcccgcaagctcttcttggaggagaacctgaagctggtcgaggagctggagcgcatgggtgtgcgggctcgccctctcaccgctggtgtcttccaggccgactaccttgacaaggagaagtacaacctggtcggcaagatcaacggtgtcaacaagaagccgattgagtctgcaattgaggctggctgccttcccattctgacttccatggccgaaacccccgatggccaagtgctcaacgtcaatgccgatgtcgcagctggagagctggcgcgcgcgcttcagcccctgaagatcgtctatctcgctgagaagggaggtctgttcaacggtgacactggcgagaaaatctcgagcatcaaccttgatgaggagtacgaccacctcatgacacagtggtgggtgcgtcatggtactcgtctgaagatcaaggaaatgaaggagttgctcaacgatcttccccgtacttctagcgttgctatcatccaccctgccgacctgcaaaaggagctctttaccgactccggtgcgggtactcttatccgccgtggaaacaaggttcacaccaagacttcgctttctgagtttgaggatttggcccaactgaaggaggtcttggttcgtgaccgggaaggccttgatgctcgcgcaaccgtcgaccgttacgttgagggcctgaaggagcgcgacttcaaggcctacttcgatgagcccatggaggctctggctgttgttttgccccaggccaaggatgcccttacctcagcggcccacctcgctactttcaccatcactaagtctggctggctcacaaacgtggccgacaacgttttcgccgccatcaagaaggacttccccaagcttgtctggaccgtcaaggaggatgacgagaacctcacatggttctttgacaaggctgatggcagtctaagccgagacggcgaggttctcttctggtacggagttgagagtagtgatgaggtgaagctgttggttcaggaattcactcagcacggtcgccagatgttcggcgacatcaaccttgagtccaggcttcagcgcgctgctcatgcggctgccaatatcggcaagcccctcggtgctgctgctggacagaagcgtactttctccactgcaagcaacgcccttcgttctgcccgtttcggacgcccttcagttcccgttcagactgtccgcacctacgccacaaccaaccctaaccctcctcttggggagaagaacaactccaacactaagccttccaaagtcgccctcatcggagcccgtggctacactggacaggccctgatcaacctcatcaacgcccaccctcacctggatttgcgtcatgtctcttcccgcgagctggctggcaagaagctgcagggttacgacaagcgagagatcatctacgagaacctgagtcccgaggatgtcaagcgcatgtcatccaacggcgacgtcgactgctgggttatggccctccctaacggcgtctgcaagcctttcgttgatgccgttgaccagggtgccaaggatggtaacgtgatcatcgacctgagcgccgactaccgctttgatgagaactggacctacggtctccctgagctggtcagccgctctaagatcgcccaggcaactcgcatcgccaaccctggttgctatgccaccggaacccaagttgccattgctcctatcgttcctcacctcggtggacaacccaccgtttttggcgtttccggttactctggagctggtaccaagcctagccccaagaacgacgtccagaaccttactaacaacatcatcccttactccttgaccgaccacatccacgagcgggaaattagttctcagctcggtactcccattgccttcatgccccacgttgctgtttggttccagggcatccacctcaccatcaacattcctctgaaggagacaatgtcatctcgtgacattcgcaacatctaccaggaccgttacgctggcgagaagcttgtgaagatcgtcggtgagcctccggttgtcaagaacattgctggtcgtcacggcgtcgaagtcggtggctttgccgtccactccaaggagaaccgtgtcgtcgtttgcgccaccattgacaaccttctcaaaggtgctgccactcaatgcctgcaaaacatgaacctcgccctcggatacagcgagtacgagggtatccctcttgaatag

SEQ ID NO: 47617 - protein, 900 aa, Aspergillus nidulans FGSC A4
MFSLRTAVRRASTTKSFRALSAPHTVAFARLCSPTARASLRASAVPLLQSRHYSRASDTQLSSTRSTVVQLLSNIGSKREVQQYLSHFTSVSSQQFAVIKVGGAIITEHLETLSSALAFLNHVGLYPIVVHGAGPQLNRMLEAAGVEPQFEDGIRVTDGKTLALARKLFLEENLKLVEELERMGVRARPLTAGVFQADYLDKEKYNLVGKINGVNKKPIESAIEAGCLPILTSMAETPDGQVLNVNADVAAGELARALQPLKIVYLAEKGGLFNGDTGEKISSINLDEEYDHLMTQWWVRHGTRLKIKEMKELLNDLPRTSSVAIIHPADLQKELFTDSGAGTLIRRGNKVHTKTSLSEFEDLAQLKEVLVRDREGLDARATVDRYVEGLKERDFKAYFDEPMEALAVVLPQAKDALTSAAHLATFTITKSGWLTNVADNVFAAIKKDFPKLVWTVKEDDENLTWFFDKADGSLSRDGEVLFWYGVESSDEVKLLVQEFTQHGRQMFGDINLESRLQRAAHAAANIGKPLGAAAGQKRTFSTASNALRSARFGRPSVPVQTVRTYATTNPNPPLGEKNNSNTKPSKVALIGARGYTGQALINLINAHPHLDLRHVSSRELAGKKLQGYDKREIIYENLSPEDVKRMSSNGDVDCWVMALPNGVCKPFVDAVDQGAKDGNVIIDLSADYRFDENWTYGLPELVSRSKIAQATRIANPGCYATGTQVAIAPIVPHLGGQPTVFGVSGYSGAGTKPSPKNDVQNLTNNIIPYSLTDHIHEREISSQLGTPIAFMPHVAVWFQGIHLTINIPLKETMSSRDIRNIYQDRYAGEKLVKIVGEPPVVKNIAGRHGVEVGGFAVHSKENRVVVCATIDNLLKGAATQCLQNMNLALGYSEYEGIPLE

SEQ ID NO: 47618 - DNA, 2574 bp, Candida albicans SC5314
  CDS (1)..(2574): transl_table=12
atgatcagacaagtgaataaaaaggctatttcaaacggtcttttcaaaagattatcgctcagtagtagtgcttttgctaatattacagccaataaaaaatcgtccactcatcaactcaaccaaaagactcaattaacaaatgttcgtttctattcaacaaaatccactgttattcagttattgaacaacattggttccaaacgtgaagttgaacaatacttgaaatatttcacttcggtatctcaacaacaatttgctgtgatcaaagttggtggtgcaattatcacccaacaattgaacgaattagcatcatgcttggcatttttatatcatgttggtttgtaccctattgttttacatggtactggtccacaaatcaatgaattgttggaaaacgaaggtgttgaaccagaatatattgatggtatcagaatcaccaaccccaaaacaatggaagtagtacgtaagtgtttcttagagcaaaacttgcgtttggtgaccgctttggaaaaaattggtgtccacgctcgtccaataactgctggtgtatttgaagctgaatatttggataaggacaagtatcaattagttggtaaaatcactagtgtcaacaaatccccaattgaagccgccatcaatagtggatacttgccaattttgacatctttggccgaaacctctctgggtcaattattaaatgtcaatgccgacgttgctgccggggaattagctcgtgaatttgaacctttgaaaattgtttacttgaatgaaaaaggtggtattataaacggaaacactggtgagaaagtttctgctatcaatttggatgaagaatatgaagatttattaaaggaaagttgggttaaatatggtactaaattgaagatcaaggaaattcacgatttattacaacatttgccaagatcttcttcagttgccattattgatgtcaacgatttacaaaaggaattgttcactgattctggtgctggtactttaatcagaagaggttacagattaataaacagaaactccttgcgtgattttggtaacccagacttgttaagaaacgcattattaagagacccagaaatcaaaactggtaaagtgtctgttgcttcatacttgaagtttttggattctgttcaattcaagagttatggagacgaacctttggaagtattggctattgtggtagaacaaaatgacaaaattcctaaattagacaagtttttgtcatccaagacaggttggttaaacaatgttaccgataatattttcaatgctatcaagaaagattacagtcaattatgttgggttgttaatgaaaacgatgccaacttaccttggtatttctccaaatcagatggttcatttgccaagaatggccaaatcttgttttggtacggtttaaacattgacgaagctagtaaattgattaaagaatttgattcttcatctattggatcatcgttgtcatcttctaaagaatctggcgtattcacatctgctcaacaaaagcgtggtttccaccactctacagtccgtagaaacaccaatcctaatcctccattatctgaaggtaagcaaaccgagagaaaaaaagttgctttgattggtgctagaggttacactggacaaaacttgattaaattgattgacaaccatccatacttggatatttcatatgtgtcgtcacgtgaattggaaggtcaaaaattacaaggttacaacaaggataacattgtttactccaacttgcaaattgaagacatcaagagattagaagaaaacaatgaggttgatgtttgggttatggctttacctaatggtgtttgtaaaccatttgttgacactattgatttagttcagaacccaaattctaaaattgtcgatttatctgctgattatcgttttgacacaactggtgaatggacttatggattaccagaactaaatgatcgtaagaccatagctcaagctaagaaaatttccaacccaggttgctatgccactgctgctcaagtcgccattgccccgttaaaagaatatatttctggaactccaagcatttttggtgtttctggctattcaggtgctggaaccaaaccatctccgaagaacgacgtcaatttattgtcaaataatttaattccttactcgttaactgatcatgtacacgaaaaagaaattagtagtcaattaggtttacaagttgcatttaccccacacgttgctcaatggtttcaaggtattactcatactatcaacattccaattaaaaaaggatctttgacttctcgtgaaattagaaacatttaccaagatagatatcaaggtgaaaagctaatcaccattagtggagaagcaccacttgttaaagacattagtggcaaacacggtgtcgttgttggtggctttgctgtcaactctaatgaagaccgtgttgttattgttgcgactattgacaatttgttgaaaggtgcagctacccaatgtctacaaaatataaatttgagtcaagaatttggtgaatacgatggtattccaaccgaatccttgatcagaggctaa

SEQ ID NO: 47619 - protein, 857 aa, Candida albicans SC5314
MIRQVNKKAISNGLFKRLSLSSSAFANITANKKSSTHQLNQKTQLTNVRFYSTKSTVIQLLNNIGSKREVEQYLKYFTSVSQQQFAVIKVGGAIITQQLNELASCLAFLYHVGLYPIVLHGTGPQINELLENEGVEPEYIDGIRITNPKTMEVVRKCFLEQNLRLVTALEKIGVHARPITAGVFEAEYLDKDKYQLVGKITSVNKSPIEAAINSGYLPILTSLAETSSGQLLNVNADVAAGELAREFEPLKIVYLNEKGGIINGNTGEKVSAINLDEEYEDLLKESWVKYGTKLKIKEIHDLLQHLPRSSSVAIIDVNDLQKELFTDSGAGTLIRRGYRLINRNSLRDFGNPDLLRNALLRDPEIKTGKVSVASYLKFLDSVQFKSYGDEPLEVLAIVVEQNDKIPKLDKFLSSKTGWLNNVTDNIFNAIKKDYSQLCWVVNENDANLPWYFSKSDGSFAKNGQILFWYGLNIDEASKLIKEFDSSSIGSSLSSSKESGVFTSAQQKRGFHHSTVRRNTNPNPPLSEGKQTERKKVALIGARGYTGQNLIKLIDNHPYLDISYVSSRELEGQKLQGYNKDNIVYSNLQIEDIKRLEENNEVDVWVMALPNGVCKPFVDTIDLVQNPNSKIVDLSADYRFDTTGEWTYGLPELNDRKTIAQAKKISNPGCYATAAQVAIAPLKEYISGTPSIFGVSGYSGAGTKPSPKNDVNLLSNNLIPYSLTDHVHEKEISSQLGLQVAFTPHVAQWFQGITHTINIPIKKGSLTSREIRNIYQDRYQGEKLITISGEAPLVKDISGKHGVVVGGFAVNSNEDRVVIVATIDNLLKGAATQCLQNINLSQEFGEYDGIPTESLIRG

SEQ ID NO: 47620 - DNA, 2727 bp, Ustilago maydis 521
  CDS (1)..(2727)
atgggtgtgcttgcagcccagcgatcgtccgctcgcggtctggctcgtgctaccgtcgctgctcagcgatggttgagcaccgcttcggctgcccgcgtcgctaccgcctcgtccgccgcttccactcaagtcgagtgctccaagcctcgtgctgctgccacgccagccgttcgatcctactcgagcgccgctgcccgtgagaacgcctacgacagggagacgatcaccaggctattgtactcgctcgcctcgcgcaaggaggtcgagaggtatctgcgcatcttctcggctgccgacaagttcgccgtcatcaaggtcggtggtgccatcctcacgcaccagcttgaggagcttgcactcagcctctcgttccttcaccgcatcggtctgtaccccatcgtcctgcacggtgctggcccgcagctcaacgaactgttggaaaaggagggcgtcgagccagactacattgacggtatccgaatcaccgatgccaagacgctgaaagtggctcgtcgaatcttcctcgaggagaacatgcgtctcgttgaaaagctcgagtcgctcggaagccgtgctcgcccgatccccatcggcaccttcaccgccgaatacctcgacaaggacaagtacggtcttgttggaaagatcaacaaggtggacaaggagcccatcgagagcgcaattcgagcgggctgcctgcccatcctcacctcgctcgccgtcaccaacgatggacagatcctcaacgtcaacgccgatgtggctgcctcggagctctccaagacgctcgagccgctcaagatcgtctacctgaacgagaagggtggtctgtaccacggcaagaccaaggaactcatggaggtcatcaacctcgacgaggagtacgccgacctgatgaaggaggagtgggtcaagtacggtaccaagctcaagctgcgtgagatgaaggagctgctcgaccaccttccacgatcttcgtcggtagccatcatctcggttgaccagctgcagaaggagctctttacggacagcggtgctggtacgctcatccgacgtggctacaagttgtaccgcaagaacagcatcgaggaggtgggtgccgagcgtatccgtcaggtcctcaaggagaacgacgacgagatcaaggatggtcgcaagtcggtggccgaattcttctccgagatctcgcagcacccttacacggtgtacggtgacgagccgtttgactgtgtcgccttcgtttcgcagcccgaaggcgaagtcgcgatcctgcagaagctcgtcacgacgcgcaacggtgttctgaacggcgtcaacgacaacatctggaagcagatccgcagggaccacaagcgtcttgtttggacgtcgcgtgctgacgatgaccagcgagcgtggcactatgaacgtgccgacggctcgttcacgcgcaacggccgctcgctcttctactacggcatccacgacgttgccgaggtggagagcatcgtgcgcaacctcgaggagaagagccgtatcgaacgcgcttatctgccgctcaagcctgccaagccgtcgtcgccgagtggtacgcgtgcctactcgaccatgtcgcgacccggcctcacgtcttggcgcatgatggccggctctcgtcgcggttacgcgaccgcagtcgaacgaagcgcgcgaattccggcgtcgactactgagaagaagcgtgttgctctgatcggcgctcgtggctacacaggtcagtcgctcatcgcgctgctcaacaaccacccgcacattcaactctcgcacgtgtcgtcgcgcgagttggcaggtatgccgctcaaagaatacacaaaggcacacgtcaactacaccaacattggcgtcgaagatctcaagaagctcgagcgcggcgagggacccggtgcgcctccggatgcctacatcatggctctgcccaatggcgtctgcaagccgttcgtagaggcggttcaggagggcggcaagaacaagcgcaacggtcacggtgtcattgtcgatctttccgccgactatcgcttccaagacgagtggacctacggtttgccagagatctatggacgtaggcaggttcgtgggtccaagttgatctcgaatccggggtgttatgcgacgaacaaccaggcgttgattgcgccgttgctgccggtgttggatcgttcggctgggcctacggtgtttggggtatctgggtactcgggagcgggcactaaggcgtccgagacgcctacgggcgagagaaagacggttcctaagatcagtgctgacgatcttgctggtggaattcgagcttatgcgcttaccgatcacatccacgagcgcgaagccacctaccacctctctcggctatcggcggatgctgtcaaagtcgcgtttatcccgcacgtcgcaccgtggttccaaggcatcatctcgaccgtctcggcgcctttgaaccagaaaatgtcgtccaagcagatcaaacaactctacgctgacttcttcgccaacgaacctctcgtgaaaatccaggaccaagtccccgaaatcaaggacatccaactccaacacggcatcaaactcggtggtttccaggtccacagcgacgccaaacgagtcgtcgtcgtaggcgtcatcgataacctcctcaaaggcgccgctacccagtgtctgcagaacctcaacatcgcccttggctacgacgagactgctggcatcccccacttgcagtag

SEQ ID NO: 47621 - protein, 908 aa, Ustilago maydis 521
MGVLAAQRSSARGLARATVAAQRWLSTASAARVATASSAASTQVECSKPRAAATPAVRSYSSAAARENAYDRETITRLLYSLASRKEVERYLRIFSAADKFAVIKVGGAILTHQLEELALSLSFLHRIGLYPIVLHGAGPQLNELLEKEGVEPDYIDGIRITDAKTLKVARRIFLEENMRLVEKLESLGSRARPIPIGTFTAEYLDKDKYGLVGKINKVDKEPIESAIRAGCLPILTSLAVTNDGQILNVNADVAASELSKTLEPLKIVYLNEKGGLYHGKTKELMEVINLDEEYADLMKEEWVKYGTKLKLREMKELLDHLPRSSSVAIISVDQLQKELFTDSGAGTLIRRGYKLYRKNSIEEVGAERIRQVLKENDDEIKDGRKSVAEFFSEISQHPYTVYGDEPFDCVAFVSQPEGEVAILQKLVTTRNGVLNGVNDNIWKQIRRDHKRLVWTSRADDDQRAWHYERADGSFTRNGRSLFYYGIHDVAEVESIVRNLEEKSRIERAYLPLKPAKPSSPSGTRAYSTMSRPGLTSWRMMAGSRRGYATAVERSARIPASTTEKKRVALIGARGYTGQSLIALLNNHPHIQLSHVSSRELAGMPLKEYTKAHVNYTNIGVEDLKKLERGEGPGAPPDAYIMALPNGVCKPFVEAVQEGGKNKRNGHGVIVDLSADYRFQDEWTYGLPEIYGRRQVRGSKLISNPGCYATNNQALIAPLLPVLDRSAGPTVFGVSGYSGAGTKASETPTGERKTVPKISADDLAGGIRAYALTDHIHEREATYHLSRLSADAVKVAFIPHVAPWFQGIISTVSAPLNQKMSSKQIKQLYADFFANEPLVKIQDQVPEIKDIQLQHGIKLGGFQVHSDAKRVVVVGVIDNLLKGAATQCLQNLNIALGYDETAGIPHLQ

SEQ ID NO: 47622 - DNA, 2775 bp, Cryptococcus neoformans var. neoformans B-3501A
  CDS (1)..(2775)
atgctccgacgttcccatatccctcgagctgccctcaatatcaatagggcacccgcagcccgtgcatttacaaagccctctctcccactctctgcctcttctcagctcaccaagaaggactccagcaacgtcctctttgagtttgacgcccacaaggtcggcaatgagatccgaaagaggggcttaggcaaccttttaggtgtacagagggaaggcggtatggatcgcgacactatcatccgtcttctttactctcttggatcacggcacgaagttgagcgatacctccgtatcttcactcaatcttccagggcctctcctggaggtgttcttcccgaagccaagtttgctgtcctcaagatcggaggcgccatccttagcaacgagctcgacgatcttgccctttccctctctttcttaaacaggcttggtcttttccctgtggttctccatggtgctggtcctcagctcaacgagatccttgagtctgagggtgttatccccgactacgaggacggtatccgtatcaccgacgcaaagactcttgctattgctcgtcgagttttcctccaagagaatctcaagctcaccactgcccttgagcgtctcggtacccgtgctcgacccatccctaccggtgttttcactgctgactacctcgacaagtccaagtatggtctcgtcggcaagattacccgtgtcgacaaggcccccatcgaggctgccattaaggcaggatgcttgcccatcttgaccagtttggctgagaacgccgagggtcagatcttgaacgtcaatgccgacgttgccgccggtgagctcgcccgagttctcgagcctatgaagatcgtctacctcaacgagaagggtggtcttttccacggtgttactggcaagaagatttctaccatcaacctcgacgaggagtacgatgctcttatgaaggaatcctgggtcaagtttggcaccaagctcaagatccgagagatcaaggagctcctcgacacgcttccccgtacttcttctgttgccattatctctaccgacatgcttcaaaaggagctcttcactgacgccggcgctggcaccttgatccgacgaggctacaagctttataagcaaccctccgtcgaagccgttggcagcactcagctccgacaggtctttaccgagcgtgatccagaggtcgagtctggccgcaagtctgttgccgagatcttctccgagctcaagaacagccctcacaccatctacggcgacgagcctttcgacgttgtcgccgttgtctcccaccctgcgggtgagactcctgtgatgaccaagttccttccctcccgtaacggtatcctcaacaagattgtcgacaatgtctttgatgccatcaagaaggaccacaagcgtctcttctggacagccaaggccgacgatgagaaccgtgcctggcactttgagcgagcggacggcagctttacccgagccggcaggagcttgttctggtatggtgttcctaatgtgaaggaagttgagaggattattgagggttttgaagagaatggcaggattgagagggttttcttgcctgttggccctagcgtccctcctcacaggcgagccgctgccgcccctgccgccggtgctacccctgctggagctcgtgccttctccacttctacccgtcctcatctcgccggtacttccaacactggcgccaggggctacgctaccgttgctgacgctgctcctcgtaagcgagttgcccttattggcgcccgaggatacactggtcagaacctaatctctttgatcgacaaccacccccacctcgatctcactcatgtctcttctcgtgagcttgccggtctccccctcaaggactacaagaaatctgctgtcaactattccaacctttccgtcgaggacgtgggaaagatggccgaggcgaacgaggtcgatgcttgggtgatggctcttcccaacggcgtttgcaaaccctttgtggacgccattgacaaggcctcgaagaagggtggaaagagtgtgattgtggacctcagcgcggactacagatttgagaacgattggacttatggcttgccggaactctacggccgagaccttgtcaagcaagccaatcgagtttccaaccctggatgctacgccaccaatacccagcttttgcttgctcccttgatgcctcaccttgacaaggtgcagatgccctctgtctttggtgtttccggcttctccggtgccggtaccaagagtggtgagaaggatgccgagggcaggcccaagactgttcccaagatttctgctgaggacctcaagggcggtatccgtccctactcccttactgaccacattcacgagcgtgaagcctctcgacacctttcatctctcatcccttcctcgacaaaccctttctccctcgccttcattcccaacgtcgccccttggttctctggtatcgtgtccgttctcactgctcctctggacaagagcatgcgcgcgtccgaaatcatcgagttgtacgaggaaaagtacggcaaggagccgctcatccaggtacagaagactgtgcctgacgtgaccgaggtcatgggcaagcacggatggagggttggcggtgtccaggttcacagctcaggcaagagggtggttgttgttggcgctttagataaccttttgaagggtgctgccactcaggcaatgcagaacctgaaccttgccctcggctacgaggagcttgccggtgttcccaccgacaagttctga

SEQ ID NO: 47623 - protein, 924 aa, Cryptococcus neoformans var. neoformans B-3501A
MLRRSHIPRAALNINRAPAARAFTKPSLPLSASSQLTKKDSSNVLFEFDAHKVGNEIRKRGLGNLLGVQREGGMDRDTIIRLLYSLGSRHEVERYLRIFTQSSRASPGGVLPEAKFAVLKIGGAILSNELDDLALSLSFLNRLGLFPVVLHGAGPQLNEILESEGVIPDYEDGIRITDAKTLAIARRVFLQENLKLTTALERLGTRARPIPTGVFTADYLDKSKYGLVGKITRVDKAPIEAAIKAGCLPILTSLAENAEGQILNVNADVAAGELARVLEPMKIVYLNEKGGLFHGVTGKKISTINLDEEYDALMKESWVKFGTKLKIREIKELLDTLPRTSSVAIISTDMLQKELFTDAGAGTLIRRGYKLYKQPSVEAVGSTQLRQVFTERDPEVESGRKSVAEIFSELKNSPHTIYGDEPFDVVAVVSHPAGETPVMTKFLPSRNGILNKIVDNVFDAIKKDHKRLFWTAKADDENRAWHFERADGSFTRAGRSLFWYGVPNVKEVERIIEGFEENGRIERVFLPVGPSVPPHRRAAAAPAAGATPAGARAFSTSTRPHLAGTSNTGARGYATVADAAPRKRVALIGARGYTGQNLISLIDNHPHLDLTHVSSRELAGLPLKDYKKSAVNYSNLSVEDVGKMAEANEVDAWVMALPNGVCKPFVDAIDKASKKGGKSVIVDLSADYRFENDWTYGLPELYGRDLVKQANRVSNPGCYATNTQLLLAPLMPHLDKVQMPSVFGVSGFSGAGTKSGEKDAEGRPKTVPKISAEDLKGGIRPYSLTDHIHEREASRHLSSLIPSSTNPFSLAFIPNVAPWFSGIVSVLTAPLDKSMRASEIIELYEEKYGKEPLIQVQKTVPDVTEVMGKHGWRVGGVQVHSSGKRVVVVGALDNLLKGAATQAMQNLNLALGYEELAGVPTDKF

SEQ ID NO: 47624 - DNA, 1056 bp, Prochlorococcus marinus str. AS9601
  CDS (1)..(1056): transl_table=11
atgaatgttgcaattgtaggtgctactggttacggcggtattcaagcggtaaatcttttaaagaaaataaaaaaatacaaaatttcatttttaggaggtaataaaacatctggatcaaagtggaatgaaaattttccttttatttatctagataatgatccctatatagaagaaatttctgtagataatatttcaaaaaatgcagatgttgctttgctttgcttaccaaatggactatcttcaacattgacaaggaaattattagatcggggacttaaagttattgatttatctgctgattacagatataagtctttagatgaatggaaaaatgtatattccaaagaagctgctatttataaaaggaatgatgacgatttatgtaaagaggcagtctacggtcttcccgaaataaataaagaagccatttcaaaaggaagattaattgcctgtccaggatgctatccaacatctgctcttattcctttagttccttatctttctcaaggaattattgaaaatgaaggtatagtaattgattctaaaagcggaacttctggtggtggtcgagaaccaaaccaaaagctacttttatcagaatgtggagaaggtctatcagcatatggattgattaaccatagacatacctcagagatcgaacaggtagcatctttaatatctggaaataaaattgaactgctctttactccacatttggtaccgatatcaaggggtatgcattcgactatatatgggagattaagagatccaggattaacttctgatgattgcagaattcttttggataattattatagaaatttcaaaaatattaaggtcttacctgtagatacattcccatcaacaaaatgggttaaaaatacaaaccaaattttcctttctgttaaagtcgatattcgaaatgggaggattattattttatctgcaattgataatttgttaaaaggtcagactgggcaagcaattcaaaatttaaatcttatgagtggattttcaatggatgaaggtcttgatttaactaataattttccataa

SEQ ID NO: 47625 - protein, 351 aa, Prochlorococcus marinus str. AS9601
MNVAIVGATGYGGIQAVNLLKKIKKYKISFLGGNKTSGSKWNENFPFIYLDNDPYIEEISVDNISKNADVALLCLPNGLSSTLTRKLLDRGLKVIDLSADYRYKSLDEWKNVYSKEAAIYKRNDDDLCKEAVYGLPEINKEAISKGRLIACPGCYPTSALIPLVPYLSQGIIENEGIVIDSKSGTSGGGREPNQKLLLSECGEGLSAYGLINHRHTSEIEQVASLISGNKIELLFTPHLVPISRGMHSTIYGRLRDPGLTSDDCRILLDNYYRNFKNIKVLPVDTFPSTKWVKNTNQIFLSVKVDIRNGRIIILSAIDNLLKGQTGQAIQNLNLMSGFSMDEGLDLTNNFP

SEQ ID NO: 47626 - DNA, 1056 bp, Prochlorococcus marinus str. MIT 9515
  CDS (1)..(1056): transl_table=11
atgaatgttgcaatagttggtgctactggttacgggggaatacaatcagtaaatttattaaaggataataaaaactacaaaatatcctatttaggagggtataaaacttcaggaacaaaatggagtgataattttccatttataaaattagactcgaataatttaattgaaaaaatatccatagacaggatcgctgataaagcagatgttgctttactttgcttaccgaatggaatttcttctactttaacaagaggtttattagaaaaaggtgtaaaagtaattgatttatcagccgattatagatacaagtctcttgaacaatggaaaagaatttactctaatgaagcggcaaaatataaaagagatgatgatgatttgtgtaaggaagcagtttatggtctccctgaaattaataataaagatatttctaaagcaaggttaatagcatgtcctggttgttatccaacttctgctctaattcctctaatcccctttttatctcaaggaattattgataatgagggcataataatagattctaaaagtggtacatcaggtggtggaagagaatctagtcaaaaattattattttcggaatgtggagatggcctttctgcatatggattaattaatcatagacatacttctgaaatagagcaaatcgcgagttttatttcaggtaacgatattgaactattattcactccgcatttattaccaatgataagaggtatgcattcgacaatatatggaagattaagagatccaggcttaacttcttctgattgtagaattatattagaaaatttctatagaaactattctaatattagagttttacctgttgatatttacccttccaccaaatgggtcaaaaatacaaacgaaattcacttatccgttaaagttgataatagaaatggaagaattattttattatcagtaatagataatttacttaaaggacaaacaggtcaagctatacaaaatcttaatcttatatctggtttaccattaaataatggattagaaatgattaatcattacccttga

SEQ ID NO: 47627 - protein, 351 aa, Prochlorococcus marinus str. MIT 9515
MNVAIVGATGYGGIQSVNLLKDNKNYKISYLGGYKTSGTKWSDNFPFIKLDSNNLIEKISIDRIADKADVALLCLPNGISSTLTRGLLEKGVKVIDLSADYRYKSLEQWKRIYSNEAAKYKRDDDDLCKEAVYGLPEINNKDISKARLIACPGCYPTSALIPLIPFLSQGIIDNEGIIIDSKSGTSGGGRESSQKLLFSECGDGLSAYGLINHRHTSEIEQIASFISGNDIELLFTPHLLPMIRGMHSTIYGRLRDPGLTSSDCRIILENFYRNYSNIRVLPVDIYPSTKWVKNTNEIHLSVKVDNRNGRIILLSVIDNLLKGQTGQAIQNLNLISGLPLNNGLEMINHYP

SEQ ID NO: 47628 - DNA, 1080 bp, Prochlorococcus marinus str. NATL1A
  CDS (1)..(1080): transl_table=11
atggcaaaaagtacatcgaaaactgggaggatcgcaattattggagcatctggatacggtggacttcaactagtcaagttgatcaatgagcatcctaatttcgagatttcaaccctaaatggtgagcgatcagtgggtaaaaactggaatgaaataaatccttttatgaaaattttgcaagataaaaagattactaaaagcaatattgacgaaatcgctcttgattctgattatgcaatattaagtcttcctaatggcttatcatcacagttaacacctttattgttaaaaaaaggtgttaaggtcctcgatttgtcggctgattatagatttaaatctcttgataaatggaaagaagtctatacaaaagaggcagcgaaatataaaagatatgactacgaattatgtgaagaggctatttatggtttttcagaagaatttagtagcgaaatctcaaagtcaagattaattgcctgtccaggttgctatccaactgcctcacttagtttacttattccatttttaaaacaaggtttaatagaaagtgaggggattattgttgatgcaaaatctggtacatctggtggtgggagaaatccaaatgagcaactattattgtctgaatgctctgaatcaattagcccctatggagttattggacataggcacacggctgaaatagaaaggattgccagtcattttgctggtcacgaagtcaatttacaattcactcctcatttagtgccaatggttagagggattttgtcgacagtttacgctcgtttaagagatcccggattaacagctgaagactgcaaaattgtaattgaagctttttataaagatcaaccatttattgatatcctgcctgtaggaatatatccagcaactaaatgggttaaaaatactaataaagttatgatttctgttgaagtagataaacgtaacggaagaattgttctaatgagtgttatagataatcttctaaaaggtcaagcaggacaggcagtccaaaatttaaatattatgcacggacttgaatcagatattggtcttcctaagattactttttatccttga

SEQ ID NO: 47629 - protein, 359 aa, Prochlorococcus marinus str. NATL1A
MAKSTSKTGRIAIIGASGYGGLQLVKLINEHPNFEISTLNGERSVGKNWNEINPFMKILQDKKITKSNIDEIALDSDYAILSLPNGLSSQLTPLLLKKGVKVLDLSADYRFKSLDKWKEVYTKEAAKYKRYDYELCEEAIYGFSEEFSSEISKSRLIACPGCYPTASLSLLIPFLKQGLIESEGIIVDAKSGTSGGGRNPNEQLLLSECSESISPYGVIGHRHTAEIERIASHFAGHEVNLQFTPHLVPMVRGILSTVYARLRDPGLTAEDCKIVIEAFYKDQPFIDILPVGIYPATKWVKNTNKVMISVEVDKRNGRIVLMSVIDNLLKGQAGQAVQNLNIMHGLESDIGLPKITFYP

SEQ ID NO: 47630 - DNA, 1041 bp, Clostridium thermocellum ATCC 27405
  CDS (1)..(1041): transl_table=11
atggcaagtgtaggaattataggagctaccggttatgttggaacagaaattgttcgacttcttcaaaatcatccggatataaacattacttctgtcgtatcccacaactttgcggggcagaagatatcggacatatacccaaatcttaagaatgtttttgaaatggaatgcgatgagcttgatatagataaaattgccgacaaagctgaagtgtttgtcactgcgcttcctcacggcatatcaaaggaagtgatacccaagcttgttgaaaaaggtaaaagaatagttgaccacagcggcgattttcgctacaagtctgttgaagtgtatgaaaaatggtacaacgctacccatggaatgccgcatcttttgaaactttcggcatatggtctgcctgagcttcacagagaagaaataaaaaatgcacagataataggcaatcccggctgttatccgacttgttcgatactggcgctggctccgttagtcaaaaacagacttgttgacacaaaaaatatcataattgacgcagcttccggagtttcgggagccggaagaaaaaccgatcttccctaccagttctgcgagtgtgacgaaaatttcaaagcatacagtgtttcaaaccacaggcatacctctgaaattgagcaggagctctctcttttggcagaagaggaaattaccgtttcgttcactcctcatcttgtaccaatgaaaagaggaatgcttgcaaccatttatgcaaatttgaactgtgaaaaatcaacatcggaattaattgagctgtataaggaatattataaaaatgaatattttgtgaggatactggatgaaggcaaacttcctgaaaccaaatttgtagccggatcaaactttattgacatcggtcttgttgtggataagcgtttaaacagggttgtcatcctctctgccattgacaatttgggcaaaggtgctgcaggtcaagccgtccaggttctcaatatattgttcgggcttcccgagcacagaggtctgaccaatcccggtttctacctataa

SEQ ID NO: 47631 - protein, 346 aa, Clostridium thermocellum ATCC 27405
MASVGIIGATGYVGTEIVRLLQNHPDINITSVVSHNFAGQKISDIYPNLKNVFEMECDELDIDKIADKAEVFVTALPHGISKEVIPKLVEKGKRIVDHSGDFRYKSVEVYEKWYNATHGMPHLLKLSAYGLPELHREEIKNAQIIGNPGCYPTCSILALAPLVKNRLVDTKNIIIDAASGVSGAGRKTDLPYQFCECDENFKAYSVSNHRHTSEIEQELSLLAEEEITVSFTPHLVPMKRGMLATIYANLNCEKSTSELIELYKEYYKNEYFVRILDEGKLPETKFVAGSNFIDIGLVVDKRLNRVVILSAIDNLGKGAAGQAVQVLNILFGLPEHRGLTNPGFYL

SEQ ID NO: 47632 - DNA, 1050 bp, Mycobacterium sp. JLS
  CDS (1)..(1050): transl_table=11
atgcaaactctatgcatgacttctgtcgcagtcgccggggccagcggatacgccggcggggagatcctgcgcctgctgctcgggcatcccgcctactccgacggccggctcaccatcggcgcgctgaccgctgcgggcagtgcgggcacgatgctcggtgaccaccacccccatctgctgccgctggccggccgggtgctcgaggccaccgacgccgagacgctgtccggccacgacgtcgtcttcctcggcctcccgcacggccactccgccgcgctggccgaacaactcggcgacgacacgctgatcatcgactgcggcgccgacttccggctcaccgacgcggccgcgtgggaacggttctacggttcggcgcacgccggcagctggccctacggcctgcccgaactgcccggtgcccgcgagcgcctcgccggagccaagcggatcgccgtgcccggctgctatcccaccgcggcgctgctggcgctgctgcccgccgtggccgaagacctcgtcgaaccggcggtcaccgtcgtggcggtcagcggtacctccggcgccgggcgggccgccaaacccgacctgctcggcgcggaggtgatcggatccgcgcgcgcctacaacgtcggcggcaagcaccggcacaccccggagatcgcgcagggcctgcgggccgtgacggacaaggacgtcacggtgtcgttcaccccggtgctgatccccacctcgcggggcatcctcgccacctgcaccgcccgcacttccgcgtcgctgtcgcagctgcgggccgcctacgagaaggcttacgacgcagaacctttcattcacctgctgcccgaggggcaactgcccaagaccggttcggtgatcggcagcaacgccgcgcagatcgcggtcgcgctcgacgaggatgcgcagacgttcgtcgcgatcgcggcgatcgacaacttgaccaaggggaccggtggggcggcggtgcagtcgatgaacctggcgctgggttggccggagaccgagggcctgtcgatcgtgggggtcgcgccgtga

SEQ ID NO: 47633 - protein, 349 aa, Mycobacterium sp. JLS
MQTLCMTSVAVAGASGYAGGEILRLLLGHPAYSDGRLTIGALTAAGSAGTMLGDHHPHLLPLAGRVLEATDAETLSGHDVVFLGLPHGHSAALAEQLGDDTLIIDCGADFRLTDAAAWERFYGSAHAGSWPYGLPELPGARERLAGAKRIAVPGCYPTAALLALLPAVAEDLVEPAVTVVAVSGTSGAGRAAKPDLLGAEVIGSARAYNVGGKHRHTPEIAQGLRAVTDKDVTVSFTPVLIPTSRGILATCTARTSASLSQLRAAYEKAYDAEPFIHLLPEGQLPKTGSVIGSNAAQIAVALDEDAQTFVAIAAIDNLTKGTGGAAVQSMNLALGWPETEGLSIVGVAP

SEQ ID NO: 47634 - DNA, 1035 bp, Clostridium difficile 630
  CDS (1)..(1035): transl_table=11
atgaataaaataaaagttggtattattggtgcaactggatatgtcggggcagagttgattagattattaatgaatcatgataaagtcgaagtgacagcgataggttcaaattcgtatgttggaaaagatatagttgatatatatccaagtataggatataaaaataacatgatatgtatagaaaatgaaaaagttatagatatgtgtgatgttgtatttacagcccttccacatggagttagtgaaaagtttgtaataaaagcaattaaatcgaaaaagaaagttatagatttaggtgctgactttagaataaaagatgaagaagtatatagtaaatggtatggagtatcttttatagataaaatcttacataaaaaagctgtatatggattaagtgaaatatacaaagaagatataaaagatgcagatataattgcaaatcctggatgttatccaactagtatttctttaccattgatgccattactaagttctaaattgataaaaaataataatataataattgattctaaatcaggtcttacaggtgctggtagagaattatcgattagtagtcactttacggaggttaatgaaaatatcactgcatataaaatagggaagcacagacatactccagaaatagaacaaaatttaagtgaatcctgcaaagaaaaagtaagtgtagtttttacaccaaacttaatcccagtaaataggggaatcttatcaactatatattgtacaaaagaagataatatttctataaatgatatacataggaaattaactgattattatgaatttaaagaatttatagaaattcttccattagataaggtagcttctttaaagaatgttagattctcaaataaatgtgtaatatcattacatgaaaatggagatacattgataatctgttcagctatagataatatgattaagggagcagcaggtcaagctatacaaaacatgaatataatatttggtattgaagaaaatacaggtttaaaaaatattgcaccatcattttag

SEQ ID NO: 47635 - protein, 344 aa, Clostridium difficile 630
MNKIKVGIIGATGYVGAELIRLLMNHDKVEVTAIGSNSYVGKDIVDIYPSIGYKNNMICIENEKVIDMCDVVFTALPHGVSEKFVIKAIKSKKKVIDLGADFRIKDEEVYSKWYGVSFIDKILHKKAVYGLSEIYKEDIKDADIIANPGCYPTSISLPLMPLLSSKLIKNNNIIIDSKSGLTGAGRELSISSHFTEVNENITAYKIGKHRHTPEIEQNLSESCKEKVSVVFTPNLIPVNRGILSTIYCTKEDNISINDIHRKLTDYYEFKEFIEILPLDKVASLKNVRFSNKCVISLHENGDTLIICSAIDNMIKGAAGQAIQNMNIIFGIEENTGLKNIAPSF

SEQ ID NO: 47636 - DNA, 1056 bp, Prochlorococcus marinus str. MIT 9301
  CDS (1)..(1056): transl_table=11
atgaatgttgcaatagtaggtgctacaggttacggcggtattcaagcggtaaatcttttaaagaaaaataaaaattacaaaatttcatttttaggaggtaataaaacatctggattaaaatggaatgataattttccttttatttatcttgataatgatccttatatagaagaaatttcagttgataatatttcaaaaaatgctgatgttgctttgctttgcttaccaaatggcttatcttcaacattgacaaggaaattattagataaaggacttaaagttattgatttatctgctgattatagatataagtctttagatgaatggaaaaaagtatattccaaagaagctgctatttataaaaggaatgatgatgatttatgtaaagaagcagtttacggtcttcctgaaataaataaagaagccatttcaaaaggaagattaattgcctgtccaggatgttatccaacatctgctcttattccattggctccttatctctctcaaggaattattgaaaatgaaggtatagttattgactctaaaagcggaacttctggaggtggtcgagaaccaaaccaaaagctactcttatcagaatgtggagaaggtctgtcagcatatggattgataaaccatagacatacctcagagatcgagcaagtggcatcattaatttctggaactaaaattgaactgctttttacacctcatttagtcccaatctcaaggggtatgcattcgactatatatgggagattaagagatccaggattaacttctgatgactgcaggattcttctggataattattatagaaattttaaaaatattaaagtcttacctgtagatacattcccatcaacaaaatgggttaaaaatacaaaccaaatattactttctgttaaagttgataatcgaaatggaagaataattatattgtctgtaattgataatttgttaaaaggtcagactgggcaggcaattcaaaatttaaatattatgagtggattttcaatggatgaaggtcttgatttaactaataattttccataa

SEQ ID NO: 47637 - protein, 351 aa, Prochlorococcus marinus str. MIT 9301
MNVAIVGATGYGGIQAVNLLKKNKNYKISFLGGNKTSGLKWNDNFPFIYLDNDPYIEEISVDNISKNADVALLCLPNGLSSTLTRKLLDKGLKVIDLSADYRYKSLDEWKKVYSKEAAIYKRNDDDLCKEAVYGLPEINKEAISKGRLIACPGCYPTSALIPLAPYLSQGIIENEGIVIDSKSGTSGGGREPNQKLLLSECGEGLSAYGLINHRHTSEIEQVASLISGTKIELLFTPHLVPISRGMHSTIYGRLRDPGLTSDDCRILLDNYYRNFKNIKVLPVDTFPSTKWVKNTNQILLSVKVDNRNGRIIILSVIDNLLKGQTGQAIQNLNIMSGFSMDEGLDLTNNFP

SEQ ID NO: 47638 - DNA, 1038 bp, Herminiimonas arsenicoxydans
  CDS (1)..(1038): transl_table=11
atgatcaaggttggcatcgtcggtggtaccggttatacgggcgtcgagttgttgcgtattttggcgacacacccggaagtcgaattgactgcaattacctcgcgtaaagaagatgggttgccggtttccgacatgtttccatcgttgcgcggtcgcgtcgatctggcgttttcatcgccggacaaagctaaattaactgaatgcgatgtggtcttttttgccacgccgcatggcgtggccatggcgcaggcaccggaattgctggcggccggcgtcaaggtgattgatctggctgccgacttccgcttgcaggacacggctgcgttcgagaagtggtacaagatgccgcacagctgtcctgagctgttgaaggaagctgcctatggcctggttgaactgaaccgggatgcgatccgcaaggcacgcatcgtcggcaatcccggctgttacccaaccaccatgcaactgggcttggcgccgctgttgaaggctgatgtgatcgatgcatcgcatttgatcgccgattgcaaatcaggcgtgtcgggtgccggtcgcaaggcggaagtgagcatgctgtttgcagaagcgggcgataacttcaaggcgtatggcgtatccggccacaggcattcgcctgaaacggtagaacgcctgcagatcttgaccgggcagaaggtcggtttgctgtttgcgccgcatctggtgccgatgatacgcggcatgcattcgacgatgtatgcgcgtctgacaaaagagatggacaacgccgccttgcaagccctgtttgaaaatgcctacgccagtgaacccttcgtcgatgtgatgccttttggttcgcatcctgaaacgcgttccacgcgcgcgtcgaatatgttgcgcatagccctgcatcgtccaaatgatggcgacaccatcgtgatcctggtggtgcaggacaatctggtaaagggcgcctctggccaggcggtgcaatgcatgaatttgatgttcggcctgccggaaaccaccggtttgctgcacgtgccggtgctgccgtaa

SEQ ID NO: 47639 - protein, 345 aa, Herminiimonas arsenicoxydans
MIKVGIVGGTGYTGVELLRILATHPEVELTAITSRKEDGLPVSDMFPSLRGRVDLAFSSPDKAKLTECDVVFFATPHGVAMAQAPELLAAGVKVIDLAADFRLQDTAAFEKWYKMPHSCPELLKEAAYGLVELNRDAIRKARIVGNPGCYPTTMQLGLAPLLKADVIDASHLIADCKSGVSGAGRKAEVSMLFAEAGDNFKAYGVSGHRHSPETVERLQILTGQKVGLLFAPHLVPMIRGMHSTMYARLTKEMDNAALQALFENAYASEPFVDVMPFGSHPETRSTRASNMLRIALHRPNDGDTIVILVVQDNLVKGASGQAVQCMNLMFGLPETTGLLHVPVLP

SEQ ID NO: 47640 - DNA, 933 bp, Herminiimonas arsenicoxydans
  CDS (1)..(933): transl_table=11
atgaaaaaacctaggatattcatagatgggcaggctggaaccaccggtctccaaattcaccaattgcttgccaacgacggcgatatcgatatcgtctcaatcgatgagtctgaccgtaaaaaagaacacgtgcgtcgacaacttctcaacgaagttgatgtggcgattttatgtttaccggacgacgcggcgaaagacgcggtatcttggatcaaaaacgatagcgtccgtgtgttagacgccagttcggctcatcgagtggcttcagggtgggtttatggttttccggaaatgcacccggaacaagcaagtcgtatcgctcaaggtcgtcgggtatcgaaccctggctgctatgcaacgggtgtgattgcacttttgaatcccttaattcaaaggggcttgcttgcgccggacacaccgataacggtcaacgcaatcagtggttacagcggtggtggcaaagcgatgatcgcttcctatgaaaccccttcaaatatgatgccggtgtttcgtccttatggcctgaattttcagcataagcacttgggagaaatgcaacaacactccgggctttctcgcccgcctttatttataccggcagtcggcacctttcgccaaggaatgctggtgcagataccattgccattatgggcctcgcgagttgctacgactccttatgatttgcataaaaaactttcggaacactatgaaaattccgccacagtatgcgtcgcaccattaattgaaggcacagcagcagattcggcaaacatcaatccggagagattcaacaatactaatatgctggaaatttctgtgtttggtgacactgcatcggagcaggcggtgctgatggcatgtttcgacaatttggggaaaggtgcttcaggtgccgcgattcagaatcttcgcttaatgctcggatcatcgtaa

SEQ ID NO: 47641 - protein, 310 aa, Herminiimonas arsenicoxydans
MKKPRIFIDGQAGTTGLQIHQLLANDGDIDIVSIDESDRKKEHVRRQLLNEVDVAILCLPDDAAKDAVSWIKNDSVRVLDASSAHRVASGWVYGFPEMHPEQASRIAQGRRVSNPGCYATGVIALLNPLIQRGLLAPDTPITVNAISGYSGGGKAMIASYETPSNMMPVFRPYGLNFQHKHLGEMQQHSGLSRPPLFIPAVGTFRQGMLVQIPLPLWASRVATTPYDLHKKLSEHYENSATVCVAPLIEGTAADSANINPERFNNTNMLEISVFGDTASEQAVLMACFDNLGKGASGAAIQNLRLMLGSS

SEQ ID NO: 47642 - DNA, 948 bp, Burkholderia vietnamiensis G4
  CDS (1)..(948): transl_table=11
atgaatcacgccactgtctacatcgacggcgatcaaggcacgaccggtttgcagatccacgagcgcctgcgcgatcgcaccgacctgcggctcgtcacgctgcccgatgccgagcgcaagaatcccgcgcggcgcgccgaagcgatcaacgcatcggacttcacgattctgtgcctgcccgacgcggccgcgcgtgaagcggtcggcttcatccgcaatccggccgtacgcgtgatcgatgcgagttcagcccatcgcaccgacccggagtgggtctacggctttcccgagatggccgccggacacgctcggaccatcgccggcgcgcggcgcgtgaccaaccccggctgctatccgaccggcgcgatcggcctgctgcggccgctgcagcaggccggactgctgccacgcgactatccggtgagcatccatgcggtgtcgggttactcgggcggcggccgggctgccgtcgacgcgttcgaatcgaacgacgctgcccgcgcgaaaccgctgcagatctacggcctcacgctcgcgcacaagcatgtgcccgaaatccagcaacatgccggcctcgcgcaccgaccgctgttcgtgccggcctacggtgcctatcgacagggcatcgtcctcaccgtgccgatcgagctgcgccttctgtccgccggcgtgaccggtgagacgctgcaagcctgtcttgcgcaccattacgccggcgcgcgccacgtcgacgtcatgccgctcgcggacacccgcgcgatcgcgcatctcgatccgcaagcgctgaacgggacgaacgacctgcggctcggtgtgttcgtcaacgaggagcacggccaggtgctgctgtccgcggtgttcgacaatctcggcaaaggagcgtccggcgcggccgtgcagaatctcgacctgatgctcggggcgatgagtgtggcgcaggggacgtga

SEQ ID NO: 47643 - protein, 315 aa, Burkholderia vietnamiensis G4
MNHATVYIDGDQGTTGLQIHERLRDRTDLRLVTLPDAERKNPARRAEAINASDFTILCLPDAAAREAVGFIRNPAVRVIDASSAHRTDPEWVYGFPEMAAGHARTIAGARRVTNPGCYPTGAIGLLRPLQQAGLLPRDYPVSIHAVSGYSGGGRAAVDAFESNDAARAKPLQIYGLTLAHKHVPEIQQHAGLAHRPLFVPAYGAYRQGIVLTVPIELRLLSAGVTGETLQACLAHHYAGARHVDVMPLADTRAIAHLDPQALNGTNDLRLGVFVNEEHGQVLLSAVFDNLGKGASGAAVQNLDLMLGAMSVAQGT

SEQ ID NO: 47644 - DNA, 951 bp, Burkholderia vietnamiensis G4
  CDS (1)..(951): transl_table=11
atgagcaccaaagtttttgtcgacggccaggaaggcaccaccggcctcaagatcttcgaatacctgtcggcgcgcaacgacatcgaaatcctgcgcatcgacgaagcgaagcgcaaggacgtcgacgagcgccgccgcctgatcaatgcatcggacgtcacgttcctgtgcctgccggacgtcgcatcgcgcgagtcggcctcgctcgtcgagaacccgaacacgacgctgatcgacgcgagcaccgcgttccgcaccagcgccgactgggcgtacggcctgcccgagctgacccgcacgcagcgcgacaagattcgcaacgcgaagcgcatcgcggtgccgggctgccacgcgtcggcgttcgtgctggcgatgcgcccgctcgtcgatgccagcatcgtcgccccgagcttcgccgcgcacagctactcgatcaccggctacagcggcggcggcaagtcgatgatcgccgactacgaaaacgcggcgccgggcggcaagctcgcgagcccgcgtccgtatgcgctcgcgctcgcgcacaagcatctgccggaaatggccgcgcacacgggcctcgcgcacgcgccgatcttcacgccgatcgtcgggccgttcctgaagggcctcgcggtcacgacctacttttcgccggagcagctcgcgaagcgcgcgacgccgcaggacgtgcagcgcgtgttcgccgagtactacgcggacgagccgttcgtgcgcgtcgcgccgttcaacgccgacgagaatctcgacagcggcttcttcgacgtgcaggccaacaacgacacgaaccgcgtcgacctcttcgtgttcggcaacgaagagcgcttcgtcacggtcgcccgcctggacaacctcggcaagggcgcatcgggcgccgcgatccagtgcatgaacctcaacatcggcgccgccgaggacaccggcctcaaacactga

SEQ ID NO: 47645 - protein, 316 aa, Burkholderia vietnamiensis G4
MSTKVFVDGQEGTTGLKIFEYLSARNDIEILRIDEAKRKDVDERRRLINASDVTFLCLPDVASRESASLVENPNTTLIDASTAFRTSADWAYGLPELTRTQRDKIRNAKRIAVPGCHASAFVLAMRPLVDASIVAPSFAAHSYSITGYSGGGKSMIADYENAAPGGKLASPRPYALALAHKHLPEMAAHTGLAHAPIFTPIVGPFLKGLAVTTYFSPEQLAKRATPQDVQRVFAEYYADEPFVRVAPFNADENLDSGFFDVQANNDTNRVDLFVFGNEERFVTVARLDNLGKGASGAAIQCMNLNIGAAEDTGLKH

SEQ ID NO: 47646 - DNA, 990 bp, Bradyrhizobium sp. ORS278
  CDS (1)..(990): transl_table=11
atgtccgtgatcgatagcaacccgccgaaggcacagaccgccaccggcaccgctgcccgctccgtcttcgtcgacgggggctcagggacgacgggtctcgggatcgccgagcggctcgcgcatcagagcgacatcgtcgtgaagaccattgctgacgacaagcgcaaggacccggccgccaagcaagagctgatggccgaggtcgacctcgtcatcctctgcctgccggatgatgcggccaaggagacggtcgccctggtcgacagcatgggcgcgtcggcgccgaaggtgctggatgcgtcgaccgcgtatcgcgtcgcgccggactgggcgtatggttttcccgagcttgccgccgaccaggccgacaagatccgcaacgcgcgcaaggtctccaaccccggctgctacccgaccggcggtatcgcgctgctgcggccgctggtcgatgcgggcctcttgccgcaggactatccgatcatggtgaacgccgtcagcggctattcgggcggcggcaagaccatgatcgcggcctatgagaacggcaccgcgccgcatttcgagctctatggcctcggcttggagcataagcacctgccggagctgcagctctattcgaagctgacgcggcggccgatcttcattccctcggtcggcaactaccgccagggcatgctggtctcggtgccgctgcaactcgagacgctgccgggcaagccgtcgggagcggacctgcatgccgccctggcgaagcactatgacggcagcaaatgcgtttcggtgatgccgctcgagagcgcggccaacacgagcggcaagctcgagcccgaagggctcaacgagaccaaccagctcgagctctatgtcttcgccagcgagaagcatcatcaggcggtgctggtggcgcggctcgacaatctcgggaagggcgcctcgggtgcggccgttcagaacatgcggctgatgctgggtctgcccgatctcgcctga

SEQ ID NO: 47647 - protein, 329 aa, Bradyrhizobium sp. ORS278
MSVIDSNPPKAQTATGTAARSVFVDGGSGTTGLGIAERLAHQSDIVVKTIADDKRKDPAAKQELMAEVDLVILCLPDDAAKETVALVDSMGASAPKVLDASTAYRVAPDWAYGFPELAADQADKIRNARKVSNPGCYPTGGIALLRPLVDAGLLPQDYPIMVNAVSGYSGGGKTMIAAYENGTAPHFELYGLGLEHKHLPELQLYSKLTRRPIFIPSVGNYRQGMLVSVPLQLETLPGKPSGADLHAALAKHYDGSKCVSVMPLESAANTSGKLEPEGLNETNQLELYVFASEKHHQAVLVARLDNLGKGASGAAVQNMRLMLGLPDLA

SEQ ID NO: 47648 - DNA, 975 bp, Bradyrhizobium sp. ORS278
  CDS (1)..(975): transl_table=11
atgagcattcgcgtcggcatcgtcggtatctccggttttggcggcggcgaggcgatgcgcctgatcgccgggcatcccgcgttcgagccggtctacgccgcgggcgagggcagcgccggccagcggctttcggagcgcttccccggcgtgcccgccaagctcgccgatctcgtgatcgagaagtgggacccttcgcgcctgccgcagctcgacgttctcttcgcctcgctccccaccggcgcctcgcgcgacgcgctggcgcgcatcccgcgcgaggtgaagatcgtcgacatcggcggcgaccaccgctatgccgacggctggacctacggcctcgccgacgtctggcccgaggcgatcgcgggcaagacccgcatcgccaatcccggctgcttcccggcggcggcgctgaccgcgctggcgccgctgctggccgacaggctgatcgcgcccgagaacatcgtgatcgacgccaagaccggcatttccggcgccggccgcggcggcggcgccggcttcggctacgccgagagcaacgagaacctgatcccctacggcctgctcaaacacgtccacatgcccgagatcgaaagcaccatcgcgcggatcagcggcggcagcgccgccggcctcgtgttcacgccgcatctggtgccgatgacccgcggcatcctcgccaccatctacgcccgcggccgcgccacgtcagaccagtgcctggacgccgcccgaagcttctacgccggccgtgccttcgtccgcgtcaccgacaagccgccgcagaccaaatgggccaccggctccaacctcgccttcgtcagctacgccgccgaccccgaccgcaatctggtgatcgcgctcggcgtcgtcgacaatctcggcaagggcgccgccgggcaggcggtgcagaacgcgaatttgatgtgcgggctgccggagacggcggggctggagggggcgccggtttggccgtga

SEQ ID NO: 47649 - protein, 324 aa, Bradyrhizobium sp. ORS278
MSIRVGIVGISGFGGGEAMRLIAGHPAFEPVYAAGEGSAGQRLSERFPGVPAKLADLVIEKWDPSRLPQLDVLFASLPTGASRDALARIPREVKIVDIGGDHRYADGWTYGLADVWPEAIAGKTRIANPGCFPAAALTALAPLLADRLIAPENIVIDAKTGISGAGRGGGAGFGYAESNENLIPYGLLKHVHMPEIESTIARISGGSAAGLVFTPHLVPMTRGILATIYARGRATSDQCLDAARSFYAGRAFVRVTDKPPQTKWATGSNLAFVSYAADPDRNLVIALGVVDNLGKGAAGQAVQNANLMCGLPETAGLEGAPVWP

SEQ ID NO: 47650 - DNA, 1026 bp, Dehalococcoides sp. BAV1
  CDS (1)..(1026): transl_table=11
atgaagaaatataaagcagggattataaacgtcaccggttatgcagggcttgagcttgcccgtattctggaaagccacccctcggtagagctttgttcggtaaccggcaggagtctggctggtaaaaaactttcggatgtatttccctatctgcatcgccttgatttgcctattactgaaaatctggaagggcaagtggatgttgcctttctggctctgcctcacaaagaaggggcagctttagtacccgctttgctggaaaaaggtatgcgggtaatagatatcagcgccgattttcgtttgaaagacccggctctgtatcaggcatggtacggatttgaacatccctgcccggggctcttggaggaagcggtgtatggtctgcctgagcttaagcgtaaggatattgccggcgcccgtctggtggcaaatccgggctgttaccctacctcagccatacttgggcttgtcccggcttttaaaagtgacctgatagagccaagtgccattatagatgccaagtccgggctttccggttcggggcgaacacccactgtaaaaaccatattttgcgaggctgacgaagatgtttgtgcctattccatcggcactcaccgtcatcagccggagatagctcaggagctttgccgcgccagcggaggggtaatcccgcgggttactttctgccctcatctggtacccatgagccggggtatactctcaactgcctatgcgcgtttgaaacagccggttacagacgaagaagtcaaagagatttaccgacagttttataaagatgaaccttttgtaaaagtaactgccgaaccaccccacacccgttatacccggggtactaatatgtgctttatatatccggtggtggatgccctgaatgaacagttgatagtcataagctgcatagataatctggtaaagggtgcggcggggcaggctgtacagaatatgaatattatgctgggtctggctgaaacggaaggccttgaagctatggccaccctgccttag

SEQ ID NO: 47651 - protein, 341 aa, Dehalococcoides sp. BAV1
MKKYKAGIINVTGYAGLELARILESHPSVELCSVTGRSLAGKKLSDVFPYLHRLDLPITENLEGQVDVAFLALPHKEGAALVPALLEKGMRVIDISADFRLKDPALYQAWYGFEHPCPGLLEEAVYGLPELKRKDIAGARLVANPGCYPTSAILGLVPAFKSDLIEPSAIIDAKSGLSGSGRTPTVKTIFCEADEDVCAYSIGTHRHQPEIAQELCRASGGVIPRVTFCPHLVPMSRGILSTAYARLKQPVTDEEVKEIYRQFYKDEPFVKVTAEPPHTRYTRGTNMCFIYPVVDALNEQLIVISCIDNLVKGAAGQAVQNMNIMLGLAETEGLEAMATLP

SEQ ID NO: 47652 - DNA, 1065 bp, Synechococcus sp. WH 7803
  CDS (1)..(1065): transl_table=11
atggtgaatcaacgggttgccgtggtgggtgcctcgggatacggagggctccaaaccttgcgcctcctcaaagagcacccctccttccaggtgagctttctggcgggcgagcgatcagcaggacgttcctggagtgagatctgcccctttctccctctcgagggtgatcgcgttgttgaagctgccgatccggagcgcatcgctgcaacgtcggacttcgccgttctgagcttgccgaacggtttggccagcaagttggtgcctcctctgctcgagcggggcgtgagggtcgtcgatctctcggcggactatcgctacaaatcgctggatcaatggtcttctgtctacgtgcaggaggccaggagctctgcgagaacagatcatgatctctgtcgggaagccatttacggcctgcccgaatggcatcagcaggacattgccgacgcgcgattggttgcagcacctggctgtttcccaacagcaagtctcctgcccttgctccccttcctcaagcagggattgatcgagagtgatggcttgatcattgatgccaaaacgggcacgtccggtggagggcgcgcagcgaaggagcacctgctgcttgctgaggcctccgaatcgattgccccttacggcgtgatcgggcaccgtcacacctctgaaatcgaacagttggccagcaacgtcgccggctgccccatccaacttcagttcacgccccaccttgtgccgatggtgcgtggacttctctcgactgtgtacgccaggctgagggatcccgggctgactgcagaagactgcaccacagtgctgcagaccgtttatcaggcccatccctgcgtcgaggttctgccagtgggcacctatccagcgacgaaatgggccaagcacacaaaccgcgccatgctttcggtgcaagttgatacacgcaccggtcgactcgtgctgatgagcgccgtggacaacctgctcaaaggccaggctggacagggtgttcagtgcctcaacctaatggcgggactcaagcccactgagggattgcccctgacgccgttctacccctga

SEQ ID NO: 47653 - protein, 354 aa, Synechococcus sp. WH 7803
MVNQRVAVVGASGYGGLQTLRLLKEHPSFQVSFLAGERSAGRSWSEICPFLPLEGDRVVEAADPERIAATSDFAVLSLPNGLASKLVPPLLERGVRVVDLSADYRYKSLDQWSSVYVQEARSSARTDHDLCREAIYGLPEWHQQDIADARLVAAPGCFPTASLLPLLPFLKQGLIESDGLIIDAKTGTSGGGRAAKEHLLLAEASESIAPYGVIGHRHTSEIEQLASNVAGCPIQLQFTPHLVPMVRGLLSTVYARLRDPGLTAEDCTTVLQTVYQAHPCVEVLPVGTYPATKWAKHTNRAMLSVQVDTRTGRLVLMSAVDNLLKGQAGQGVQCLNLMAGLKPTEGLPLTPFYP

SEQ ID NO: 47654 - DNA, 1005 bp, Klebsiella pneumoniae subsp. pneumoniae MGH 78578
  CDS (1)..(1005): transl_table=11
atgttaaatacgctgattgtgggtgccagtggttatgccggcgcagagctggtgacctatatcaatcgtcatccgcatatgaacataaccgctttgacggtctccgcgcaaagcaatgatgcggggaaattaatttccgacctgcatccgcagctcaaaggcattgtcgatatgccgctgcagccgatgtccgatatcagcgaattcagcgctggcgtggacgtggtgtttctcgccaccgcgcacgaagtgagtcacgatctggcgccgcagttccttgccgctggctgcgtggtgttcgatctctccggtgccttccgcgttaacgatggggcgttctacgaaaaatattacggtttcactcatcagcatcccgacctgctcaaacaggcggtgtatggtctggcggagtggagcgcggatgcgcttaaagacgcgcagttaatcgcagtgccaggctgctatccgacggcggcgcagctgtcgctgaagccgctgattgaggccaatctgctggatctcaaccagtggccggtaatcaacgctaccagcggggtgagcggcgcgggtcgtaaagccgcgatcggcaacagcttctgtgaagttagcctgcagccgtacggcatatttaaccatcgccatcagccggagattgccagccacctcggggcaaaggtaatttttaccccgcacctgggtaattttaagcgcggcatcctggaaaccattacctgccgcctgaagccgggcgtcggccatgcgcagatcgcggcggtttaccagcaggcttacgccgataaaccactggtacgtttatatgataaaggcgtgcccgctttgaaaaacgtcgaaggcctgccattctgtgatatcggttttgccgtgcaggacgatcatctcatcgtcgtcgcggcagaggataacctgctgaaaggcgccgcagcgcaggcggtgcagtgcgcgaatattcgtttcggcttcgctgagacgcagtctcttatttaa

SEQ ID NO: 47655 - protein, 334 aa, Klebsiella pneumoniae subsp. pneumoniae MGH 78578
MLNTLIVGASGYAGAELVTYINRHPHMNITALTVSAQSNDAGKLISDLHPQLKGIVDMPLQPMSDISEFSAGVDVVFLATAHEVSHDLAPQFLAAGCVVFDLSGAFRVNDGAFYEKYYGFTHQHPDLLKQAVYGLAEWSADALKDAQLIAVPGCYPTAAQLSLKPLIEANLLDLNQWPVINATSGVSGAGRKAAIGNSFCEVSLQPYGIFNHRHQPEIASHLGAKVIFTPHLGNFKRGILETITCRLKPGVGHAQIAAVYQQAYADKPLVRLYDKGVPALKNVEGLPFCDIGFAVQDDHLIVVAAEDNLLKGAAAQAVQCANIRFGFAETQSLI

SEQ ID NO: 47656 - DNA, 1095 bp, Kineococcus radiotolerans SRS30216
  CDS (1)..(1095): transl_table=11
atgcatgcctacccagcggcgtgtatggtcatgcacatggaaccggggaagcggctgtcggtcgccgtcgcaggagccagcggctacgccggcggcgaggtcctgcgcgtgctgctggaccacccgcacgtcgagatcggcgccctcaccggcgcctccaacgcgggaacccccctcggcgccctgcagccgcacctgccgccgctggccgaccgcgtcctgcagcccaccaccaccgaggtcctcgccggccacgacgtcgtcttcctcgccctgccgcacggcgcctcggccgaggtcgccgccgagctcggggacgacgtcctcgtcgtcgacctcggcgccgaccaccgcctcaccgaccccgcccgctgggcggagttctacggcggcacccacgccgggacctggccctacggcctgcccgagctgccgctcgccgggggcgggacccagcgggagaacctcgtcggcacccgccgcatcgcggtccccgggtgctacccgaccgcggtcagcctggccctggccccgggtctggccgccggcctgctggaacccgccgacgtggtcgtcgtggccgcctcggggacctccggggccggcaagagcctcaagccgcacctgctgggggcagaggtcatgggctcgatgagcccctacggcgtcggcggcgggcaccgtcacacccccgagatcgagcagaacctcgccctgtccgcgggggtgcccgtgcaggtgtccttcacccccaccctggccccgatgtcccgcgggatcctggccacctgcaccgcccggctcgcccccggcgccgccgccggcgacgtgcgggccgcctgggaacgggcctacgccgccgaacccttcgtgcacctgctccccgaggggcggtggccgtccacggcgtcggtcctggggggcaactcgtgcgcgatgcagctcgccgtcgacgagcgcgccggccgcgtcctcgtcgtcgccgccatcgacaacctcgtcaagggaaccgccggaggagccgtgcaatcggtgaacatcgccctcggactgccggagggcaccgggctgaccgccgcgggggtcgccccgtga

SEQ ID NO: 47657 - protein, 364 aa, Kineococcus radiotolerans SRS30216
MHAYPAACMVMHMEPGKRLSVAVAGASGYAGGEVLRVLLDHPHVEIGALTGASNAGTPLGALQPHLPPLADRVLQPTTTEVLAGHDVVFLALPHGASAEVAAELGDDVLVVDLGADHRLTDPARWAEFYGGTHAGTWPYGLPELPLAGGGTQRENLVGTRRIAVPGCYPTAVSLALAPGLAAGLLEPADVVVVAASGTSGAGKSLKPHLLGAEVMGSMSPYGVGGGHRHTPEIEQNLALSAGVPVQVSFTPTLAPMSRGILATCTARLAPGAAAGDVRAAWERAYAAEPFVHLLPEGRWPSTASVLGGNSCAMQLAVDERAGRVLVVAAIDNLVKGTAGGAVQSVNIALGLPEGTGLTAAGVAP

SEQ ID NO: 47658 - DNA, 1053 bp, Xanthobacter autotrophicus Py2
  CDS (1)..(1053): transl_table=11
atggcggacgcaaaggcaaggatcgcagttctcggcgcctcgggctacaccgggtccgagctggtgcgcctgctgctgcgccatccccgcgtggagctggtggccctcactgccgaccgcaaggccggccagaccatggccgaggtgttcccccagttcgccccgttcgcgttgccgaaactcgtgaccatcgacgaggtcgacttcacggccgtggacctcgtgttctgcgcgctgccccacgccaccacccagctcgtgatcaagaaggtgttcgacgccgcgcccaacgtgaaggtggtggacctctccgccgacttccgcctgaaggaccccggcgcctacgagcagtggtacggccacccccaccaggcgctggagctgcagcaggaggcggtgttcggcctcgtggagatctatcgcgacgacatccgcaaggcgcggctggtggccaatccgggctgtcattcctccaccgccatcctgcccatcgtgccgctgctggaagccggcgccatcgagccggaaagcatcgtggtggattccaagaccggcatgtcgggtgccggccgctccgccaaggaggccatgctgttctccgaggtgtcggaaggcatccatgcctacgccgtcaccggtcaccggcacatgggcgagctggaccaggaattctccaaggcggcgggccgtcccgtggcccccatgttcgtgccggtgctggcgcccatgaaccggggcatctacgccaccatcttcgtgcgcaccaccggggtgcgggccgaggacctgcattccatcctcgccgattattacaagggcgaacccttcgtccatgttctgccgttcgggcaggtgccccagtcgcgccatgtgcgcggctccaacatggtgttcctgggcgtggcggcggaccgcaaccccagccgggccatcctggtctcgaccctcgacaacctggtgaagggcgcctccggccaggcggtgcagaacatgaacctggtgctcggcttccccgagaccttgggcctcgaccagatcgccctcatgccctga

SEQ ID NO: 47659 - protein, 350 aa, Xanthobacter autotrophicus Py2
MADAKARIAVLGASGYTGSELVRLLLRHPRVELVALTADRKAGQTMAEVFPQFAPFALPKLVTIDEVDFTAVDLVFCALPHATTQLVIKKVFDAAPNVKVVDLSADFRLKDPGAYEQWYGHPHQALELQQEAVFGLVEIYRDDIRKARLVANPGCHSSTAILPIVPLLEAGAIEPESIVVDSKTGMSGAGRSAKEAMLFSEVSEGIHAYAVTGHRHMGELDQEFSKAAGRPVAPMFVPVLAPMNRGIYATIFVRTTGVRAEDLHSILADYYKGEPFVHVLPFGQVPQSRHVRGSNMVFLGVAADRNPSRAILVSTLDNLVKGASGQAVQNMNLVLGFPETLGLDQIALMP

SEQ ID NO: 47660 - DNA, 1065 bp, Desulfovibrio vulgaris subsp. vulgaris str. Hildenborough
  CDS (1)..(1065): transl_table=11
atgcagaccatccgcgccggactggtgggcgtcacggggtatacgggcatggaactggcccggcttctggctgggcaccccgccatgcggcttgtgctcgccacctcgcgcgccgaagcaggcagacgactcgacgacatctaccccttcctcatcgggttgccgggcggcgacatcaccatcgtcgcgcccgaccccgacgtcatcgccgcctcgtgcgacatcgcctttctcgccgtcccgcatggcgctgccatggagatggccgcctcgttgcgcgaacgcggattgcgcgtcgtcgacctttctgccgacttccgcctgcgcgatgtcactgtgtacgaaagctggtaccgcacagaccacacccgcaaggggcttctgcccgaagccgtgtacggtctgcccgaactctacggcaaggatgtggctcaggcagggcttgtagccaaccccggctgctaccccacctcggtcatcctcggccttgccgcggcgctggacaccgacatcgtccaccgcgacgacatcgtcatcgacgccaagtcgggcgcgtcgggcgccggtcgcaaggccgctgtgggttcgctcttctgcgaagtgcacgactcgttcaaggcctataaccttggcaaacaccgccataccccggagatagagcaggagctctcggtcatcgcgggcgaggcgctcacggtgtcgttcaatacgcacctgctgcccatcgaccgtggcatcctctccaccatgtacctgcgcatgaagaaaccgctcgacctcgatacggtgcatgccatgtacgccgactactgggccgcgcaccagacgcggggcggatgggtacggctgctgcccaagggacgcctgcccgagacgcgtcacgtgaagggcaccatgttctgcgacatcggcctcgtcgtcgacccccggacggggcgcctcatcgtcgtctctgccatcgacaacctgtgccgcggggcatccggacaggcagtggccaacgccaacatcatgctgggccttccggtggatgccggactcaggcttgcccccctcatgccctga

SEQ ID NO: 47661 - protein, 354 aa, Desulfovibrio vulgaris subsp. vulgaris str. Hildenborough
MQTIRAGLVGVTGYTGMELARLLAGHPAMRLVLATSRAEAGRRLDDIYPFLIGLPGGDITIVAPDPDVIAASCDIAFLAVPHGAAMEMAASLRERGLRVVDLSADFRLRDVTVYESWYRTDHTRKGLLPEAVYGLPELYGKDVAQAGLVANPGCYPTSVILGLAAALDTDIVHRDDIVIDAKSGASGAGRKAAVGSLFCEVHDSFKAYNLGKHRHTPEIEQELSVIAGEALTVSFNTHLLPIDRGILSTMYLRMKKPLDLDTVHAMYADYWAAHQTRGGWVRLLPKGRLPETRHVKGTMFCDIGLVVDPRTGRLIVVSAIDNLCRGASGQAVANANIMLGLPVDAGLRLAPLMP

SEQ ID NO: 47662 - DNA, 936 bp, Bartonella henselae str. Houston-1
  CDS (1)..(936): transl_table=11
atggcaacgaaagtttttattgatggtgaacatggaacaactggtttacagatacaaaagcgactagcgaagcgttcagatgtagaattactctctcttcctcatagagatcggtataatattgatattcgaaaagattattttaatcaaactgatattgctattttgtgtcttccagatgaagccgcgcgcgaaacagttcactggcttaaaaaaaataaaaaaattagaattattgatagctcaacagcccaccgtgttgcaccaaactgggtctatggttttcctgaaatgacagctggccaaaaagaacgtatccaagcagcacactacgtaaccaatcccggatgttaccctaccggtgcaattagcttgattcgccccctacgtgaagcaggcctgctagacgcttattatccaatatcaattaacgcaatatctggttatactggtggcggtagaaaattaattgcacaaatggaaaatcaatctcgacaagatgacgttcgagaaaattatttcatctatggcctcaaccttaaacacaaacatgtgccagaaattaaaatccatgggcaaatcagccacacacccatttttgtaccaagtgttggtcgttttcctcaaggaatgattgtaaatattccactgcatcgccatttatttacaaaatcagcaaattcttctgatatacacgaaattcttgcaaatcattacgatggacaaaacatgatttcaattgcgtcacaaaaagaaactgattcgcttaataaactcaatccagaatgcttagcgcataaagatggtatgaaactgtttgtttttggcaatgacagcgaaggaattttcaatctctgtgccatattcgacaatttagggaaaggtgcctcagcagctgcaatccaaaatctcgatttaatgctgtcacagagctaa

SEQ ID NO: 47663 - protein, 311 aa, Bartonella henselae str. Houston-1
MATKVFIDGEHGTTGLQIQKRLAKRSDVELLSLPHRDRYNIDIRKDYFNQTDIAILCLPDEAARETVHWLKKNKKIRIIDSSTAHRVAPNWVYGFPEMTAGQKERIQAAHYVTNPGCYPTGAISLIRPLREAGLLDAYYPISINAISGYTGGGRKLIAQMENQSRQDDVRENYFIYGLNLKHKHVPEIKIHGQISHTPIFVPSVGRFPQGMIVNIPLHRHLFTKSANSSDIHEILANHYDGQNMISIASQKETDSLNKLNPECLAHKDGMKLFVFGNDSEGIFNLCAIFDNLGKGASAAAIQNLDLMLSQS

SEQ ID NO: 47664 - DNA, 1035 bp, Staphylococcus aureus subsp. aureus MRSA252
  CDS (1)..(1035): transl_table=11
atgatgattaaagtaggtatcgttggcggtagcggttatggcgcaattgaattaattcgattattacaaacacatcctcatgtaacgattgcacacatctactcacattcaaaagtagatgagccgttgaaattaacatttccacatttacaacatattatgcaacatttcgaagcacttacagtggacaataatgactgtgatgtaattttctttgctacaccagcacccgtgagtaaaacatgtatccctcctttagtagaaaaaggaattcatgttattgatttatctggtgcattcagaattaaaaaccgtgaaatatatgaagcatattacaaagaaactgctgcagcacaagatgatttgaatcatgctatttacagcatttcagaatggcaatctttagataacaatggaacgaaactcatttctaaccctggctgtttccctacagcaacgttattagcattacatccacttattagcgaaaaaattgtagatttgtcatctattattattgatgctaagaccggcgtgtcaggtgctggtcgttcattatcacaacgtgttcatttttcagaaatgaatgaaaatctaagcgcttatgcaatcggaaaccataaacacaaaccggaaatcgagcaatatttatctatcattgcgggtcaagatgtatcagtcatatttacaccacatctcgtaccaatggcacgaggtattttatcaacaatatatgtcaaattatcatctgaatatacgactgaatcattacataaattaatgacctcttattatgctaatcagccatttgtcagaattagagatattgggacttttccaaccacaaaagaagtactcggtagtaactactgcgatatcggtatctatgtagatgaaacaacgcaaacagcaattttagtatcagtgattgataaccttgtcaaaggggcaagtggtcaagccattcaaaacttaaatatattatatgattttgaagttacgactggcctaaaacaatcaccagtttatccataa

SEQ ID NO: 47665 - protein, 344 aa, Staphylococcus aureus subsp. aureus MRSA252
MMIKVGIVGGSGYGAIELIRLLQTHPHVTIAHIYSHSKVDEPLKLTFPHLQHIMQHFEALTVDNNDCDVIFFATPAPVSKTCIPPLVEKGIHVIDLSGAFRIKNREIYEAYYKETAAAQDDLNHAIYSISEWQSLDNNGTKLISNPGCFPTATLLALHPLISEKIVDLSSIIIDAKTGVSGAGRSLSQRVHFSEMNENLSAYAIGNHKHKPEIEQYLSIIAGQDVSVIFTPHLVPMARGILSTIYVKLSSEYTTESLHKLMTSYYANQPFVRIRDIGTFPTTKEVLGSNYCDIGIYVDETTQTAILVSVIDNLVKGASGQAIQNLNILYDFEVTTGLKQSPVYP

SEQ ID NO: 47666 - DNA, 1125 bp, Propionibacterium acnes KPA171202
  CDS (1)..(1125): transl_table=11
gtgcggggtggccgttctcgatcacattgtgagtcggggttggtctcgtgggcgatcgagtgtataaatatgcacatgagcgcaaaaggattcactgttgccgtcgccggagcttccgggtatgcgggagccgaagtcgtgcgcctgctgtcagggcatcccgcgtttacgatgggagatcttgctgcgcacagccaggctggacttccattggcgcacgtcatgcctcaccttgtcggtgtggctaaggagcgaaccctttccgagatcgacgttgagcgtctcgcctcccacgacgccgtcgtgctggccttgcctcatggggcttccgggcagattgtccaggagcttgtgaagatgaatcccgaccttgtcatcgtcgatgctggagcggactttcggttgttatcagcgtcagactggcagcgttggtacggcagtgaccacgctggtacctggacgtatggacttcccgagctgccacgagctgagggcggctcgcaacgtgacatgctgtcaggtgcaacccgcatcgctgcgccagggtgcaatgcctccgcggttgccctgggactggcacccctcgtcggccttgttgacatttctcagtcgacagccacccttatagttgggacatccggtgctggaaaatccagtcgtccagatctcacattctcccgaatgagtgggggagcccatccctattcggttggtaacgctcatcgtcacattcctgaaattctgcagtcacttcgcatggcgggagctgagaaaccgcacctgagcgttagcgccgtgctggtgccgatgacccggggaattctcgccgtgtgcaccgcaccatcacaggcttcctctgatgatttactcgcgcggttgcgcgaggtctatggtgacgagccactcattcacgtcactaacgcctaccccgatacccatgacgtcgtcgggtccgctatgacgcacatcaatgctgtgggcgatcctgataacggccttgccaccatcgttgtcgctctggacaaccttgttaaagggacggctggtgccgtcattcaatgtctcaacgtggcctttggtctccccgagactacggggttgcctctcattggtcttaatccgtga

SEQ ID NO: 47667 - protein, 374 aa, Propionibacterium acnes KPA171202
MRGGRSRSHCESGLVSWAIECINMHMSAKGFTVAVAGASGYAGAEVVRLLSGHPAFTMGDLAAHSQAGLPLAHVMPHLVGVAKERTLSEIDVERLASHDAVVLALPHGASGQIVQELVKMNPDLVIVDAGADFRLLSASDWQRWYGSDHAGTWTYGLPELPRAEGGSQRDMLSGATRIAAPGCNASAVALGLAPLVGLVDISQSTATLIVGTSGAGKSSRPDLTFSRMSGGAHPYSVGNAHRHIPEILQSLRMAGAEKPHLSVSAVLVPMTRGILAVCTAPSQASSDDLLARLREVYGDEPLIHVTNAYPDTHDVVGSAMTHINAVGDPDNGLATIVVALDNLVKGTAGAVIQCLNVAFGLPETTGLPLIGLNP

SEQ ID NO: 47668 - DNA, 1041 bp, Desulfotalea psychrophila LSv54
  CDS (1)..(1041): transl_table=11
atgataaaaatagcaattattggagcctccggctacaccggcgtagagctctctcgtcttctctgtaatcatcctcaggttgaaattacggcagtaacttcccgccaatatgctggggttgccctctctgaagtcttccccaatctacggggcagaacatcactgatctgtgaaaatctcaccattgaagagctgtgcctgagggcagatcttttctttgccgctgttccccataaaacggccatgaacatcgttccgcagttattggcagcgggcaaaaaggttatcgacctctctgccgatttcagactcaacagtgcggctgtctatgaggagtggtaccaggaacattctgccaaggaatttctaagccaggcggtctacggcctccctgaactctaccgagagcagattgcaaagacacaactccttgccaatccaggttgctatcctacctcaatcatactgggcatggcccccctgcttcgagccggaattattaaacctcaatctattattgccgattccaaatccggcaccaccggtgctggtcgcggggcaaaggtgggatcgcttttctgtgaggtaaacgatggcttcaaggcatatggagtgggaagaaaacaccgtcataccccggaaattgagcaggagctgggaaaacttgcaaatacggacttcaatataacctttactcctcatctattacccatttcccgtggaattctcagtactatctacgccgatctcaattgcgagatagaggcagacgaggtacaggcactctatgaagagatgtataaagatgagccctttgttcgagtgctaccactgggcagtgcccccgccacccaatatgtgcgaggttcaaactactgcgacataggttttgccatcgatcaaaccactggacgtattattgttatgtctgccattgataatgtggtcaagggagcagcaggacaggctgtacaaaacatgaatatcatgtgcggctttgcggaacaagaaggccttgaaatcgtacccctctttccataa

SEQ ID NO: 47669 - protein, 346 aa, Desulfotalea psychrophila LSv54
MIKIAIIGASGYTGVELSRLLCNHPQVEITAVTSRQYAGVALSEVFPNLRGRTSLICENLTIEELCLRADLFFAAVPHKTAMNIVPQLLAAGKKVIDLSADFRLNSAAVYEEWYQEHSAKEFLSQAVYGLPELYREQIAKTQLLANPGCYPTSIILGMAPLLRAGIIKPQSIIADSKSGTTGAGRGAKVGSLFCEVNDGFKAYGVGRKHRHTPEIEQELGKLANTDFNITFTPHLLPISRGILSTIYADLNCEIEADEVQALYEEMYKDEPFVRVLPLGSAPATQYVRGSNYCDIGFAIDQTTGRIIVMSAIDNVVKGAAGQAVQNMNIMCGFAEQEGLEIVPLFP

SEQ ID NO: 47670 - DNA, 1047 bp, Symbiobacterium thermophilum IAM 14863
  CDS (1)..(1047): transl_table=11
atgacgatacgcgtgggaatcgccggagccaccggctataccggcgtggaactggtccggctgctggcgcagcacccggaggcggaggtggtggtggccggcaccgagagctaccagggacagcacctcgccgcggtctacccccacctgcgggagcgggtggacctggtcggacgggaagcctcgcccgaggccctggcggggtgcgacgtggtgttcacctccctgccccacggcctgaccatggccctggcgccggcggtgctcgcggccggcgggcggctgatcgacctgggggccgacttccggctgcgggacgtgaccgcatacgagcagtggtaccgaaagacccacaccgccccggacctcatggaagaggcggtgtacggcctgccggagctttaccgggagcggatccggggggcgcggctggtcgggaaccccggctgttaccccacggcctgtgcgctcgcagccgcgccgctgcttcaggccggcgtggtggagacggaggggatcatctttgacgccaagtccggcgtgtccggcgccgggcgcggggtcaacctcggcgtccacttctcagaagtcaacgagaacttcaaggcctacaacatcgccgggacccaccggcacacgcccgagatcgagcagaccctctcggacctggccggccggcccgtggtggtgagcttcacgccgcacctggtgcccatgacccgggggatcctcgccaccgggtacttcacactgaaggcggagcgtaccaccgagcagctggtggacctgttccgggagttctacgccggggagcccttcgtccgggtgcgcccggcgggcgaactgcccaccaccaaacaggtctggggttccaactactgcgacatcggcctgcaggtggacccgcgcacccgccgggtgctggtcatcagcgtcatcgacaacctggtcaagggcgcggcgggccaggcgatccagaacatgaacctgctcttcggccttcccgagaccacgggactgctgaacgccggaccggtctacccttga

SEQ ID NO: 47671 - protein, 348 aa, Symbiobacterium thermophilum IAM 14863
MTIRVGIAGATGYTGVELVRLLAQHPEAEVVVAGTESYQGQHLAAVYPHLRERVDLVGREASPEALAGCDVVFTSLPHGLTMALAPAVLAAGGRLIDLGADFRLRDVTAYEQWYRKTHTAPDLMEEAVYGLPELYRERIRGARLVGNPGCYPTACALAAAPLLQAGVVETEGIIFDAKSGVSGAGRGVNLGVHFSEVNENFKAYNIAGTHRHTPEIEQTLSDLAGRPVVVSFTPHLVPMTRGILATGYFTLKAERTTEQLVDLFREFYAGEPFVRVRPAGELPTTKQVWGSNYCDIGLQVDPRTRRVLVISVIDNLVKGAAGQAIQNMNLLFGLPETTGLLNAGPVYP

SEQ ID NO: 47672 - DNA, 1038 bp, Bacillus cereus E33L
  CDS (1)..(1038): transl_table=11
atgaaggtcgcgattattggagcaactgggtatggaggtattgagttaattcggttattagaacaacatccatatttttcgatagcatctctccattctttttcacaagttggcgagtgtataacaaatgtatatccgcattttcaaaatgttcttgttcatacgttacaagaaattgatgtggaggaaatagggaaggaagcagaaattgtatttttagcaaccccagcaggagtatcagcagagttaactcccaaattattagcagtaggcttaaaagtaattgacctatctggagactttcgtatgaaagatcctttcatatatgaacagtggtataaaagggcagctgcaaaagaaggagtccttagggaagctgtatatgggttaagtgaatggaaaaggtccgaaattcaaaaggcaaatttaattgcaaatccaggatgttttgctacagctgcattattagcggtattaccgttagttcgtagcggcataattgaagaagattcaattattattgatgcgaaatcaggagtatctggagcaggtaaaacgccaacaacgatgactcactttcctgagttatacgataacttgcgtatttataaagtaaatgagcatcaacacgttcctgagattgagcaaatgctcgcggaatggaatagagaaacgaaggcaatcacgtttagtacacatttaataccgatatcacgtgggattatggttacactttatgcgaaagtaaagcgagaaatggaaatagaacaacttcaaaaattatatgaagaaacgtatgaacaatcagcttttgttcgaattcgcatgcaaggagagtttccaagtccgaaagaagtgaggggctcaaattattgtgatatggggatagcttacgatgaaagaacaggaagagtgacaattgtttctgttatagacaatatgatgaaaggtgcggctggtcaagcgattcaaaatgcaaatataatagcgggactagaagaaacaacaggtttacaatatatgccgctttatttataa

SEQ ID NO: 47673 - protein, 345 aa, Bacillus cereus E33L
MKVAIIGATGYGGIELIRLLEQHPYFSIASLHSFSQVGECITNVYPHFQNVLVHTLQEIDVEEIGKEAEIVFLATPAGVSAELTPKLLAVGLKVIDLSGDFRMKDPFIYEQWYKRAAAKEGVLREAVYGLSEWKRSEIQKANLIANPGCFATAALLAVLPLVRSGIIEEDSIIIDAKSGVSGAGKTPTTMTHFPELYDNLRIYKVNEHQHVPEIEQMLAEWNRETKAITFSTHLIPISRGIMVTLYAKVKREMEIEQLQKLYEETYEQSAFVRIRMQGEFPSPKEVRGSNYCDMGIAYDERTGRVTIVSVIDNMMKGAAGQAIQNANIIAGLEETTGLQYMPLYL

SEQ ID NO: 47674 - DNA, 1011 bp, Mannheimia succiniciproducens MBEL55E
  CDS (1)..(1011): transl_table=11
atggcacaaaaagcaatcgttatcggtgcaagcggatataccggtgcggagttggcgagaatcctgactcatcaccccgaattcgaacttgctggtttatatgtttcaaccaatagtgcggatgcaaacaaatctatttctacactctatcctcaactcaaaactatctgcgatttacctctgcaacctctgccggaagatttaacggaaatcgcacaaaacgccgatttggcttttttcggtacggcacatgaagtgagcgcgaatttagcgccggtttttctgcaaaataactgtaaagtttttgatctttcgggggcatatcgggtaaacagcgaatctttttatcaggaattttacggttttgaacacaaacatcccgaattgttaaaacaagcggtatatggtttggcggaatggaatgcggataagatcaaaactacggatttagttgctgttgccggttgctatccgacggtttctcagctaagtttaaaacctttaattgaggaaggtttactggatgttaaccaattgccggtgattaatgcggtgagcggtgtgagcggggccgggcgaaaagcttcgctgaccagcagtttctgcgaagtaagtttaaacgcctatggtgtgtttaaccatcgccatcaaccggaaatcgccactcatttgggtacggatgttatttttactccgcatttaggcaattttaaacgcggtattttggcgactatcaccgctaagttgaaagcgggtgtaagcgatgaacagatcaagcgggcttatgcaaaatattatgcgaataaaccgttggttcgtgtgtatgagcagggtttgccaagtattaaggcggtagaattcagcccgtattgcgatatcggttttgccactaaaaataaccatattattattgtgggcgcggaagataatttattaaaaggcgcggcggctcaagcagtacaatgcgctaacattcgttatggctacaatgaagttttaggattaatttaa

SEQ ID NO: 47675 - protein, 336 aa, Mannheimia succiniciproducens MBEL55E
MAQKAIVIGASGYTGAELARILTHHPEFELAGLYVSTNSADANKSISTLYPQLKTICDLPLQPLPEDLTEIAQNADLAFFGTAHEVSANLAPVFLQNNCKVFDLSGAYRVNSESFYQEFYGFEHKHPELLKQAVYGLAEWNADKIKTTDLVAVAGCYPTVSQLSLKPLIEEGLLDVNQLPVINAVSGVSGAGRKASLTSSFCEVSLNAYGVFNHRHQPEIATHLGTDVIFTPHLGNFKRGILATITAKLKAGVSDEQIKRAYAKYYANKPLVRVYEQGLPSIKAVEFSPYCDIGFATKNNHIIIVGAEDNLLKGAAAQAVQCANIRYGYNEVLGLI

SEQ ID NO: 47676 - DNA, 945 bp, Burkholderia mallei ATCC 23344
  CDS (1)..(945): transl_table=11
atgagcacgaaagtttttgtcgacggccaggaaggcacgaccggtctgaagatcttcgaatatctgttggcgcgcagcgacatcgacatcctgcgcatcgacgaagcgaagcgcaaggacgtcgacgagcgccgccgcctcatcaacgcgtcggacgtgacgttcctgtgcctgcccgacgtcgcgtcgcgcgaatcggcgacgctcgtcgagaacccgaacacgacgctgatcgacgcgagcaccgcgttccgcacgagcgccgactgggcatacggccttcccgagctgaaccgcgcgcagcgcgagcgcatccgtggcgcgaagcgcatcgcggtgccggggtgtcacgcgtcggcgttcgtgctggcgatgcgtccgctcgtcgacgcgggcgtggtcgcgccgggcttcgccgcgcacagctattcgatcacgggctacagcggcggcggcaagaagatgatcgccgattacgaagcgggcggcgcgaagctcgcgagcccgcgtccgtatgcgctcggcctcgcgcacaagcatctgccggagatggccgcgcatacgggcctcacgagcgcgccgatcttcacgccgatcgtcgggccgttctacaagggcctcgccgtcaccacgtacttcacgccgggccagctcgcgaagcgcgtgacgccgcaggacgtgcagcgcgtgctcgccgagcattacgcgggcgaggcgttcgtgcgcgtcgcgccgtacgacgcggccgagaatctcgacgatggcttcttcgacgtgcaggcgaacaacgacacgaaccgcgtcgacctgttcgtgttcggcacggcggaacgcttcgtcaccgtcgcgcggctcgacaacctcggcaagggcgcgtcgggcgccgcgatccagtgcatgaatctcaacgtcggcgcggccgaggatacggggctcgcgcgctga

SEQ ID NO: 47677 - protein, 314 aa, Burkholderia mallei ATCC 23344
MSTKVFVDGQEGTTGLKIFEYLLARSDIDILRIDEAKRKDVDERRRLINASDVTFLCLPDVASRESATLVENPNTTLIDASTAFRTSADWAYGLPELNRAQRERIRGAKRIAVPGCHASAFVLAMRPLVDAGVVAPGFAAHSYSITGYSGGGKKMIADYEAGGAKLASPRPYALGLAHKHLPEMAAHTGLTSAPIFTPIVGPFYKGLAVTTYFTPGQLAKRVTPQDVQRVLAEHYAGEAFVRVAPYDAAENLDDGFFDVQANNDTNRVDLFVFGTAERFVTVARLDNLGKGASGAAIQCMNLNVGAAEDTGLAR

SEQ ID NO: 47678 - DNA, 945 bp, Burkholderia pseudomallei K96243
  CDS (1)..(945): transl_table=11
atgagcacgaaagtttttgtcgacggccaggaaggcacgaccggtctgaagatcttcgaatatctgttggcgcgcagcgacatcgacatcctgcgcatcgacgaagcgaagcgcaaggacgtcgacgagcgccgccgcctcatcaacgcgtcggacgtgacgttcctgtgcctgcccgacgtcgcgtcgcgcgaatcggcgacgctcgtcgagaacccgaacacgacgctgatcgacgcgagcaccgcgttccgcacgagcgccgactgggcatacggccttcccgagctgaaccgcgcgcagcgcgagcgcatccgtggcgcgaagcgcatcgcggtgccggggtgtcacgcgtcggcgttcgtgctggcgatgcgtccgctcgtcgacgcgggcgtggtcgcgccgggcttcgccgcgcacagctattcgatcacgggctacagcggcggcggcaagaagatgatcgccgattacgaagcgggcggcgcgaagctcgcgagcccgcgtccgtatgcgctcggcctcgcgcacaagcatctgccggagatggccgcgcatacgggcctcacaagcgcgccgatcttcacgccgatcgtcgggccgttctacaagggcctcgccgtcaccacgtacttcacgccgggccagctcgcgaagcgcgtgacgccgcaggacgtgcagcgcgtgctcgccgagcattacgcgggcgaggcgttcgtgcgcgtcgcgccgtacgacgcggccgagaatctcgacgatggcttcttcgacgtgcaggcgaacaacgacacgaaccgcgtcgacctgttcgtgttcggcacggcggaacgcttcgtcaccgtcgcgcggctcgacaacctcggcaagggcgcgtcgggcgccgcgatccagtgcatgaatctcaacgtcggcgcggccgagggtacggggctcgcgcgctga

SEQ ID NO: 47679 - protein, 314 aa, Burkholderia pseudomallei K96243
MSTKVFVDGQEGTTGLKIFEYLLARSDIDILRIDEAKRKDVDERRRLINASDVTFLCLPDVASRESATLVENPNTTLIDASTAFRTSADWAYGLPELNRAQRERIRGAKRIAVPGCHASAFVLAMRPLVDAGVVAPGFAAHSYSITGYSGGGKKMIADYEAGGAKLASPRPYALGLAHKHLPEMAAHTGLTSAPIFTPIVGPFYKGLAVTTYFTPGQLAKRVTPQDVQRVLAEHYAGEAFVRVAPYDAAENLDDGFFDVQANNDTNRVDLFVFGTAERFVTVARLDNLGKGASGAAIQCMNLNVGAAEGTGLAR

SEQ ID NO: 47680 - DNA, 1047 bp, Methylococcus capsulatus str. Bath
  CDS (1)..(1047): transl_table=11
atgaggtcaggcaagccgatcgaagtcggcatcgtaggcgggaccggttacaccggtgtggaactgctgcgcctactggcgctgcacccgggcgtgcgcatccgcgccgtcacctcccgcgcagacgccgggaaggccgtcgccgatctctatccgaatctccggggccacgtggatgtcgtcttcaccgggcccgaggtggagaatctcggcggctgcgacgtggtgttcttcgctaccccccatggcatcgccatgcaatcggcgccggccttgctcgaacaaggcatcgtcgtcatcgacctgtcggcggatttccgcctcaaggatgcggacgaatgggcgcattggtatgggcaggagcacgcctgtcccgggctgctgagcgaagccgtctacggcctgccggaggttcgtcgcgaggcggtccgttcggcacggctgatcgccaatccgggctgttatcccaccgccgtccagctcggcctgctgcccttgctggaaaaccggctggtggcggcggaccggctcatcgccgacgtgaaatcgggcgtcagcggcgccggccgtaaggccgaggttccactgctgatgagtgaaaccggcgagagcttcaaggcctatgcggtggcgggccaccggcattggccggaaatcgtgcagggtctggtggaattggcgggggagccggtcgggctgaccttcgtgccgcatctcctgccgatgatccgtggcattcatgcaaccctctacgccgtgccggtcggcgagcccggcgacatccagcggctctacgaggagcgctactgcgacgagccgttcgtcgacgtgctgccgcccggcagccatccggacacgcgcgacgtgcgcggttccaaccgctgccagatcgcggtgttcgaactccggaggagcggccagatcgtggtgctgtcggtgatcgacaacctggtcaagggtgctgccggccaggcggtgcagaacatgaacctccgattcggtttcgcggaaaccaccggtctccaagccatcggcctgtatccatga

SEQ ID NO: 47681 - protein, 348 aa, Methylococcus capsulatus str. Bath
MRSGKPIEVGIVGGTGYTGVELLRLLALHPGVRIRAVTSRADAGKAVADLYPNLRGHVDVVFTGPEVENLGGCDVVFFATPHGIAMQSAPALLEQGIVVIDLSADFRLKDADEWAHWYGQEHACPGLLSEAVYGLPEVRREAVRSARLIANPGCYPTAVQLGLLPLLENRLVAADRLIADVKSGVSGAGRKAEVPLLMSETGESFKAYAVAGHRHWPEIVQGLVELAGEPVGLTFVPHLLPMIRGIHATLYAVPVGEPGDIQRLYEERYCDEPFVDVLPPGSHPDTRDVRGSNRCQIAVFELRRSGQIVVLSVIDNLVKGAAGQAVQNMNLRFGFAETTGLQAIGLYP

SEQ ID NO: 47682 - DNA, 918 bp, Silicibacter pomeroyi DSS-3
  CDS (1)..(918): transl_table=11
atgacatacaaggtcttcatcgacggcgaggccggcacgaccggcctgcaaatccgcgcccggctggaggggcgcgacgatatccggctgatcacgctgggcgacgccgaccgcaaggacacccgcgcccggctcgccgcctttgatgcggccgatgtcggcatcctctgcctgcccgatgcggcggcggtcgagatcgtggcacagctggctggcaccggcacccggctgatcgacgccagcaccgcgcatcgggtcgatcccggctgggtgttcggctttgccgagctggacaacgacctgcgcgcccggatcgccggtggacagttcgtctcgaacccgggctgctattccaccggcgccatcgcgctgctccatccgctggtcaaacgcgggttgatcgccgccgatcaggcgctcgccatcaatgccatcagcggctattctggtggcggcaaggcgatgatcgccgagtttgaaagcggcaagaccgatggcccctttgtctatgccaccgagcagcggcacaagcacctgcccgagatcgtcgcgcatgcgggcctgacccggcagccggtgttcgtgccctcggtcggcccctatgagcagggcatgatcgtacaggtgccgctgccctttgtcgaaccggggcagggcgctgcgatcgaggcggcgctggccgatcactatgccaccagccgctttgtctcggtggtttcgcctgaccattatggcgcgcgcatcgacccgcgccgcctgaacgggaccaaccagctggagctgtcggtgcatggcaatctcgacaccggtggcgcggtgctgctcgcgctgcttgacaatctgggcaagggcgcctcgggcgcggcggtgcagaacctcaacatcatgctgggtctggacgaggggctggggctgtga

SEQ ID NO: 47683 - protein, 305 aa, Silicibacter pomeroyi DSS-3
MTYKVFIDGEAGTTGLQIRARLEGRDDIRLITLGDADRKDTRARLAAFDAADVGILCLPDAAAVEIVAQLAGTGTRLIDASTAHRVDPGWVFGFAELDNDLRARIAGGQFVSNPGCYSTGAIALLHPLVKRGLIAADQALAINAISGYSGGGKAMIAEFESGKTDGPFVYATEQRHKHLPEIVAHAGLTRQPVFVPSVGPYEQGMIVQVPLPFVEPGQGAAIEAALADHYATSRFVSVVSPDHYGARIDPRRLNGTNQLELSVHGNLDTGGAVLLALLDNLGKGASGAAVQNLNIMLGLDEGLGL

SEQ ID NO: 47684 - DNA, 1026 bp, Dehalococcoides ethenogenes 195
  CDS (1)..(1026): transl_table=11
atgaaaaaatataaagcaggtattataaacgtaaccggttatgccgggctggagcttgcccgtattttggcaagccacccctcggtggagctttgttcggtaaccgggcggagtctggccgggaaaaagctttcggatgcatttccttacctgcacagccttgatttacctattactgaaagtctggaaggggaagtggatattgcctttatggccttgccccacaaggaaggggcgtcactggtacctgatttgctctcaaagggtatgcgggttatagatatcagcgctgatttccgcctgaaagaccctccactgtatcaggcatggtacgggtttgagcatccctgtccggagcttcttgccgaagcggtgtatggtctgcctgaacttaagcgcaaggatattgccagtgcccgtctggtggcaaacccgggctgttaccccacctctgccatactcgggctggccccggcttttaaaatggacctgatagagccaaatgccattgtagatgccaagtccgggctttccggttcagggcggacacctactgctaaaaatatattttgtgaagccagcgaagatgtttgcgcttattccattggcactcaccgccaccagccggaaatagtgcaggagctttctctggttggcgggggagtaatacctcgggttactttctgcccccatctggtacccatgagccggggtatactttccagtgcctatgcccgcttgaaacagccggttacagacgaagaagtcaaagagatttaccgccgtttttacaaagacgagccttttgtaaagataaccgccgagccgccccacacccgttatacccgcggtaccaatatgtgctttatttacccggtggtagatgccctgaatgaacggctgatagtcataagctgtatagataatctggtaaaaggtgcggcaggacaggctgtacagaatatgaatattatgctgggactatctgaagataccggcctcaaagctatagctgccctgccctag

SEQ ID NO: 47685 - protein, 341 aa, Dehalococcoides ethenogenes 195
MKKYKAGIINVTGYAGLELARILASHPSVELCSVTGRSLAGKKLSDAFPYLHSLDLPITESLEGEVDIAFMALPHKEGASLVPDLLSKGMRVIDISADFRLKDPPLYQAWYGFEHPCPELLAEAVYGLPELKRKDIASARLVANPGCYPTSAILGLAPAFKMDLIEPNAIVDAKSGLSGSGRTPTAKNIFCEASEDVCAYSIGTHRHQPEIVQELSLVGGGVIPRVTFCPHLVPMSRGILSSAYARLKQPVTDEEVKEIYRRFYKDEPFVKITAEPPHTRYTRGTNMCFIYPVVDALNERLIVISCIDNLVKGAAGQAVQNMNIMLGLSEDTGLKAIAALP

SEQ ID NO: 47686 - DNA, 969 bp, Bacteroides fragilis NCTC 9343
  CDS (1)..(969): transl_table=11
atgataaaagcaggaatcattggtggagcaggatatacagcaggcgaacttatccgcctgcttatcaatcatcccgagactgaaatcgtatttatcaacagtaccagtaacgccggaaacaaaattactgatgtacacgagggactttacggagagtgtgacctggcttttacagacgaacttccgttggaagacatcgatgtactgttcttctgtacagcccatggggatacgaagaaatttatggaaagccataatatcccggaggaactgaaaattatagacctttcaatggattatcgcatagcttcaccggatcatgacttcatatacggtctgccggaactaaatcgtcgtgcaacctgcacagcaaagcatgtggctaatccgggatgtttcgcaacttgcatccagctgggactgctcccactggcaaaacacctgatgctaaatgaggacgtaatggtaaacgccattacaggaagcacgggagcgggagtaaaacccggtgcaaccagtcatttcagctggcgtaacaacaatatgagtgtatacaaagctttcgaacaccagcacgttcctgaaatcaagcaatcgctgaaacaactccagaacagttttgatgcggaaattgattttatcccttatcgcggcgatttcccccgcggcatctttgccactttggtagtgaaaacaaaagtagcattggaagagatcgtacgcatgtatgaggaatattatgccaaagattcgtttgtccacatcgttgataaaaacatagatctcaaacaggtagtaaataccaataaatgtctgattcacctggaaaaacacggcgataaattactgatcatttcttgcatcgacaatttattgaaaggtgcatccggacaggctgtccacaacatgaacctgatgtttaacctggaggaaacggtaggcctgcgcctcaagccctctgcattctaa

SEQ ID NO: 47687 - protein, 322 aa, Bacteroides fragilis NCTC 9343
MIKAGIIGGAGYTAGELIRLLINHPETEIVFINSTSNAGNKITDVHEGLYGECDLAFTDELPLEDIDVLFFCTAHGDTKKFMESHNIPEELKIIDLSMDYRIASPDHDFIYGLPELNRRATCTAKHVANPGCFATCIQLGLLPLAKHLMLNEDVMVNAITGSTGAGVKPGATSHFSWRNNNMSVYKAFEHQHVPEIKQSLKQLQNSFDAEIDFIPYRGDFPRGIFATLVVKTKVALEEIVRMYEEYYAKDSFVHIVDKNIDLKQVVNTNKCLIHLEKHGDKLLIISCIDNLLKGASGQAVHNMNLMFNLEETVGLRLKPSAF

SEQ ID NO: 47688 - DNA, 1035 bp, Pseudomonas syringae pv. syringae B728a
  CDS (1)..(1035): transl_table=11
atggtcaaggtcggtatcgtcggcggcacgggttacaccggggtcgagctgctgcgtctgttggcacagcatccgcaggcagaagtagtggtcattacctcgcgctcggaggccggcatgccagtcgccgacatgtatccgaacctgcgcgggcactacgacggcctcgcgttcagcgtgcctgacgtgaaaaccctgggtgcctgtgacgtggtgttcttcgccacgccgcacggtgtagcccatgccctggctggtgaattgctcgcggcaggcaccaaggtgatcgacctgtctgccgacttccgtcttcaggatccggtcgagtgggccaagtggtacggccagcctcatggtgctcctcagttgttggaggatgcggtgtacgggctgccggaagttaaccgcgaacagatcaggaacgcgcgactcatcgccgtaccgggttgctatcccaccgctacccagttgggtttcctgccgctgcttgaagccggtattgccgataacactcgtctgattgccgactgcaaatccggcgtgagcggtgcgggccgtggtctgaatatcggttcgctgtactcggaagccaatgaaagcttcaaggcctacgccgtgaagggccaccgccacctgcctgaaatcacccaggggctgcgtcgcgctgccggtggcgacatcggcctgacgttcgtgccacacctggtgccgatgattcgtggcattcactccacgctctatgcaacggtcgctgatcgctcggtggacctgcaggcactgttcgagaaacgctacgccgacgagccattcgtggatgtgatgccagcgggcagccatcccgaaacccgcagtgtgcgtggcgccaacgtgtgccgcatcgcggtgcatcgtccgcagggcggcgatctggtcgtcgtgctttcggtgatcgacaacctggtcaaaggtgcgtcgggtcaggcggtgcagaacatgaacatcctgtttggcctcgatgagcgcgccgggttgtctcatgcgggcatgatgccctga

SEQ ID NO: 47689 - protein, 344 aa, Pseudomonas syringae pv. syringae B728a
MVKVGIVGGTGYTGVELLRLLAQHPQAEVVVITSRSEAGMPVADMYPNLRGHYDGLAFSVPDVKTLGACDVVFFATPHGVAHALAGELLAAGTKVIDLSADFRLQDPVEWAKWYGQPHGAPQLLEDAVYGLPEVNREQIRNARLIAVPGCYPTATQLGFLPLLEAGIADNTRLIADCKSGVSGAGRGLNIGSLYSEANESFKAYAVKGHRHLPEITQGLRRAAGGDIGLTFVPHLVPMIRGIHSTLYATVADRSVDLQALFEKRYADEPFVDVMPAGSHPETRSVRGANVCRIAVHRPQGGDLVVVLSVIDNLVKGASGQAVQNMNILFGLDERAGLSHAGMMP

SEQ ID NO: 47690 - DNA, 1107 bp, Pseudomonas fluorescens Pf-5
  CDS (1)..(1107): transl_table=11
ttgacggttgtcgcaggggcgcgccgcccctattatcggcagctttccagtgggttcgttgagggcaggtttatggtcaaggtcggtatcgtcggcggcacgggttacaccggtgtcgaactgctgcgtctgttggcacagcatccgcaagcgcgagtggaagtcatcacttcgcgatccgaggctggcctggccgttgccgacatgtacccgaacctgcgtggccattacgacggcctggcgttcagcgtgccggatatcaagacccttggtgcctgtgacgtggtgttctttgccaccccccatggcgtggcgcatgcactggctggcgagctgctggctgcggggaccaaggtcatcgatctatctgcggacttccgcctgcaggatgccgatgagtgggccaagtggtacggtcagcctcacggtgcccctcaattgctggaggaagcggtctacggcctgccggaagtcaatcgcgaacagatcaagaaagcccgtttgattgcggttcctggctgctatccaaccgcaacccagctcggtttcctgccgctgctggaagccggtcttgccgacacttcccggctgatcgccgactgcaaatccggtgtcagcggtgctggccgtggcgccagcgtcgggtcgctgtactcggaaacttccgaaagcatgaaggcctatgcggtcaaggggcaccgtcatttgccggaaatccgtcagggcctgcgccgggcagcaggcaaggaagttggcctgacgttcgtaccgcacctgacgccgatgattcgcggtatccactccacgctctactccacggtggtggataagtcggtggatctgcaggcgttgttcgagaagcgttatgccaatgagccgtttgtcgatgtaatgccggccggcagccatccggagacccgcagtgtgcggggtgccaacgtgtgccggattgccgtgcaccggccgcaggatgatgatctggtagtggtactgtcggtcatcgacaacctggtcaagggcgcttcgggccaggcggtgcagaacctcaatatcctgttcggcctggatgagcgtctggggctgtcccacgcgggcatgctgccttaa

SEQ ID NO: 47691 - protein, 368 aa, Pseudomonas fluorescens Pf-5
MTVVAGARRPYYRQLSSGFVEGRFMVKVGIVGGTGYTGVELLRLLAQHPQARVEVITSRSEAGLAVADMYPNLRGHYDGLAFSVPDIKTLGACDVVFFATPHGVAHALAGELLAAGTKVIDLSADFRLQDADEWAKWYGQPHGAPQLLEEAVYGLPEVNREQIKKARLIAVPGCYPTATQLGFLPLLEAGLADTSRLIADCKSGVSGAGRGASVGSLYSETSESMKAYAVKGHRHLPEIRQGLRRAAGKEVGLTFVPHLTPMIRGIHSTLYSTVVDKSVDLQALFEKRYANEPFVDVMPAGSHPETRSVRGANVCRIAVHRPQDDDLVVVLSVIDNLVKGASGQAVQNLNILFGLDERLGLSHAGMLP

SEQ ID NO: 47692 - DNA, 1068 bp, Psychrobacter arcticus 273-4
  CDS (1)..(1068): transl_table=11
atgatttcagcagcgattgtcggtggcacaggttatacgggtattgagctaatacgtttattatctgcccatcctgaagtgtctattgatttgctaacctcgcgtagcgaagcaggcactcgcgctgatgagatattcccaagtttacgcggtatctcagatattgtgtttagtgatttaggtgatgagacgctagcgacattgcaacagtgcgatgtggtgttttttgccacaccgcatggcgtcgcaatgcagcaagcagaagcgcttactgaagctggtgtgaaagtgattgatttggcagcagattttcgtttgcagtcattaacggattttgaacactggtatcagcaatcacacgcttgtcctgaactactaaaaacggctgtttatggtttacctgagatcaaccgcgacaaaattgctaatgctttggttgtgggtaatcccggttgctatccgaccacggctatcttgggtttaaagccgataattgaagcgcaaaataagcaatctaaacaacttattgagtcgcgtattgtcatcgatgccaaatctggcgtttctggtgctggtcgccaagcaagtctcgcactgaattatgctgaaagcacagacaattttaaggcatatagcgttgaaggtcatcgccacttgccagagattgagcaaggcgttgcacagctattggacagtcaatttagtcatcgtgttcgttttctgccgcaccttgtgcctatgatacgcggcatgctgagctctattcatatggagctcaccgatgcgggtgctttgatggattggcaacaagtatttgaacaaagctatgcgtcagagcaatttattgatgtaatgccaaaagggctgtatcccgatacccgtagtgtacgtgccagtaatcgattgcgtattgctgttcaccaagacaacgagcgtgccgaattgaccgtgattgtcgtacaagacaatttagtcaaaggagcagctgggcaagcagtgcaaaatatgaatgtgatgtttggatttgatgagtctcttggtttgaattttgcgcccatcgttccttaa

SEQ ID NO: 47693 - protein, 355 aa, Psychrobacter arcticus 273-4
MISAAIVGGTGYTGIELIRLLSAHPEVSIDLLTSRSEAGTRADEIFPSLRGISDIVFSDLGDETLATLQQCDVVFFATPHGVAMQQAEALTEAGVKVIDLAADFRLQSLTDFEHWYQQSHACPELLKTAVYGLPEINRDKIANALVVGNPGCYPTTAILGLKPIIEAQNKQSKQLIESRIVIDAKSGVSGAGRQASLALNYAESTDNFKAYSVEGHRHLPEIEQGVAQLLDSQFSHRVRFLPHLVPMIRGMLSSIHMELTDAGALMDWQQVFEQSYASEQFIDVMPKGLYPDTRSVRASNRLRIAVHQDNERAELTVIVVQDNLVKGAAGQAVQNMNVMFGFDESLGLNFAPIVP

SEQ ID NO: 47694 - DNA, 1056 bp, Colwellia psychrerythraea 34H
  CDS (1)..(1056): transl_table=11
atgacaaaggctatattagattcgaataacagtgtacaaaaagtggcgattataggcgcgagtggctatgctggcgcagagcttgtgggcttattatataaacacagccaagcacacatttgtcatttagttgtctctgaaaatagtagttcagaaggaaagttatttagtgaattacacggcagattccaagggatttgtgatttaccgttagaagcattttctgccgcttggtttgatgaatacgcagcgaaattggatgtagtgttttttgccactcctcatgaatttagtgccgattgggcgcaagcgtttgtagaagcaggtgttaaggtgtttgacctttcaggtggttttagactaaaagatgctgcagattatccaaaatattatggctttgagcacgctaatatcgacgcattatcatcggctaagtatggcttagctgaatggcaacacgatgagattgctaatacaaatttagttgctgttcctggttgttatccaacggcaagtttactttgtttaaaaccgcttaccagtaacaatttagtggtagaaaattcattggttgtggttaatggtataagcggagtgagtggtgcaggaagaaacgcatcattagcgactaactttaatgaagtgagtttaaaagcgtataacgtattacagcacagacatcagccagaaatatcacaagaagccgctatagatgttattttcagtccgcatttagcgccctacaaaagagggcttttagcaacggtcactttgcaacttaaagctggggttactactgcgcaagtacagcaggcttttcaacaggcatatagtgataagcctttagtcagattagtagcaagttggccagaaataggtaatgttgctcatacaccatttgctgatgtgcactggcagtttgatgaagacaagcaagttgtggtggcgagttgtgctatagataacctactaaaaggcgccgcttcacaagccgtacaatgttttaatatttcacttggcttggccagcgaatactcattaatcagcacttgttaa

SEQ ID NO: 47695 - protein, 351 aa, Colwellia psychrerythraea 34H
MTKAILDSNNSVQKVAIIGASGYAGAELVGLLYKHSQAHICHLVVSENSSSEGKLFSELHGRFQGICDLPLEAFSAAWFDEYAAKLDVVFFATPHEFSADWAQAFVEAGVKVFDLSGGFRLKDAADYPKYYGFEHANIDALSSAKYGLAEWQHDEIANTNLVAVPGCYPTASLLCLKPLTSNNLVVENSLVVVNGISGVSGAGRNASLATNFNEVSLKAYNVLQHRHQPEISQEAAIDVIFSPHLAPYKRGLLATVTLQLKAGVTTAQVQQAFQQAYSDKPLVRLVASWPEIGNVAHTPFADVHWQFDEDKQVVVASCAIDNLLKGAASQAVQCFNISLGLASEYSLISTC

SEQ ID NO: 47696 - DNA, 1035 bp, Pseudomonas syringae pv. phaseolicola 1448A
  CDS (1)..(1035): transl_table=11
atggtcaaggtcggtattgtcggcggcacgggttacaccggggtcgagctgctgcgtctgttggcacagcatccgcaggcagaagtagtggtcattacctcgcgctcggaggccggcatgccagtcgccgagatgtacccgaacctgcgcgggcactacgacggcctggctttcagcgtacctgacgtgaaaaccctgggtgcctgtgacgtggtgttcttcgccacgccccacggtgttgctcatgcactggccggtgaactgcttgcggcaggcaccaaggtgatcgacctgtctgccgacttccgtctgcaggacccggtcgagtgggccaaatggtatggccagccgcacggtgctccgcagctgctgcaggatgcggtttacggattgccggaagtcaatcgcgaacagatcaagaatgctcggctcatcgccgtgccgggttgctatccgacagctacacaattgggtttcctgccgttgcttgaggcgggcattgccgacaacactcgccttattgccgactgcaaatctggcgtgagcggtgccggacgtggcctgagcattggttctctgtattcggaagccaatgaaagcttcaaggcctacgccgtgaagggccatcgtcacctgcctgaaatcactcagggcctgcgtcgcgctgcgggcggtgatatcggcctgacatttgttccgcatctggtgccgatgattcgtggcattcattccaccctctatgcgacagtcgctgatcgttcggtggacctgcaagcgctgttcgagaagcgctacgccgacgagccttttgtggatgtaatgcccgctggcagccatcccgagacccgcagtgtgcgcggagccaacgtttgccgcatcgcggtacaccgtccgcagggcggcgatctggttgtcgtgctgtcggttatcgacaatctggtcaaaggcgcgtcaggtcaggcggttcagaatatgaacatcctgtttggtcttgatgagcgcgccggtttgtctcacgcgggcatgatgccgtaa

SEQ ID NO: 47697 - protein, 344 aa, Pseudomonas syringae pv. phaseolicola 1448A
MVKVGIVGGTGYTGVELLRLLAQHPQAEVVVITSRSEAGMPVAEMYPNLRGHYDGLAFSVPDVKTLGACDVVFFATPHGVAHALAGELLAAGTKVIDLSADFRLQDPVEWAKWYGQPHGAPQLLQDAVYGLPEVNREQIKNARLIAVPGCYPTATQLGFLPLLEAGIADNTRLIADCKSGVSGAGRGLSIGSLYSEANESFKAYAVKGHRHLPEITQGLRRAAGGDIGLTFVPHLVPMIRGIHSTLYATVADRSVDLQALFEKRYADEPFVDVMPAGSHPETRSVRGANVCRIAVHRPQGGDLVVVLSVIDNLVKGASGQAVQNMNILFGLDERAGLSHAGMMP

SEQ ID NO: 47698 - DNA, 951 bp, Dechloromonas aromatica RCB
  CDS (1)..(951): transl_table=11
atgacctataaagtctttgtcgacggccaggaaggcactaccggcctgcagatcaatgaatacctcgccaagcgcagcgatgtcgtgctgctcaagatcgacgccgacaagcgcaaggatcttgccgagcgcaagcgcctgatcaacgaatccgacgtgactttcctgtgcctgccggatgacgcagccaaggaatcggtgtctctggtcgacaacccgaacacctgcgtgatcgatgcctcgacggcgcaccgtgtcaatccggcgtggaccttcggcttgcccgagctggccaaggaccagcgcgccaagatcaaggcctccaagcgcatcgccaaccctggctgccatgccagtgccttcatcctggccctgcgcccgctggtcgaagccggcctgctgcctgccgcgacgcagatcgctgccaactccatcaccggctactccggcggcggcaaatcgatgatcgccgattaccaaaaggccagcgaaagcccgacccaactcaaggcgccgcgcccctactcgctcgccctggcacacaagcatctgccggaaatgcaggcctacaccggcctgaccgtcgcgccgattttccagcccatcgtcggaccgttctacaagggcctggccgtcaccgcctacattcacccgcagcagttcacccgcccggcaacgccgactgacgtgcagaagatcatcgccgactactacgccggtgagccgttcatccgcgtgctgccggttgatctcgatgcgaccacggaaggcggtttctacaatgtcgaagccaacaacgacaccaaccgtgtcgacatcgccgtcttcggcaatgaagagcgcatgttgatcgttgcccgcctcgacaacctcggcaagggtgcttccggtgctgccgtgcaggcgatgaacgtgcatctgggcgttgaggaaagcctcggcctggtctga

SEQ ID NO: 47699 - protein, 316 aa, Dechloromonas aromatica RCB
MTYKVFVDGQEGTTGLQINEYLAKRSDVVLLKIDADKRKDLAERKRLINESDVTFLCLPDDAAKESVSLVDNPNTCVIDASTAHRVNPAWTFGLPELAKDQRAKIKASKRIANPGCHASAFILALRPLVEAGLLPAATQIAANSITGYSGGGKSMIADYQKASESPTQLKAPRPYSLALAHKHLPEMQAYTGLTVAPIFQPIVGPFYKGLAVTAYIHPQQFTRPATPTDVQKIIADYYAGEPFIRVLPVDLDATTEGGFYNVEANNDTNRVDIAVFGNEERMLIVARLDNLGKGASGAAVQAMNVHLGVEESLGLV

SEQ ID NO: 47700 - DNA, 1029 bp, Thermobifida fusca YX
  CDS (1)..(1029): transl_table=11
atgggctatacggcggcggtcgccggcgccagcgggtacgtaggaggggaactgctgcgcctcctgctcgcccaccccgacattgagatcggggcactcaccgcgggcggcaacgccgggacccggctcggcgagcaccaccctcacctgaccccgctcgctgaccggatcctcaccgaaaccacccccgagacccttgccggccacgacatcgtcttcctcgccctgccccacggccactccgctgcgctagcagcccagctcgacgccgacaccctcatcgtcgactgcggcgccgacttccggctggccgatgccgcggcctggcagaagttctacggctctgaacacgccggcacctggccctacggtttgcctgaactccccggggcccgtgccgcactggcccagacccggcggatcgcggtccctggctgctaccccacctgcggaaccctcgccctgatgcctgctttcgcggagcagctcgtcgaaccggaggtcgtggtggtcgccgcctccggaacctccggcgctggcaaagccgccaaaccccacctcatcgccagcgaagtcatggggtcggtgagcgtctacggtgtcgggggagcacaccggcacaaccccgaattcgtccagaacctgtccgcggtggcagagaccccggtgcgcgtgtccttcaccccggtcctcgtgccgatgccgcgcggcatcctcgccacctgctcggcaccgctcaagcccgccatcggcctcgacgaagtccgcgccgcctaccagcgccactacgacgcggaacccttcgtccacctgctgcccgagggacagtggcccaccaccgcgatgaccctcggcgccaacaccgccgctgtccaagtcaccgtggacgaagcagcgggccgcctcgtcgcggtcgcagccatcgacaacctcaccaagggaaccgcgggtggtgcgatccaaagcgccaaccttgccctcggcctccccgaaaccaccggactccctatgactggagtggcaccgtga

SEQ ID NO: 47701 - protein, 342 aa, Thermobifida fusca YX
MGYTAAVAGASGYVGGELLRLLLAHPDIEIGALTAGGNAGTRLGEHHPHLTPLADRILTETTPETLAGHDIVFLALPHGHSAALAAQLDADTLIVDCGADFRLADAAAWQKFYGSEHAGTWPYGLPELPGARAALAQTRRIAVPGCYPTCGTLALMPAFAEQLVEPEVVVVAASGTSGAGKAAKPHLIASEVMGSVSVYGVGGAHRHNPEFVQNLSAVAETPVRVSFTPVLVPMPRGILATCSAPLKPAIGLDEVRAAYQRHYDAEPFVHLLPEGQWPTTAMTLGANTAAVQVTVDEAAGRLVAVAAIDNLTKGTAGGAIQSANLALGLPETTGLPMTGVAP

SEQ ID NO: 47702 - DNA, 1080 bp, Prochlorococcus marinus str. NATL2A
  CDS (1)..(1080): transl_table=11
atggcaataagtacattgaaaactgggaggatcgcaattattggagcatctggatatggtggacttcaactagtcaagttgatcaatgaacatcctgattttgagatttcaactttaaatggtgagcgatcagtgggtaaaaactggaatgaaataaatccgtttatgaaaattttgggagataaaaagattactaaaagcaatattgacgaaatcgctcttgattctgattatgcaattttaagtcttcctaatggtttatcatcacagttaacacctttattattaaaaaaaggtgttaaggtcctcgatttgtcggcagattatagatttaaatctctagataaatggaaagaagtctatacaaaagaggcagcgaaatataaaagatatgactacgatttatgtgaagaggctatttatggtttttcagaagaatttagtagcgaaatctcaaagtcaagattaattgcctgtccaggttgctatccaactgcctcacttagtttacttattccatttttaaaacaaggtttaatagaaagtgagggaattattattgatgcaaaatctggtacatctggtggtgggagaaatccaagtgagcaacttttattgtctgaatgctctgaatcaattagaccctatggagttatcggacataggcacacggctgaaatagaaagtattgccagtcattttgctggtcaccaagtcaatttacaattcactcctcatttagtgccaatggttagagggattttgtcgacagtttacgctcgtttaagagatcccggattaacagctgaagactgcaaaattgtaattgaagctttttataaagatcaaccatttattgatatcttgcctgtaggaacatatccagcaactaaatgggttaaaaatactaataaagttatgatttctgttgaagttgataaacgtaacggaagaattgttctaatgagtgttatagataatcttttaaaaggtcaagcgggacaggcaattcaaaatttaaatattatgcacggacttgaatcagatattggtcttcctaagattactttttatccttga

SEQ ID NO: 47703 - protein, 359 aa, Prochlorococcus marinus str. NATL2A
MAISTLKTGRIAIIGASGYGGLQLVKLINEHPDFEISTLNGERSVGKNWNEINPFMKILGDKKITKSNIDEIALDSDYAILSLPNGLSSQLTPLLLKKGVKVLDLSADYRFKSLDKWKEVYTKEAAKYKRYDYDLCEEAIYGFSEEFSSEISKSRLIACPGCYPTASLSLLIPFLKQGLIESEGIIIDAKSGTSGGGRNPSEQLLLSECSESIRPYGVIGHRHTAEIESIASHFAGHQVNLQFTPHLVPMVRGILSTVYARLRDPGLTAEDCKIVIEAFYKDQPFIDILPVGTYPATKWVKNTNKVMISVEVDKRNGRIVLMSVIDNLLKGQAGQAIQNLNIMHGLESDIGLPKITFYP

SEQ ID NO: 47704 - DNA, 948 bp, Ralstonia eutropha JMP134
  CDS (1)..(948): transl_table=11
atggttttcaaagtgttcgtcgatggtcaggaaggcaccaccggtctccggctgcttgactatctctctggtcgttccgacgtcgaattgctgcgcattgctgatgacaagcgcaaggacccggccgagcgtgcacgcttcctgaatgccgcagacgtcgctttcctgtgcctgccggacgtggcctcgcgcgaggccgtgtcgctggtgaccaacccgaatacctgcgtgatcgacgccagcaccgcgttccgcacgtcagacagctgggcctatggcctgccggaactggtgcgcggccagcgcgaaaagatccgcgcgagcaagcgcatcgctgtgccgggctgccatgccagcgccttcgtgctggcggtgcgtccgctgatcgatgccggcgtgctgccgcgcgactacccggtctcggcgttctcgctgaccggctacagcggcggcggcaagaagatgattgccgacttcgaagccggcggtaatccgaagctgcaaagcccgcgcccgtacgcgcttggcctggcgcacaagcacctgcccgaaatgcgcgtgcaggccggcctggcggcggagcctatcttcaacccgatcgtcggcaacttcttcaagggcctggccgtgacggtgccggtctatgctgaccgcctcgcgcgcaaggtcagccccgagcagatcgtcgacatctaccgcgagcactatgaaggcgagcagttcgtgcgcgtgctgccgtacaacagcgacgacaacctcgacgatggtttcctcgacgtgcaggccaacaacgacaccaaccgtgtcgacctgttcgtgttcggcacgcccgatcgcctgaatctggtcgcgcgcctggacaacctgggcaagggcgcggccggcgcggcagtgcaatgcatgaacgtgcatgtcggcgccgacgaggcgaccgggctgcaggcctga

SEQ ID NO: 47705 - protein, 315 aa, Ralstonia eutropha JMP134
MVFKVFVDGQEGTTGLRLLDYLSGRSDVELLRIADDKRKDPAERARFLNAADVAFLCLPDVASREAVSLVTNPNTCVIDASTAFRTSDSWAYGLPELVRGQREKIRASKRIAVPGCHASAFVLAVRPLIDAGVLPRDYPVSAFSLTGYSGGGKKMIADFEAGGNPKLQSPRPYALGLAHKHLPEMRVQAGLAAEPIFNPIVGNFFKGLAVTVPVYADRLARKVSPEQIVDIYREHYEGEQFVRVLPYNSDDNLDDGFLDVQANNDTNRVDLFVFGTPDRLNLVARLDNLGKGAAGAAVQCMNVHVGADEATGLQA

SEQ ID NO: 47706 - DNA, 930 bp, Ralstonia eutropha JMP134
  CDS (1)..(930): transl_table=11
atgaactctcccctcgttttcatcgacggcgaccaaggcaccaccgggttgcaaatccacgaacggctgcgcggccggaccgacctccgcctattcacgcttgccgcctcggaacgcaaggacccacggcgtcgtgcggatgcaatcaatgcctgcgacatcgctatcctttgcttgcccgatgccgccgcgcgcgaggcggtgaacgccatcgtcaatcccgccgtcagggtgatcgatgcaagctctgcccaccgcacgcatccagactggacatatggttttccggaaatggcaccggaacaggccgcacgcatcgcgaacgcacgacgggtcaccaatcccggctgctatccgactggtgcggttggcctattgcgtccgctggtgcaggccgggcttgtcccggccaactatccgctcagcatccatgcggtgtccggctactccggccgcggccgtgccggcgtggaggaatatgaggggcaggatgccgtcagcccgccggcattccagatgtatggcctggggctcgcgcacaagcaccccccggaaatccagcagcacgccgggctcgcggagcgtcccatcttcgttcccgcgtatggtgcgttccgccagggcatcgtgctgacggtgcccatcgcgttgcggctgctggccctcgatgtggatggcgccacgctccacgcatgtctcgcgcgccactatgccggggcggcccatgtacatgtcctgccgttgcacgaatcgcgcgatttaaagcacctggatccgcaagtgctgaacggtacaaacgacatgcacctgagcgtgttttccaacggggagcatgggcacgtgctgctgtcggcggtgttcgacaaccttggcaaaggtgcgtccggcgccgcggttcagaacttggacctgatgctcaggcggcaatag

SEQ ID NO: 47707 - protein, 309 aa, Ralstonia eutropha JMP134
MNSPLVFIDGDQGTTGLQIHERLRGRTDLRLFTLAASERKDPRRRADAINACDIAILCLPDAAAREAVNAIVNPAVRVIDASSAHRTHPDWTYGFPEMAPEQAARIANARRVTNPGCYPTGAVGLLRPLVQAGLVPANYPLSIHAVSGYSGRGRAGVEEYEGQDAVSPPAFQMYGLGLAHKHPPEIQQHAGLAERPIFVPAYGAFRQGIVLTVPIALRLLALDVDGATLHACLARHYAGAAHVHVLPLHESRDLKHLDPQVLNGTNDMHLSVFSNGEHGHVLLSAVFDNLGKGASGAAVQNLDLMLRRQ

SEQ ID NO: 47708 - DNA, 1041 bp, Ehrlichia canis str. Jake
  CDS (1)..(1041): transl_table=11
atgagttatcaggtatcagttgctgtagttggggctacaggttatgtaggggttgagttggttcgcttgttattagctcaccctatggttaagataaggtatttgtgtgcaactcaatctactgggaaattgctttcttctagctattttcatatttctcagaattatatctctattagtgtgtcatcttttgatgatattgatttggataagttagatgtggtttttttatgtttacctcatggtgcatcaagtgaaattgtaaaaaaaattcataatgtagttaaagttatagatctatcagctgactttagaattaaagaccctgatatatataaacaatggtatggagtacattattgtccagatcttataaaagattttgtttatggattgactgaaatatattatgaagatattcaaaaatctagctttatagcttgtccagggtgttatcctacttctgtgttgataccactgtttccattattaagactacgtttagtaaaaagtaacaatataatagtagatgctaaatcaggagtgagtggtgctggtaggtctgtaaaacaagataatttattttgtgaagtgtatgacgctatcaagtcatataaagtttctaaccataggcatattcctgaaatagaacaagaattgtgttttgctgcatgtagggaagatattaatttacaatttgtacctaatttaataccagtaaaaagaggtatgatgtctaacatataccttgaattggaagttggtgtatctcttactgatgttcgtgaggcattactacttttttacagagattcattttttgttgttgtagatgaggaaaaagctataacaactagatctgttgtgggtacaaattattgttatttaggaatttttcctgggagattacctaatacaattgttataatatctgttatagataatttgttaaaaggtgctgctggtcaagctgtacaaaactttaatgttatgatgtcttatgaagagaaacttgcattgtctaatattccttatttttaa

SEQ ID NO: 47709 - protein, 346 aa, Ehrlichia canis str. Jake
MSYQVSVAVVGATGYVGVELVRLLLAHPMVKIRYLCATQSTGKLLSSSYFHISQNYISISVSSFDDIDLDKLDVVFLCLPHGASSEIVKKIHNVVKVIDLSADFRIKDPDIYKQWYGVHYCPDLIKDFVYGLTEIYYEDIQKSSFIACPGCYPTSVLIPLFPLLRLRLVKSNNIIVDAKSGVSGAGRSVKQDNLFCEVYDAIKSYKVSNHRHIPEIEQELCFAACREDINLQFVPNLIPVKRGMMSNIYLELEVGVSLTDVREALLLFYRDSFFVVVDEEKAITTRSVVGTNYCYLGIFPGRLPNTIVIISVIDNLLKGAAGQAVQNFNVMMSYEEKLALSNIPYF

SEQ ID NO: 47710 - DNA, 1014 bp, Methanosarcina barkeri str. Fusaro
  CDS (1)..(1014): transl_table=11
atgatcaaggctggaataataggagcttcgggatatacgggaggagaacttctgcgcttgctcgttaaccacccaaatgttaagctggagctggcaacttcccgaagcctggcagggaagcccgtaacgagcacccataggcatcttgaaggttttctcgacctaaattatgaaaatcctgattctgaagatatcagggagcgctgtgatgtagtctttcttgcagtacctcacggatctgccatgaactatgtacctgaactgcttgatggcaacactaaggttgttgaccttagcgcagactataggcttgaaacctcggaatttgagaaaatctacgggataaagcatagtgacccaaggaatgccgtttacgggcttgtagagctccaccccgaagttgcaaaagagaatttcgtggcaaacccaggatgttttcctacaggttcaattcttgcagcagcaccgcttgcagcagctggacttatcgatattgcggtttttgattccaagacaggaatctcaggagcagggatctcgcccactcaaaactcacattatccaaacctggcggaaaatatcatcccatacaaacttacagcccacaggcacagagctgaaattgtccaggaactgaccgggcttgaaggaaagctcaggaacattaatttcactccacacgtaattccatctatcaggggaatctttacaactgctcacctctttacaaaggagacactctccacggacgacttaaagacgatttacgaggaattttacagggacaggccgtttataaggttcccttcaggagttccttccctaactgcagtcagaggttctaacttctgcgatataagctttgaagcggataaagaaaataacagggttgtcgtgctttcagcaatcgataacctggtcaaaggcgcttcaggacaggctatccaaaatatgaacctcatgttcgggctggatgagacatgtgggctctggatgcctgctacggctccgtaa

SEQ ID NO: 47711 - protein, 337 aa, Methanosarcina barkeri str. Fusaro
MIKAGIIGASGYTGGELLRLLVNHPNVKLELATSRSLAGKPVTSTHRHLEGFLDLNYENPDSEDIRERCDVVFLAVPHGSAMNYVPELLDGNTKVVDLSADYRLETSEFEKIYGIKHSDPRNAVYGLVELHPEVAKENFVANPGCFPTGSILAAAPLAAAGLIDIAVFDSKTGISGAGISPTQNSHYPNLAENIIPYKLTAHRHRAEIVQELTGLEGKLRNINFTPHVIPSIRGIFTTAHLFTKETLSTDDLKTIYEEFYRDRPFIRFPSGVPSLTAVRGSNFCDISFEADKENNRVVVLSAIDNLVKGASGQAIQNMNLMFGLDETCGLWMPATAP

SEQ ID NO: 47712 - DNA, 1026 bp, Dehalococcoides sp. CBDB1
  CDS (1)..(1026): transl_table=11
atgaagaaatataaaacagggattataaacgtaaccggttatgcagggcttgagcttgcccgtattctggaaagccacccctcggtagagctttgttcggtaaccggcaggagtctggctggtaaaaaactttcggatgtatttccctatctgcatcgccttgatttgcctattactgaaaatctggaagggcaagtggatgttgcctttctggctctgcctcacaaagaaggggcagctttagtacccgctttgctggaaaaaggtatgcgggtaatagatatcagcgccgattttcgtttgaaagacccggctctgtatcaggcatggtacggatttgaacatccctgcccggggctcttggaggaagcggtgtatggtctgcctgagcttaagcgtaaggatattgccggcgcccgtctggtggcaaatccgggctgttaccctacctcagccatacttgggcttgtcccggcttttaaaagtgacctgatagagccaagtgccattatagatgccaagtccgggctttccggttcggggcgaacacccactgtaaaaaccatattttgcgaggctgacgaagatgtttgtgcctattccatcggcactcaccgtcatcagccggagatagttcaggagctttgccgcgccagcagaggggtaatcccgcgggttactttctgccctcatctggtacccatgagccggggtatactctcaactgcctatgcgcgtttgaaacagccggttacagacgaagaagtcaaagagatttaccgacagttttataaagatgaaccttttgtaaaagtaactgccgaaccaccccacacccgttatacccggggtactaatatgtgctttatatatccggtggtggatgccctgaatgaacagttgatagtcataagctgcatagataatctggtaaagggtgcggcggggcaggctgtacagaatatgaatattatgctgggtctggctgaaacggaaggccttgaagctatggccaccctgccttag

SEQ ID NO: 47713 - protein, 341 aa, Dehalococcoides sp. CBDB1
MKKYKTGIINVTGYAGLELARILESHPSVELCSVTGRSLAGKKLSDVFPYLHRLDLPITENLEGQVDVAFLALPHKEGAALVPALLEKGMRVIDISADFRLKDPALYQAWYGFEHPCPGLLEEAVYGLPELKRKDIAGARLVANPGCYPTSAILGLVPAFKSDLIEPSAIIDAKSGLSGSGRTPTVKTIFCEADEDVCAYSIGTHRHQPEIVQELCRASRGVIPRVTFCPHLVPMSRGILSTAYARLKQPVTDEEVKEIYRQFYKDEPFVKVTAEPPHTRYTRGTNMCFIYPVVDALNEQLIVISCIDNLVKGAAGQAVQNMNIMLGLAETEGLEAMATLP

SEQ ID NO: 47714 - DNA, 1029 bp, Thiobacillus denitrificans ATCC 25259
  CDS (1)..(1029): transl_table=11
atgatcaaggtcggaattgtgggcggcacgggttatacgggcgtcgagttgctgcgactactggcgcgtcaccccgaggtcgaattgaaggcgatcacctcgcgcaaggaggctggcatgccggtcgccgacatgtttcccaatcttcgcggccgggtgggtctggctttttccacacccgaggaagcagggctcgagacgtgcgacgtcgtgttcttcgccacgcccaatggggtggcgatgcaacagacgcgtgcgctgctcgacgctggcgtcaaggtgatcgatctggccgccgacttccgcatcaaggacgtcgccgagtggcagaagtggtacaagatggagcacgcctgccccgacctggtcgacgaggcggtctatggtctgcccgagatcaaccgcgacaagatcaaggcggcacgcctgatcgccaaccccggttgctacccgactgcggtgcagctcgggtttctgccgcttctggaagcaggcgtcgccgaaaccggtaccctcatcgccgacgccaagtccggcgtgtcgggggcgggccgcaaggccgagacccatatcctcttcgccgaggcggccgacaacttcaaggcctacgcggtcggcggccaccgtcattggccggaaatcaagcaggggctggagatttttgcaggcggacctgtgggttttaccttcgtgccgcacctgacgccgctcatccgcggtatccacgccacgctctacgccagggtgagcgcggacgtcgacctgcaggccttgtacgagaagcgttacacggacgaggctttcgtcgatgtcatgccggccggtgcctgcccggagacccgctcggtccgtggggcgaacgtctgccgcatcgccgtgcaccgccagcagggaagcgacatggtgatcgtgctgtctgtgatcgacaacctggtcaaaggcgccgcggggcaggcggtgcagaacatgaacatcctgttcgggctggccgaggatacggcgctgtcggacgtcggcatgctcccctga

SEQ ID NO: 47715 - protein, 342 aa, Thiobacillus denitrificans ATCC 25259
MIKVGIVGGTGYTGVELLRLLARHPEVELKAITSRKEAGMPVADMFPNLRGRVGLAFSTPEEAGLETCDVVFFATPNGVAMQQTRALLDAGVKVIDLAADFRIKDVAEWQKWYKMEHACPDLVDEAVYGLPEINRDKIKAARLIANPGCYPTAVQLGFLPLLEAGVAETGTLIADAKSGVSGAGRKAETHILFAEAADNFKAYAVGGHRHWPEIKQGLEIFAGGPVGFTFVPHLTPLIRGIHATLYARVSADVDLQALYEKRYTDEAFVDVMPAGACPETRSVRGANVCRIAVHRQQGSDMVIVLSVIDNLVKGAAGQAVQNMNILFGLAEDTALSDVGMLP

SEQ ID NO: 47716 - DNA, 969 bp, Anabaena variabilis ATCC 29413
  CDS (1)..(969): transl_table=11
atgaataaaccaaagatttttattgatggggaagcgggaactacaggcttacagatttactcacgcctcaacgagcgagatgatattgagctagttagtattgcagcatcgaagcgcaaggatgcggatgagcgagcaaaattactcaattccgttgatgtagccattctttgtttacctgatgatgcagcgagggaagctgttagtttagttcacagtagtcaggtgaaaatccttgatgctagcaccgcttatcgcacggctcaaggttgggtatatggttttccggaactgaacccaggacagcgagaaaaaatcgccaatgctcagtttgtcagcaatccggggtgttatcctacagggtttttagcttgtgtacgtccgttaatagctcaaggtattcttcccagtagcttccccataacaattaatgcggtgtctggttactctggtggtggtaagagcttgatccaaaagtatgatagcttccacgagcagcagaaaggcgcaacctcagattatcccttcggtatctatggtttacagttcggacataagcacgttaaagagatgcaccagcattctgggttagcatcaccgccattgttcatccctgcggtgggtgacttcgagcagggaatgttggtacaaatacccttacctctgtggactttggacaatccgccatcgggtgaagagattcatcaagcgatcgcccaatactaccaaggggaaaagtttgtgcaggtagcttcatttaaagaccctagcctgttacgtgacggcacatttttagacgcaacggcagttaacggtactaatattgttcaggttttcgtcttcgctaacgataatacgaaagaagctctgttagtggctcgattagataaccttggcaaaggtgcatcaggcgcagccgtccaaaacctaaatattatgctaggtcttccagaagagttaggattatga

SEQ ID NO: 47717 - protein, 322 aa, Anabaena variabilis ATCC 29413
MNKPKIFIDGEAGTTGLQIYSRLNERDDIELVSIAASKRKDADERAKLLNSVDVAILCLPDDAAREAVSLVHSSQVKILDASTAYRTAQGWVYGFPELNPGQREKIANAQFVSNPGCYPTGFLACVRPLIAQGILPSSFPITINAVSGYSGGGKSLIQKYDSFHEQQKGATSDYPFGIYGLQFGHKHVKEMHQHSGLASPPLFIPAVGDFEQGMLVQIPLPLWTLDNPPSGEEIHQAIAQYYQGEKFVQVASFKDPSLLRDGTFLDATAVNGTNIVQVFVFANDNTKEALLVARLDNLGKGASGAAVQNLNIMLGLPEELGL

SEQ ID NO: 47718 - DNA, 1059 bp, Anabaena variabilis ATCC 29413
  CDS (1)..(1059): transl_table=11
atgggcaattttgggcgcgtacccgttgggattgttggcgcgtcaggctatggtggggtacagttagtccgattactgatggatcatccagaagttgaactagtttatttaggtggtgagagtagtgtaggtaaatcttttgcatctctctacccccatttagctcatgcagttaaattatcaattgaagaagtagacccagaagttattgcgcgtcgctgcgaagtggtatttctctcgatgccgaatggtctagcttgtcaaattgtgccaacattgttggaaaaaggctgtaaagtactggatttgagtgcagactatcgattccgtaacttgacaacttacaccacttggtatggtgtggaaaggagcgatcgcccgacagctgacaccgccgtatatggtttaccggaactgtaccgcgatcgcatctctgaagcccagttagtcggttgtcccggttcctaccccaccgctagcctcttagcattatcaccactgttaaaacaagggttaatcgttccggaaaccgctattgttgacgctaaatccggcacatctggcggcgggagggaagccaaaacttatttattactagcggaagcagataattctcttgccccttatagtgtcgttcgtcatcgtcacacaccagaaatcgagcaaatttgtagcgatttggcaggacacgaagttacagtccaatttacgccacatctgatccccatagtgcgtggaaccttagcaactgtatacgctaccctccgcgaccccggtttagtaggagatgatttaactactatttatacagcattttaccgtaattccccttggataaaagtctgtgaaagtggcatttatccccaaaccaaatgggctgcgggcagtaatctttgttatatcggtgtagaagttgacccgcgtactggccgggtaattgtcatgtcagccattgacaacctgattaaaggccaagcgggtcaagcaattcagtgtctcaacattatgatgggttgggatgagacattgggtttaccaaagatggggttttatccgtga

SEQ ID NO: 47719 - protein, 352 aa, Anabaena variabilis ATCC 29413
MGNFGRVPVGIVGASGYGGVQLVRLLMDHPEVELVYLGGESSVGKSFASLYPHLAHAVKLSIEEVDPEVIARRCEVVFLSMPNGLACQIVPTLLEKGCKVLDLSADYRFRNLTTYTTWYGVERSDRPTADTAVYGLPELYRDRISEAQLVGCPGSYPTASLLALSPLLKQGLIVPETAIVDAKSGTSGGGREAKTYLLLAEADNSLAPYSVVRHRHTPEIEQICSDLAGHEVTVQFTPHLIPIVRGTLATVYATLRDPGLVGDDLTTIYTAFYRNSPWIKVCESGIYPQTKWAAGSNLCYIGVEVDPRTGRVIVMSAIDNLIKGQAGQAIQCLNIMMGWDETLGLPKMGFYP

SEQ ID NO: 47720 - DNA, 1035 bp, Pseudomonas fluorescens PfO-1
  CDS (1)..(1035): transl_table=11
atggtcaaggtcggtatcgtcggcggcacgggttacaccggtgtcgaactgctgcgtctgttggcacagcatccgcaggcagaagtggtagtgatcacttcccgatccgaggccggtctggccgtggctgatatgtacccgaacctgcgcggtcactacgacggtctggcattcagcgtgccggacatcaagaccctgggcgcttgcgacgtggtgttcttcgccactccgcacggcgttgcccacgcactggccggcgagttgctggcggccggcaccaaggtcatcgacctgtcggcagacttccgtctgcaggacgctgatgaatgggccaagtggtacggccagccgcacggtgcaccggagctgctggacgaagcggtttacggcttgccggaagtcaatcgtgagcaaatcaggaaagcgcgcctgatcgcggtgccgggttgctatccgaccgcgacacagctgggtttcctgccgttgcttgaggcaggcattgccgacgcttcccacctgatcgccgactgcaagtccggtgtcagcggtgccggtcgtggtgctgccgtaggctcgctgtactccgagacgtcggaaagcatgaaggcctatgcggtgaaaggtcaccgtcatctgccggaaattcgccaggggctgcgtcgtgccgcaggcaaggatgtcggtctgacgttcgtgccacacctgacgccgatgatccgtggcattcactccacgctttacgcgaccgtggtggaccgctcggtggatctgcaggcgctgttcgaaaagcgttatgccaatgagccgttcgtcgacgtgatgccggctggtagccatccagaaacccgtagcgtgcgtggcgccaacgtctgccgcatcgcggttcaccgtccacaggatggtgatctggtggtggtgctgtcggtgatcgacaacctggtcaagggcgcgtcgggccaggcggtgcagaacatgaacattctgttcgggctggatgagcgtttgggtctgtcccacgccggcatgctgccgtaa

SEQ ID NO: 47721 - protein, 344 aa, Pseudomonas fluorescens PfO-1
MVKVGIVGGTGYTGVELLRLLAQHPQAEVVVITSRSEAGLAVADMYPNLRGHYDGLAFSVPDIKTLGACDVVFFATPHGVAHALAGELLAAGTKVIDLSADFRLQDADEWAKWYGQPHGAPELLDEAVYGLPEVNREQIRKARLIAVPGCYPTATQLGFLPLLEAGIADASHLIADCKSGVSGAGRGAAVGSLYSETSESMKAYAVKGHRHLPEIRQGLRRAAGKDVGLTFVPHLTPMIRGIHSTLYATVVDRSVDLQALFEKRYANEPFVDVMPAGSHPETRSVRGANVCRIAVHRPQDGDLVVVLSVIDNLVKGASGQAVQNMNILFGLDERLGLSHAGMLP

SEQ ID NO: 47722 - DNA, 1029 bp, Rhodobacter sphaeroides 2.4.1
  CDS (1)..(1029): transl_table=11
atggttcagaacatcgccatcctcggggcttcgggctataccggggccgagctggtccgcctgatcgccacgcatcccgcgatgcggatcgtggcgctttcgggcgaccgcaaggcgggcatggcgatgtccgaggtgtttcccttcctccgccatctcgacctgccgcggctccagaagatcgaagagatcgatttctcgagcgtggacctggccttctgcgcccttcctcatgccacgtctcaggcggtgatcgcggggctgccgcgcgatctgaaggtcgtggacctctcggccgacttccggttgcgcgatccggcggcctacgagacctggtacggcaagccccatgcggcgcccgagctgcagaaggaagcggtctacggactgaccgaattctaccgcgacgagatccgcggcgcgcgcctcgtggcgggcaccggctgcaatgcggcgacggggcaatatgcgatccggcccctgatcgaggcgggcgtgatcgatctcgacgatatcctgatcgatctgaaggcgggggtctccggcgcggggcggagcctgaaggagaacctgctccatgccgagctctccgagggcacgcatgcctattccgccggcggcaggcaccggcatctgggcgagttcgaccaggaattctcgaagatcgccggccggccggtgcaggtccgcttcacgccgcatctcacgccgatgaaccgcggcatcctcgccaatgtctatgtgaagggcgacccgcaggcggtgcaccgggcgctcaccgagcgctatctcacggaaacgttcctcgaggtgctaccttttggcgcgctcccctcgacacgcgacatccgggggtccaactacgtccatatcggcgtgatcggggacagggtgcccggctgcgccatggtggtggcggtgctggacaacctgtgcaagggctcctcggggcaggcgatccagaatgcgaacctgatgctggggctggacgaggcggcaggtctcgggctcgccccggtcttcccctga

SEQ ID NO: 47723 - protein, 342 aa, Rhodobacter sphaeroides 2.4.1
MVQNIAILGASGYTGAELVRLIATHPAMRIVALSGDRKAGMAMSEVFPFLRHLDLPRLQKIEEIDFSSVDLAFCALPHATSQAVIAGLPRDLKVVDLSADFRLRDPAAYETWYGKPHAAPELQKEAVYGLTEFYRDEIRGARLVAGTGCNAATGQYAIRPLIEAGVIDLDDILIDLKAGVSGAGRSLKENLLHAELSEGTHAYSAGGRHRHLGEFDQEFSKIAGRPVQVRFTPHLTPMNRGILANVYVKGDPQAVHRALTERYLTETFLEVLPFGALPSTRDIRGSNYVHIGVIGDRVPGCAMVVAVLDNLCKGSSGQAIQNANLMLGLDEAAGLGLAPVFP

SEQ ID NO: 47724 - DNA, 1014 bp, Carboxydothermus hydrogenoformans Z-2901
  CDS (1)..(1014): transl_table=11
ttgaaagttgcagtggttggtgctaccggttataccggtgctgaactgatcaggttattatctatgcatccggaagttaccgggctcttcctctttagccggggagaagaggtggaagtggagaagcattttctcggccttggtttcgccggcaaggtgaagcctttagaagaactctcaggctttaatcctgattttgcttttttagctttacctcacggagagagtggccgttatgctcaagaattaatccgacgaggggtccgggttatcgatttgtcggcggattttcgccttcctctggaagtttacgataaatggtacgggccgcatccggctcccgaacttttggaaatagcagtatatggtcttacggaatatttttccgaaaaaataaaaactgccaggcttatagccaatccaggctgctatccaacggcgtttttgctggcggttcttcctttagccgaaaaggatttgcttcaaggtgtaatcattagcgatatgaaatcgggagtaacgggtgccgggagagcggctaaaagagaaacgctttttggggaagtagcggaaaactttcgcccttacggagttggaggtaaacatcgacatctaccggaaatggaaaatttcttaaatatgtttgcgaaaggcttaagagttatttttacccctcacctggttcctatgaaaagaggaattttggggactatttatctgaatcttactacggatgtttctttggaagagttaagaaagatttacctggcaaaataccaggacaaaccttttataaaaatccttccggacggccagttaccggaaacccgggcggtttacggaaccaataatgctttaattgccgttaataaggagccgggaggaatggttatcgtgaccgttgccattgacaacctgggcaaaggggctgcggggcaggcggtgcaaaatatgaatttgatggccggacttgacgaaacctgcggacttaaaaatacgggaatttacttttag

SEQ ID NO: 47725 - protein, 337 aa, Carboxydothermus hydrogenoformans Z-2901
MKVAVVGATGYTGAELIRLLSMHPEVTGLFLFSRGEEVEVEKHFLGLGFAGKVKPLEELSGFNPDFAFLALPHGESGRYAQELIRRGVRVIDLSADFRLPLEVYDKWYGPHPAPELLEIAVYGLTEYFSEKIKTARLIANPGCYPTAFLLAVLPLAEKDLLQGVIISDMKSGVTGAGRAAKRETLFGEVAENFRPYGVGGKHRHLPEMENFLNMFAKGLRVIFTPHLVPMKRGILGTIYLNLTTDVSLEELRKIYLAKYQDKPFIKILPDGQLPETRAVYGTNNALIAVNKEPGGMVIVTVAIDNLGKGAAGQAVQNMNLMAGLDETCGLKNTGIYF

SEQ ID NO: 47726 - DNA, 951 bp, Burkholderia sp. 383
  CDS (1)..(951): transl_table=11
atgagcaccaaagtttttgtcgacggccaggaaggcacgaccggcctcaagatcttcgaatacctgtcggcacgcagcgacatcgagatcctgcgcatcgatgaagcgaagcgcaaggatgtcgaagagcgccgccgcctgatcaacgcgtcggacgtcacgttcctgtgcctgccggacgttgcatcgcgcgaatcggcctcgctcgtcgagaacccgaacacgacgctgatcgacgcgagcaccgcgttccgcaccagcgccgactgggcgtacggcctgccggaactgacccgcgcgcagcgcgagaagattcgcacgtcgaagcgcatcgccgtgccgggctgccacgcatcggccttcgtgctcgcgatgcgtccgctcgtcgaggccggcatcgtcgcaccgacgttcgccgcgcacagctactcgatcaccggctacagcggcggcggcaagtcgatgatcgccgactacgaaagcgcagcgccgggcggcaagctcgcgagcccgcgcccgtacgcgctcggcctcacgcacaagcacctgccggaaatggccgcgcacacgggcctcgcgaacgcgccgatcttcacgccgatcgtcggcccgttcctgaaggggctcgcggtgacgacctacttcacgcccgagcagctcgcgaagcgcacgacaccgcaggacgtgcagcgcgtgttcgccgaatactacgcggacgaagcattcgtgcgcgtcgcgccgttcgacgcggacgcgaacctcgacggcggcttcttcgacgtgcaggcgaacaacgacacgaaccgggtcgacctgttcgtgttcggcaacgaagagcgcttcgtcacggtcgcgcgcctcgacaacctcggcaagggtgcatcgggtgccgcgatccagtgcatgaacctgagcatcggcgcagccgaggacgcaggtctcaaacgctga

SEQ ID NO: 47727 - protein, 316 aa, Burkholderia sp. 383
MSTKVFVDGQEGTTGLKIFEYLSARSDIEILRIDEAKRKDVEERRRLINASDVTFLCLPDVASRESASLVENPNTTLIDASTAFRTSADWAYGLPELTRAQREKIRTSKRIAVPGCHASAFVLAMRPLVEAGIVAPTFAAHSYSITGYSGGGKSMIADYESAAPGGKLASPRPYALGLTHKHLPEMAAHTGLANAPIFTPIVGPFLKGLAVTTYFTPEQLAKRTTPQDVQRVFAEYYADEAFVRVAPFDADANLDGGFFDVQANNDTNRVDLFVFGNEERFVTVARLDNLGKGASGAAIQCMNLSIGAAEDAGLKR

SEQ ID NO: 47728 - DNA, 948 bp, Burkholderia sp. 383
  CDS (1)..(948): transl_table=11
atgagccagcccactgtctacatcgacggcgatcaaggcacgaccggattgctgatccacgagcgcctgcgcgggcgtatcgacctgcagctcgtcacgctgccggacgccgagcgcaaggatcccgtgcggcgcgccgaagcgatcaacgcagccgacatcgcgatcctgtgcctgcccgacgcggccgcgcgcgaagcggtcggcttcatccggaatccggcggtacgcgtgatcgacgcgagttcggcccatcgcacgcagccggattgggtctacggctttcccgagatggcgaacgggcacgcgcagacgattgcgcacgctcggcgcgtcacgaatccgggctgctacccgaccggcgcgatcgcgctgctgcgccccctgcaacaggccggcctgctgccgcgcgactacccggtgagcatccatgccgtctccggatactccggcggcggacgggccgccgtcgacgcattcgagtcgggcgatgcttcgcaagcgaaaccgctacaggtctacgggctcgcactcgcgcacaagcatgtgcccgaaatccagctgcatgccggtctgacgaatcgcccgatgttcgtgccggcctacggtgcctatcggcaaggcatcgtgctcaccgtaccgatcgagcttcgcctgcttcctgccggtgtgaccggtgagcagctgcatgcgtgtctcgcgcaccattacgccgacgcgcgtcacgtcgacgtcacgccgctcgcggacacgcaagcgatcacgcatctcgatccgcaagcgctgaacggcaccaacgacatgcggctcggcgtgttcgtcaatgccgagcacggccaggtgctgctgtcggccgtgttcgacaatctcggcaaaggggcatcgggcgcggccgtacagaatctcgacctgatgctcggcgcggcagacgtggcgaaagcggcataa

SEQ ID NO: 47729 - protein, 315 aa, Burkholderia sp. 383
MSQPTVYIDGDQGTTGLLIHERLRGRIDLQLVTLPDAERKDPVRRAEAINAADIAILCLPDAAAREAVGFIRNPAVRVIDASSAHRTQPDWVYGFPEMANGHAQTIAHARRVTNPGCYPTGAIALLRPLQQAGLLPRDYPVSIHAVSGYSGGGRAAVDAFESGDASQAKPLQVYGLALAHKHVPEIQLHAGLTNRPMFVPAYGAYRQGIVLTVPIELRLLPAGVTGEQLHACLAHHYADARHVDVTPLADTQAITHLDPQALNGTNDMRLGVFVNAEHGQVLLSAVFDNLGKGASGAAVQNLDLMLGAADVAKAA

SEQ ID NO: 47730 - DNA, 1074 bp, Synechococcus sp. CC9605
  CDS (1)..(1074): transl_table=11
atggcaacggtgaagggcggacgggttgctgtgatcggcgcctccggctacggcggcctgcagaccatccgactgctccagggccaccccgggttgtctgtgagtttcctcggcggtgaacgcagtgctggtcaacgctggagctccgtttgttccttcctgcccttgccggatgaccccaaggtggaatcggcggatccggatcggatcgcggcttgttccgatttcgctgttctgagcctccccaatggcctggcctgtcagctggcaccgcaactgctggagcggggtgtgcgggtggtggatctctccgccgactttcgttaccgctctctggagcagtggctgcaggtgtatgccaaggaagccggctcccttaaccgtcaagacgctgagctctgcagcagtgctgtctacggcctgccggaatggaacggccccgctatcgctgacgcgaagcttgtcgccgctcccggttgcttccccaccgccagcctgatgcccctgctgcccttcctcaagcagggcctgatcgagaccagcggcatcatcatcgacgccaagacgggcacctcaggcgggggccgcgtgccgaaggaggcgatgctgctggcggaggcctcggaatcgatcgcgccctacggcgtaatcggccatcgccacacgtctgagatcgagcagatggcgatggaggtggctggccaggacatccgcctccagttcacgccgcacctggtgccgatggtgcgcggactgctctccacggtctatgcccgcctgcgcgaccccggtctcaccgccgaggactgcaccactgttctggaggcgatctaccgccaccacccctgcgttcaggttcttccggtgggcacctacccagccaccaagtgggcgcgccacacgaaccgtgccctgctgtcggttcaagtggacacccgcaccggtcagcttgtgttgatgagtgccatcgacaacctgatcaagggtcaggccgggcagggagtgcagtgcatcaatctgatggcaggcctcgctccagagacggggctgcccctgcagtcgttctatccctga

SEQ ID NO: 47731 - protein, 357 aa, Synechococcus sp. CC9605
MATVKGGRVAVIGASGYGGLQTIRLLQGHPGLSVSFLGGERSAGQRWSSVCSFLPLPDDPKVESADPDRIAACSDFAVLSLPNGLACQLAPQLLERGVRVVDLSADFRYRSLEQWLQVYAKEAGSLNRQDAELCSSAVYGLPEWNGPAIADAKLVAAPGCFPTASLMPLLPFLKQGLIETSGIIIDAKTGTSGGGRVPKEAMLLAEASESIAPYGVIGHRHTSEIEQMAMEVAGQDIRLQFTPHLVPMVRGLLSTVYARLRDPGLTAEDCTTVLEAIYRHHPCVQVLPVGTYPATKWARHTNRALLSVQVDTRTGQLVLMSAIDNLIKGQAGQGVQCINLMAGLAPETGLPLQSFYP

SEQ ID NO: 47732 - DNA, 1041 bp, Geobacter metallireducens GS-15
  CDS (1)..(1041): transl_table=11
atgctgaatgttgccgtcgtcggagcgagcggatacaccggagtcgagctgctcaggctgctttactgccatcccgaggtggctgtcacctgtattacctctgaacagagcgccggccggcccgtcgccgctgtcttcccgacgttgcgcagccgctacacacaggtgcttgagaatctggaaccggtcaaggtggcccagaaggccgaccttatctttacggcccttccccacaaggcggctatggaagtggttcccacgtttctggagctggggaagagggtggttgacctctccgccgactatcgcttcaatgatccagccgtttatgagaagtggtacgaaccccacatgaaccccgagaacctgaaggaggcggtctacggccttccagagatccggcgggagaagatcggtgatgcctggctcgtgggtaaccccggctgctaccccacgagcgtcattctggggctcatgccgctcctgaaaaagcgccttatcgacccgtcgaccattattgccgactccaagtctggggtttcgggtgcaggccggggcgccaaggtagagaacctttactgcgaagtgaatgacgggttcaaggcatacggggtgggtggagtgcaccggcatatccccgaaatcgagcaggagttgtcgcttctggctggtgggccgatcaccatcaccttcactccccacctggttcccatggaccggggaatcctctccaccatctacgcgcggcttacaggcactgactccgtcgccgaactggtgaagctctatgctgaattctacgaaggggagccctttgtccgtgtgcttcccgccggaaacgtcccatccactgctcacgtgcgtggctccaatttctgcgacatcgggttggctgtggacagtcgcactgggcgggtcatcgtggtttccgccatcgataacctcgtgaaaggtgccgccggccaagccgtgcagaacatgaacattatgtacggcttccctgagacgatggggctggaagggctccccctttttccctga

SEQ ID NO: 47733 - protein, 346 aa, Geobacter metallireducens GS-15
MLNVAVVGASGYTGVELLRLLYCHPEVAVTCITSEQSAGRPVAAVFPTLRSRYTQVLENLEPVKVAQKADLIFTALPHKAAMEVVPTFLELGKRVVDLSADYRFNDPAVYEKWYEPHMNPENLKEAVYGLPEIRREKIGDAWLVGNPGCYPTSVILGLMPLLKKRLIDPSTIIADSKSGVSGAGRGAKVENLYCEVNDGFKAYGVGGVHRHIPEIEQELSLLAGGPITITFTPHLVPMDRGILSTIYARLTGTDSVAELVKLYAEFYEGEPFVRVLPAGNVPSTAHVRGSNFCDIGLAVDSRTGRVIVVSAIDNLVKGAAGQAVQNMNIMYGFPETMGLEGLPLFP

SEQ ID NO: 47734 - DNA, 1074 bp, Desulfovibrio desulfuricans G20
  CDS (1)..(1074): transl_table=11
atgaccactggcgccaccaaggcagcccccgtccgcgcaggtcttgtgggagctaccggatacaccggcatggagcttatccgcctgcttctgggacaccacagcatggagctggtgcgggtgacatcccgcgcagaagccggaaagcggctcgacgacatctatccttttacacagggcacccgctacggcgggcttgccatcacggaaccggatgcggaagaccttgccgcggcctgtgacatcgcctttctggcggtaccccacggcgccgccatggagatggccgcacagctgcattcacgcgggctgaaagtggttgacctttccgccgacttccgtctgcacgacagcgatgtatatgagcagtggtacaataccggccacacccgtacggaaatgctcggacaggccgtctacgggctgcccgaactgtatgcggaacagacccgcaacgccacgctggtggccaaccccggctgttaccccacctctgtcattctgggcctgtaccctgccctcaaagaaggaatgattctgcccaacggcattgtcatcgacgccaagtccggcgccacaggggcagggcgcaaggcatccgtgccctcgctgttctgcgaagtgcatgactccttccgtgcatacggcatcggcacccaccgccacacgccggaaatagaacaggagctttcagccattgccggcgcgccgctgacggtatccttcaacccgcacctgctgcctgtcaaccgcggcatactgtccaccatatacaccacgctgcagcacgaaatgagtgcagacgacgtgcaggccatctatgaaaacgcctacgcggacaaaccatgggtgcgcgtgctgcccaaaggcagtctgcccgcactgcgcaacgttcgcggcaccatgtactgcgacatggcactggtggtcgacccgcgcacgcaccgcctgatcattgtttcgtgcattgacaacctgtgccgtggtgcatcggggcaggctctggccaatgccaacctcatgctgggcctgccggtgaacaccggcctcgatctggccccgctggttccctga

SEQ ID NO: 47735 - protein, 357 aa, Desulfovibrio desulfuricans G20
MTTGATKAAPVRAGLVGATGYTGMELIRLLLGHHSMELVRVTSRAEAGKRLDDIYPFTQGTRYGGLAITEPDAEDLAAACDIAFLAVPHGAAMEMAAQLHSRGLKVVDLSADFRLHDSDVYEQWYNTGHTRTEMLGQAVYGLPELYAEQTRNATLVANPGCYPTSVILGLYPALKEGMILPNGIVIDAKSGATGAGRKASVPSLFCEVHDSFRAYGIGTHRHTPEIEQELSAIAGAPLTVSFNPHLLPVNRGILSTIYTTLQHEMSADDVQAIYENAYADKPWVRVLPKGSLPALRNVRGTMYCDMALVVDPRTHRLIIVSCIDNLCRGASGQALANANLMLGLPVNTGLDLAPLVP

SEQ ID NO: 47736 - DNA, 1056 bp, Prochlorococcus marinus str. MIT 9312
  CDS (1)..(1056): transl_table=11
atgaatgttgcaatagtaggtgctactggttacggcggtattcaagcggtaaatcttttaaaaaataataaaaactacaaaatctcatttttaggcggtaataaaacttctgggtcaaagtggaatgataacttcccttttatttatcttgataccgatccttatatagaaaaaatatcagtagagaatatctcaaagaattctgatgtagctttgctttgtttacctaatggtatatcttctactttgacaaggaaattattagatagaggagttaaagttattgatttatcagcagattatagatataagtcgctagttgaatgggaaaaagtatattcaaaagaagctgttgcttttaaaaggaatgatgatgatttatgtaaagaagcagtctacggtcttcctgaaataaataaagaagcaatttcaaatggaagattaatttcatgtccaggttgttatccaacatcggctcttattcctctagttccttatctttcgcaaggaattattgaaaatgaaggtatagttattgattctaaaagcggaacttctggaggtgggagagaaccaaaccaaaagctactcttatcagaatgtggagaaggactgtcagcatatggattgataaaccatagacatacttcagagatcgagcaagtagcatcattaatttctggaaataaaatcgaacttctttttactcctcatttggttccaatttcaaggggtatgcattcgactatatatgggagattaagagatcctggattaacatcagatgattgcagaattcttttggataattattataggaattttaagaatattacagtcttacctgtaggtacattcccatccacaaaatgggtaaaaaatacaaaccaaattttcctttctgttaaagttgatattcgaaatggaagaatagttattttatctgtaattgacaatttgttaaaaggacagactgggcaggcaattcaaaatttaaatattatgagtggattttcaatggatgatggccttgagttaactaataactttccataa

SEQ ID NO: 47737 - protein, 351 aa, Prochlorococcus marinus str. MIT 9312
MNVAIVGATGYGGIQAVNLLKNNKNYKISFLGGNKTSGSKWNDNFPFIYLDTDPYIEKISVENISKNSDVALLCLPNGISSTLTRKLLDRGVKVIDLSADYRYKSLVEWEKVYSKEAVAFKRNDDDLCKEAVYGLPEINKEAISNGRLISCPGCYPTSALIPLVPYLSQGIIENEGIVIDSKSGTSGGGREPNQKLLLSECGEGLSAYGLINHRHTSEIEQVASLISGNKIELLFTPHLVPISRGMHSTIYGRLRDPGLTSDDCRILLDNYYRNFKNITVLPVGTFPSTKWVKNTNQIFLSVKVDIRNGRIVILSVIDNLLKGQTGQAIQNLNIMSGFSMDDGLELTNNFP

SEQ ID NO: 47738 - DNA, 1059 bp, Rhodospirillum rubrum ATCC 11170
  CDS (1)..(1059): transl_table=11
atgagcgaacgggtcaatgtcgccatcctcggggccagcggctatacgggcgccgaactcgttcgcctgctcgcccgccatccgcgcgtgaccctggcggcgctgaccgccaaccgcaaggccggccaagccttcgcctcggtctttccccatcttggcgggctcgatctgccggttttgtcgaccatcgaggcggtcgactggtcggcgatcgatttcgtcttttgcgccctaccccatggcacgacgcagaccatcatcggcgatctgctgaacggcccccacggcgggcggctgcgcatcgccgatttgtcggccgatttccggctggccgatccaatggtctatcaaacctggtacggccatgcccatgaggcggtcgagcttcagaaggaggccgtttacggcctgaccgagatcaatcgcgccgccatcgccacggcccgattggtggcggtgcccggctgctatccgaccagcgcccaattgccgctgatcccgctgctgcgcgccggcctgatcgatcccgacgccatcatcatcgatgccaaatccggcgcctcgggggcggggcgcgacgccaaggaaggctcgctccattgcgaggtgtccgagggcatccacgcctatggggtgggcacccatcgccatggccccgagatcgagcagggtctgagtctggccgtcgggcggccggtggcggtgactttcaccccccatctgatgccgatgaaccggggtatcttaagcaccatctatctgcgtgccaccgccggcaatgacgccaccaccctgcgtcaggcgctgagcgcggcctatgccgacgaggccttcgtgcgggtggtgcccgaaggggtgtcgccccatacccgtcatgtgcgcgggtcgaatttcgtgctgatcggcgttcacgccgaccgggtgcccggccgggtgatcgtgacctgcgtcgaggataatctggtcaagggcgcctcgggtcaggcgatccaggatatgaacgtcatgctgggcttccccgaaaccctggggcttgatcagcagccgctgtttccctga

SEQ ID NO: 47739 - protein, 352 aa, Rhodospirillum rubrum ATCC 11170
MSERVNVAILGASGYTGAELVRLLARHPRVTLAALTANRKAGQAFASVFPHLGGLDLPVLSTIEAVDWSAIDFVFCALPHGTTQTIIGDLLNGPHGGRLRIADLSADFRLADPMVYQTWYGHAHEAVELQKEAVYGLTEINRAAIATARLVAVPGCYPTSAQLPLIPLLRAGLIDPDAIIIDAKSGASGAGRDAKEGSLHCEVSEGIHAYGVGTHRHGPEIEQGLSLAVGRPVAVTFTPHLMPMNRGILSTIYLRATAGNDATTLRQALSAAYADEAFVRVVPEGVSPHTRHVRGSNFVLIGVHADRVPGRVIVTCVEDNLVKGASGQAIQDMNVMLGFPETLGLDQQPLFP

SEQ ID NO: 47740 - DNA, 1041 bp, Moorella thermoacetica ATCC 39073
  CDS (1)..(1041): transl_table=11
ttgattaaagccggaattatcggtgctaccggttacacgggagccgaactggtccgcattttgagccggcacccggaagtagagctggtagcccttacctcacgcagttacgccggggaagggatggccggcgtttacccgtcccttaccggctataccaacctcacctgtgagaatttgactcccgatgaggttatggaccgggcggaagttatctttatcgccctgccccacggccacgccgtcccggtagccacccgagccagggaacgggggatcaaagtaattgacctgggcgccgactggcgcttccgtaacgccaggacttacgaagaatggtataaaatccagcacggcaaccacgagctggcggcccgggccgtctacgggctgccggagattcaccgggaggccatccgtagcgccggcctggtggccaatcccggttgttaccccaccagcgccatcctgggcctggctcccctgcttaagggggggtacattgacccggcgaccatcataatcgacgccaagtcaggggtttccggggccggccgggaggccagggttaccagcctctttgttgagtgcaacgaaagcattaatccctacggcgtcgccagtcaccgtcataccccggagatcgaacaggaactcagcgccctggccggcaaagaggttaaagtaacctttaccccccacctgcttcccatcagcagggggatcttgagtaccatgtacgccaccctggtacggccggcatcgacggaggaactgcgaagggtatatgaaaaattttatgccggtgagcccttcgtccacctcctaccccccggccagtggccccacacccgctgggtatatggcagcaacaactgccaccttaatctcgccgtagatacccgcaccggccgggtggtggtggccagcgccatcgacaacctgaccaaaggcgcttccggccaggcggtgcagaacctcaaccttatgtgcggtttcccggagaccatggccctggaagtaccaggattgtgtccataa

SEQ ID NO: 47741 - protein, 346 aa, Moorella thermoacetica ATCC 39073
MIKAGIIGATGYTGAELVRILSRHPEVELVALTSRSYAGEGMAGVYPSLTGYTNLTCENLTPDEVMDRAEVIFIALPHGHAVPVATRARERGIKVIDLGADWRFRNARTYEEWYKIQHGNHELAARAVYGLPEIHREAIRSAGLVANPGCYPTSAILGLAPLLKGGYIDPATIIIDAKSGVSGAGREARVTSLFVECNESINPYGVASHRHTPEIEQELSALAGKEVKVTFTPHLLPISRGILSTMYATLVRPASTEELRRVYEKFYAGEPFVHLLPPGQWPHTRWVYGSNNCHLNLAVDTRTGRVVVASAIDNLTKGASGQAVQNLNLMCGFPETMALEVPGLCP

SEQ ID NO: 47742 - DNA, 945 bp, Burkholderia thailandensis E264
  CDS (1)..(945): transl_table=11
atgagcacgaaagtttttgtcgacggccaggaaggcacgaccggtctgaagatcttcgaatatctgtccgcgcgcagcgacatcgaaatcctgcgcatcgacgaggcgaagcgcaaggacgtcgacgaacgccgccgcctcatcaacgcatcggacgtcacgttcctgtgcctgcccgacgtcgcatcgcgcgaatcggcgacgctcgtcgagaacacgaacacgacgctgatcgacgcgagcaccgcgttccgcacgagcgccgactgggcatacggccttcccgagctgagccgcgcgcagcgcgaacgcatccgcaccgcgaagcgcatcgcggtgccgggctgccatgcatcggcgttcgtgctcgcgatgcgtccgctcgtcgacgcgggtgtcgtcgcgccggacttcgccgcgcacagctactcgatcacgggctacagcggcggcggcaagaagatgatcgccgattacgaggcgggcggcgcgaagctcgcgagcccgcgcccgtacgcgctcggcctcgcgcacaagcatctgccggagatggccgcgcacacgggcctcgcgagcgcaccgatcttcacgccgatcgtcgggccgttctacaagggccttgccgtcaccacgtatttcacgccgggccagctcgcgaagcgcgtgacgccgcaggacgtgcagcgcgtgttcgccgagcattacgcgggcgaagcgttcgtgcgcgtcgcgccgtacgacgcagccgagaatctcgacgacggcttcttcgacgtgcaggcgaacaacgacacgaaccgcgtcgacctgttcgtgttcggcaccgcggagcgcttcgtcaccgtcgcgcggctcgacaacctcggcaagggcgcgtcgggcgccgcgatccagtgcatgaacctcaacatcggcgcggccgaggacaccggcctcgcgcgctga

SEQ ID NO: 47743 - protein, 314 aa, Burkholderia thailandensis E264
MSTKVFVDGQEGTTGLKIFEYLSARSDIEILRIDEAKRKDVDERRRLINASDVTFLCLPDVASRESATLVENTNTTLIDASTAFRTSADWAYGLPELSRAQRERIRTAKRIAVPGCHASAFVLAMRPLVDAGVVAPDFAAHSYSITGYSGGGKKMIADYEAGGAKLASPRPYALGLAHKHLPEMAAHTGLASAPIFTPIVGPFYKGLAVTTYFTPGQLAKRVTPQDVQRVFAEHYAGEAFVRVAPYDAAENLDDGFFDVQANNDTNRVDLFVFGTAERFVTVARLDNLGKGASGAAIQCMNLNIGAAEDTGLAR

SEQ ID NO: 47744 - DNA, 1029 bp, Frankia sp. CcI3
  CDS (1)..(1029): transl_table=11
atgggtgtgacggtagcagttgcgggggcgagtgggtacggcggcggagagctgctgcgcctgctcctcgcccatcccgaaatcaagatcggtgcgctggccgcgaacgcgtccgccggcctgccggtgacggaggtgcatccccacctgcccgacctggagggccgggtgttcacggacgcggccgcgctggccgggaccgacgcggacatcgttttcctggcgctgccgcacggtcagtcggccgcggtggcggccaccctgcccgacaccgtgcgggtcgccgatctgggtgccgatcatcggctcgtcgacccggaggcgtggcggcgcgcctacgggggggagcacgccgggacctggacctacggcctgcccgagctcccctgggcacgggcggagatcgccgcgagccggcgagtggcgattccgggctgctatcccacggcgacctctctcgggctcgtgccgctgctggtcggcggcctcgtggagcccgccgacctggtcgttgtcgcggcgagcggcacgtccggcgcggggcgctcggccacggtgaacctgctcggcagcgaggtgatgggtgacctgaccgcctacaaggtgggcacccaccagcacagacccgagatcacgcagaccctctcccgggccgccggtatgaccgtgacggtgtccttcaccccggtgctcgccccgcttccccgcggcatcctcgcgaccagcaccggccgggccaccccgggcaccgacgcggacgccgtgtacgagacgctgcgggccgcctacgcgggggagccgttcgtccgggtgctgccgccggggcgctggccgcacaccgcggcgacgctcggcgggaacgccgttcatgtgcaagggaccttcgacccggagaccggccgggcgatcgtcgtcaccgcgatcgacaacctcggcaagggcgcggccggccaggcgctgcagtgcgccaacctgatgctcggcctgcccgagaccgccgggctgaccgctcagggcatcgccccctga

SEQ ID NO: 47745 - protein, 342 aa, Frankia sp. CcI3
MGVTVAVAGASGYGGGELLRLLLAHPEIKIGALAANASAGLPVTEVHPHLPDLEGRVFTDAAALAGTDADIVFLALPHGQSAAVAATLPDTVRVADLGADHRLVDPEAWRRAYGGEHAGTWTYGLPELPWARAEIAASRRVAIPGCYPTATSLGLVPLLVGGLVEPADLVVVAASGTSGAGRSATVNLLGSEVMGDLTAYKVGTHQHRPEITQTLSRAAGMTVTVSFTPVLAPLPRGILATSTGRATPGTDADAVYETLRAAYAGEPFVRVLPPGRWPHTAATLGGNAVHVQGTFDPETGRAIVVTAIDNLGKGAAGQALQCANLMLGLPETAGLTAQGIAP

SEQ ID NO: 47746 - DNA, 930 bp, Novosphingobium aromaticivorans DSM 12444
  CDS (1)..(930): transl_table=11
atgacgacttctgtattcatcgacggtgcggcaggcaccacgggcctcgagatcgcggagcggctgtccggacgcagcgagttcgcgctgatcgctctcgaagacgcgcgccgcaaggacgatgccgcgcgggccgaggcgatcaacgacgccgacgtcgtgatcctgtgcctgcctgacgatgccgcgcgcgatgccgtggcgatgatccgcaacgaccgcacccgtgtaatcgacgcttcgaccgcgcatcgcgtcgccgatggctggacatacggctttcccgaaatcgtcggccgcgagaccgtggcgcaggccaagcgcgtttcgaatcccggctgctatccgacgggtttcctcggcctgcttgccccgctggtgcacaatggcctgctgccggcggcatggccctatagctgcaccggcgtgtccggctactcaggcggcggcaaggcgctgatcgcacggttcgagcaggaccgcgacatcgcctggcgtggctatggcctgaccttcgggcacaagcacgtgcccgagatgcagcgctatgccggccttgccattgcgccgatgttctcgccggcggtggtcccggcgcaccgcggcatggtggtcgagatcccgctgccgctgggcgtgatgccgggcaacgttcctgccgaactgttgcgcgccgcgctcacccagttctacgccggatcgccgatcgtgacggtggctcaggaattgccggcggacggcgaaatgctgatgcgcgcctcgatggagccgtgggacggcctcgaactgcacgtcatgggcagcagcgacggcgaacaggcgcggctcgtcgcggttctcgacaacctcggcaagggcgcgagcggggcggcggtacagacgctgaacctgatggcgggactggacgaaacggcgggcctgcggctctag

SEQ ID NO: 47747 - protein, 309 aa, Novosphingobium aromaticivorans DSM 12444
MTTSVFIDGAAGTTGLEIAERLSGRSEFALIALEDARRKDDAARAEAINDADVVILCLPDDAARDAVAMIRNDRTRVIDASTAHRVADGWTYGFPEIVGRETVAQAKRVSNPGCYPTGFLGLLAPLVHNGLLPAAWPYSCTGVSGYSGGGKALIARFEQDRDIAWRGYGLTFGHKHVPEMQRYAGLAIAPMFSPAVVPAHRGMVVEIPLPLGVMPGNVPAELLRAALTQFYAGSPIVTVAQELPADGEMLMRASMEPWDGLELHVMGSSDGEQARLVAVLDNLGKGASGAAVQTLNLMAGLDETAGLRL

SEQ ID NO: 47748 - DNA, 1041 bp, Ehrlichia chaffeensis str. Arkansas
  CDS (1)..(1041): transl_table=11
atgagttatcaagtatcagttgctgtagttggggctacaggttatgtaggggtagagttagtacgtttgttattatctcatcctatggttaagataaagtatttatgtgcaactcaatctagtggaaagttactttcttctaattatttccacatttcgcaggatgatatatccgttaatatttcgtcttttgatgatattgacttatctaaagtagatgtggtttttttgtgcttacctcatggtacatcaagtgaagttgtaagaaaaattcatgatgtagtaagaattatagatttatcagctgattttagaattaaggatgctgaagtatataaacaatggtatggctcacattgttgtccagatcttgtaagagattttgtatacgggttaacggagatatattgggaagatattcaaaggtcaaggtttatagcttgtccaggatgttatcctacctctgtgctaataccattatttccattgttaagactttgtttaataaaaagtcagggtataatagttgatgctaaatcaggtgtgagtggtgctggtaggtctgtaaagcaggataagttgttctgtgaagtttatgatgttattaaatcgtataaaatttcagaccatagacatattcctgaaatagagcaagagctttgttttgctgcctgtagagaagacattaatttacaatttgtgcctaatttaattcctgtcaaaagaggtatgatgtctagtatataccttgagttagaagaaggcgtatcgcttactgatgtccgtgaagcattgttgcttttttacaaagattcatcttttgtttttattgatgaagagaaagctatgacaactaggtctgttgtgggtacgaattattgttatttaggtgtttttcctggaagggtacctaacacgattattatcatgtctgttatagataatttattaaaaggtgcagctggtcaagcagtgcaaaattttaatgttatgatgtcttatgatgagaaaattgctttgtcaaatattccttatttttaa

SEQ ID NO: 47749 - protein, 346 aa, Ehrlichia chaffeensis str. Arkansas
MSYQVSVAVVGATGYVGVELVRLLLSHPMVKIKYLCATQSSGKLLSSNYFHISQDDISVNISSFDDIDLSKVDVVFLCLPHGTSSEVVRKIHDVVRIIDLSADFRIKDAEVYKQWYGSHCCPDLVRDFVYGLTEIYWEDIQRSRFIACPGCYPTSVLIPLFPLLRLCLIKSQGIIVDAKSGVSGAGRSVKQDKLFCEVYDVIKSYKISDHRHIPEIEQELCFAACREDINLQFVPNLIPVKRGMMSSIYLELEEGVSLTDVREALLLFYKDSSFVFIDEEKAMTTRSVVGTNYCYLGVFPGRVPNTIIIMSVIDNLLKGAAGQAVQNFNVMMSYDEKIALSNIPYF

SEQ ID NO: 47750 - DNA, 1062 bp, Desulfitobacterium hafniense Y51
  CDS (1)..(1062): transl_table=11
gtgaaagtaggaattatcggagccacagggtatacaggccaagagctggtgcgtttactccaaaatcaccctgaaatagaattagcctacttaggctcatccagtaatagcggagcagtctatgaggagatgtttccacagttttcagggctaagctccagcctggatgcagggtcagggccagggttaggaacagggaaactggatgatgaacaagtgccggatttggatgttttattctgcgcccttccccacggccttaccgcgggccgaactgcccaatggctgaaccgggggatcaaagtcatcgatttgggagcagatttccgccttaaagatggagcagtttatgaagcctggtacaaagttcagcaccctgctcaagagctgctgccggaagccgtctatgggcttccggaattatatcgggataagattgccggaaaaactctcgtagccaaccccggctgctatcccacagccaccctattggctttggctccattgctgcggaaggggctgctgcaaaaagatggactgatcatcgatgccaaatccggagtttccggagcggggcggggcgttgctttaggaaaccatttcagtgaagtcaatgagaattttaaatcctatggggtagccagtcaccgccataccccggaaatagagcagcaattatcggaggctgccggagcagagctcctggttaattttacccctcatcttgtgccgatgattcggggaatcctggccaccatctacgctcaggttacgcccggcgttacagaggctgatcttaaagcctgctggcaggagcagtatgaggaagaggagttcgtccatatccttccggagggaatctggccccaaacaaagttcgctttgggaagcaatcatagttttctccagcttaaaatagatccgcgaaccgggcgggctatcctggtctcggcgctggataatttggtcaaaggcgcttcagggcaggctattcagaatatgaatctgatctgtggactgcctgagaatatggggcttaagatgagagggctttggccataa

SEQ ID NO: 47751 - protein, 353 aa, Desulfitobacterium hafniense Y51
MKVGIIGATGYTGQELVRLLQNHPEIELAYLGSSSNSGAVYEEMFPQFSGLSSSLDAGSGPGLGTGKLDDEQVPDLDVLFCALPHGLTAGRTAQWLNRGIKVIDLGADFRLKDGAVYEAWYKVQHPAQELLPEAVYGLPELYRDKIAGKTLVANPGCYPTATLLALAPLLRKGLLQKDGLIIDAKSGVSGAGRGVALGNHFSEVNENFKSYGVASHRHTPEIEQQLSEAAGAELLVNFTPHLVPMIRGILATIYAQVTPGVTEADLKACWQEQYEEEEFVHILPEGIWPQTKFALGSNHSFLQLKIDPRTGRAILVSALDNLVKGASGQAIQNMNLICGLPENMGLKMRGLWP

SEQ ID NO: 47752 - DNA, 1041 bp, Saccharophagus degradans 2-40
  CDS (1)..(1041): transl_table=11
gtgattaaagtaggtattgttgggggcaccggctatacaggtgtagagttattacgcatattggcaagccacccacaggcagaagtgactgtgatcacctctcgtgcagaggctgggcgtcaagtgtctgagcttttcccaaacctgcgcggccactacgacttagcctttagcgagccctccaaagaagtgctgcttgagtgcgatgtgatcttttttgccacgccccatggtgtagctcaggcaatgatggctgaactcattgagggcggtgcacgtgttatcgatttatctgccgatttccgtatccgcgatatagccacgtgggagaagtggtacggccaaaaacacggctgcccagatttggttgcgtctgccgtgtatggcttgccagaggtaaaccgcgaaaaaataaaatcggctcagctcattgcgtgcccaggttgttaccccacgtctattcagttgggctttttaccgctgttagaaaaaggcttaatcgatgtgtcttcgcttattgctaactctgcatcaggcaccaccggtgctggaaagcaggcaagcgtacctaatttgttttcggaagcgagtgacagctttaaagcatacggcgcagccggccacaggcacttgcccgaaatagaacaaggcttggtggatataggtggcgaacacgcaaacggcctatcgcttacgtttgtgccgcatttgttgcccactattcgaggtattcactctactctttacgccaaattaaagggcgatgctggagacctacaagccttgtatgagcagcgttatgcgaatgagccgtttgtagatgtgctgcctaagggcgatttcccgcaaacgcgaacggtgaaaagtaccaatatgtgcagaatatccgtgatagagccgcaggaaaggggtaccgtggtcattatgtctgttatcgacaacctcaccaaaggtgcttccggccaaggcgtgcaaaacatgaatataatgtttggcctagacgaaaacatgggtatgtctagcccagctatattgccttag

SEQ ID NO: 47753 - protein, 346 aa, Saccharophagus degradans 2-40
MIKVGIVGGTGYTGVELLRILASHPQAEVTVITSRAEAGRQVSELFPNLRGHYDLAFSEPSKEVLLECDVIFFATPHGVAQAMMAELIEGGARVIDLSADFRIRDIATWEKWYGQKHGCPDLVASAVYGLPEVNREKIKSAQLIACPGCYPTSIQLGFLPLLEKGLIDVSSLIANSASGTTGAGKQASVPNLFSEASDSFKAYGAAGHRHLPEIEQGLVDIGGEHANGLSLTFVPHLLPTIRGIHSTLYAKLKGDAGDLQALYEQRYANEPFVDVLPKGDFPQTRTVKSTNMCRISVIEPQERGTVVIMSVIDNLTKGASGQGVQNMNIMFGLDENMGMSSPAILP

SEQ ID NO: 47754 - DNA, 1053 bp, Methylobacillus flagellatus KT
  CDS (1)..(1053): transl_table=11
atgcatagcaagaagataaaagtgggtattgtcgggggcactgggtataccggcgtcgagttattgcgcttgttggccttgcatcctgatgcggagttgagcgtcatcacctcgcgtggcgaggccgggctgccggttgcggatatgtttcccagcctgcgtgggcgcgtagaccttgcctttaccgatcctgcccaggccgacctgtcgcagtgcgacgtggtgttctttgcaacaccgcatggcgtcgccatgagccaggcacaggcgctggtagcagcgggcgtgaaggtgattgatcttgcagcggacttccggttgcaggatacggcagtcttcgagaaatggtacaaactgccccacggctgtcctgatatcctggcgaatgcggtatatggcattcctgagctgtatcgtgaacaagtgcgttccgcccaggtgatcggcaacccagggtgctacccgacgaccgtattgctgggactggcgccgttgctggagcaaggactggtcgatttgtcggttcccatcatctctgactccaaatcgggtgtttccggcgcgggcagaaaggcggaggttgcgaccttgtttgcggaggccagcgacaacatgaaagcctatggtgttgccggccaccggcaccacccggagattcttgcgcaattgcagctattggctggtacatcgctgcaattcatttttgtgcctcacctggttccgctgattcgcggcatgttgtccaccatttacgtcaagctgtcagcccggggactgaagacagacacccaggctctgtacgagacccgataccagaatgagccgttcgtcgatgttctgcctccaggcagtttgccggaaacgcgtacggttcgcgggggcaaccagttgcgcctggcattgcactcgcaaccggatagcggctacctgacggtgattgcggtgcaggataacctagtcaaaggcgcggcagggcaagcagtgcagaacatgaacatcatgttcgggctggatgagcaggcagggctgaacaccgttcctttgctgccctga

SEQ ID NO: 47755 - protein, 350 aa, Methylobacillus flagellatus KT
MHSKKIKVGIVGGTGYTGVELLRLLALHPDAELSVITSRGEAGLPVADMFPSLRGRVDLAFTDPAQADLSQCDVVFFATPHGVAMSQAQALVAAGVKVIDLAADFRLQDTAVFEKWYKLPHGCPDILANAVYGIPELYREQVRSAQVIGNPGCYPTTVLLGLAPLLEQGLVDLSVPIISDSKSGVSGAGRKAEVATLFAEASDNMKAYGVAGHRHHPEILAQLQLLAGTSLQFIFVPHLVPLIRGMLSTIYVKLSARGLKTDTQALYETRYQNEPFVDVLPPGSLPETRTVRGGNQLRLALHSQPDSGYLTVIAVQDNLVKGAAGQAVQNMNIMFGLDEQAGLNTVPLLP

SEQ ID NO: 47756 - DNA, 948 bp, Burkholderia xenovorans LB400
  CDS (1)..(948): transl_table=11
atgagcacgaaagtttttgtcgacggacaggaaggcacgaccggcctgaagattttcgaatacctgtcgcaacgcgccgacgttgagatcctgcgtatcgaagaagcgaaacgcaaagacctcgaagagcgccgtcgtctcatcaacgcgtcggacgtcacgttcctgtgtctgcccgacgtcgcctcgcgcgagtccgcctcgctggtcgagaacgatcgcaccgtgctgatcgacgccagcaccgcgttccgcacttccgccgagtgggcctacggtctgcccgaactggcgcgctcgcaacgcgagcgtctgcgcacggcgaaacgcattgccgtgccggggtgccatgcgtcggccttcgtgctcgccatgcgtccgctggtcgaagccggcgtggtggcgcccgagttcgccgcgcacgcctactcgattaccggctacagcggcggcggcaagaaaatgattgccgactacgaagcaggcggcaacgacaggctcaagagcccgcgtccgtacgcgctcggtctcacgcacaagcatctgccggaaatggccgcgcataccggcctgaagtcggcgccggtcttcacgccgatcgtcggcgacttctacaagggcctcgcggtcacctcgttcttctcaccgaaccaactggcgaagaaggcaacgccgcaagacgtgcaggcgctattcgccgagtactacgcgggcgaagccttcgtgcacgttgcgccgttcaacgcggaagcgaacctcgacagcggcttcttcgacgtgcaggcgaacaacgacaccaaccgcgtcgacctgttcgtgttcggcaacgaagagcgcttcgtgaccgtcgcacggctggacaacctgggcaagggcgcttcgggcgcggccatccagtgcatgaacctcgcgatcggcgccaatgaagaaagcggcctgaaacgctga

SEQ ID NO: 47757 - protein, 315 aa, Burkholderia xenovorans LB400
MSTKVFVDGQEGTTGLKIFEYLSQRADVEILRIEEAKRKDLEERRRLINASDVTFLCLPDVASRESASLVENDRTVLIDASTAFRTSAEWAYGLPELARSQRERLRTAKRIAVPGCHASAFVLAMRPLVEAGVVAPEFAAHAYSITGYSGGGKKMIADYEAGGNDRLKSPRPYALGLTHKHLPEMAAHTGLKSAPVFTPIVGDFYKGLAVTSFFSPNQLAKKATPQDVQALFAEYYAGEAFVHVAPFNAEANLDSGFFDVQANNDTNRVDLFVFGNEERFVTVARLDNLGKGASGAAIQCMNLAIGANEESGLKR

SEQ ID NO: 47758 - DNA, 1023 bp, Methanococcoides burtonii DSM 6242
  CDS (1)..(1023): transl_table=11
atgaccgatatgataaatgcaggaattgtcggagcttccggttataccggtggtgaactgatgcgtctgcttttgaaccatccgtatgtcaatattgaaacggctacttcacgccgtttgtcaggtgaagcggtaagtgacactcacaaacatctgcgcggactggtggatattgaatttgaggacctttctcctgaagatatcaggggtagatgtgatgttgtcttcgtagctgtaccccatgggaccgcaatgaacatagttcccgagcttattgatgataatactaaagttatcgatcttagtgccgattatcgtttgaagacaagtgtcttcgaacaggtctacaatatggagcatgttgacccaagggatgctgttttcggtcttgtagaactccatcctgaagtgaaggatgagtccttcgttgcaaatccgggatgttatcccacaggtgcaattctgtcagctgctcctcttacggctgcaaaacttctcaagatggccatattcgattccaaatccggaataaccggggcagggataaatcctacaatggtgtcccattatcctaacatggcagaaaatgtccaggcatataaactgaccactcacaggcatcgggaagagattcttcaggaactgaaccggttggacaatgctttcactgatgtgaatttcacaccacacgttgttccttccattcgtggtattcttaccactgcacatcttttcacaaaggagaaaatgtcgttggaggatgtacgcggtctttatcacgaattctacaagaacaagccttttgtgagggtcgttgatgatattccttcccttagcgctgtaaagggctcaaacttctgtgatattgggtttgaggtagatgccaacaccgggcgtgtcgttgttgtttcagcaattgataatctggtaaagggtgcttcaggtcaggcgatccagaacatgaaccttatgtgcggttttgatgagaccaccggtcttcgtatagctgcaacatccccataa

SEQ ID NO: 47759 - protein, 340 aa, Methanococcoides burtonii DSM 6242
MTDMINAGIVGASGYTGGELMRLLLNHPYVNIETATSRRLSGEAVSDTHKHLRGLVDIEFEDLSPEDIRGRCDVVFVAVPHGTAMNIVPELIDDNTKVIDLSADYRLKTSVFEQVYNMEHVDPRDAVFGLVELHPEVKDESFVANPGCYPTGAILSAAPLTAAKLLKMAIFDSKSGITGAGINPTMVSHYPNMAENVQAYKLTTHRHREEILQELNRLDNAFTDVNFTPHVVPSIRGILTTAHLFTKEKMSLEDVRGLYHEFYKNKPFVRVVDDIPSLSAVKGSNFCDIGFEVDANTGRVVVVSAIDNLVKGASGQAIQNMNLMCGFDETTGLRIAATSP

SEQ ID NO: 47760 - DNA, 1008 bp, Ralstonia metallidurans CH34
  CDS (1)..(1008): transl_table=11
atgctggttctccgcccccaaggacgcgagacttttcgcatttttcagagtgagtccgccatggttttcaaagtgttcgtcgatggtcaggaaggcaccaccggtctccggctgcttgactatctctcgggtcgcaccgatgtggaactgctgcgcattgccgatgacaagcgcaaggacccgcaggagcgagcacgattcctgaacgcctcggacgtctctttcctgtgcctgccggacgtggcctcgcgcgaggccgtgtcgctggtgaccaaccccgacacctgcgtgatcgacgccagcacggcgttccgcacggctgacaactgggcctacggcctgccggaactgacccgtggccagcgcgagaaggtgcgcagcagcaagcgcatcgccgtgccgggctgccacgccagcgcgttcgtgctggccgtgcgtccgctggtggaagccggcctgatgcctgccgactatccggcttcggcgttctcgctgaccggttacagcggcggcggcaagtcgatgatcgcggagttcgaagccggcggaaatccgaagctgatgagcccgcgtccgtacgcgctgggtctggcgcacaagcacctgccggaaatgcgtgtgcagaccggcctgtcgcaggcgccgatcttcaacccgatcgtcggcaacttcctgaagggtctggccgtgacggtgccggtgtatccggggctgctgtcgcgcaaggccgatgcggaagccatcctcgacatctaccgcaagcactatgaaggcgagcagttcgtgcgcgtccatccgttcaacagcgacgccaatctggacaacggcttcttcgacgtccaggcgaacaacgacaccaaccgcgtggacctgttcgtcttcggcaacgaagaacgcctgaacctggtggcgcgcctggacaacctcggcaagggtgcggccggtgcggccgtgcaatgcatgaacgtccatatcggcgccgacgaagccacggggctcgttgcctga

SEQ ID NO: 47761 - protein, 335 aa, Ralstonia metallidurans CH34
MLVLRPQGRETFRIFQSESAMVFKVFVDGQEGTTGLRLLDYLSGRTDVELLRIADDKRKDPQERARFLNASDVSFLCLPDVASREAVSLVTNPDTCVIDASTAFRTADNWAYGLPELTRGQREKVRSSKRIAVPGCHASAFVLAVRPLVEAGLMPADYPASAFSLTGYSGGGKSMIAEFEAGGNPKLMSPRPYALGLAHKHLPEMRVQTGLSQAPIFNPIVGNFLKGLAVTVPVYPGLLSRKADAEAILDIYRKHYEGEQFVRVHPFNSDANLDNGFFDVQANNDTNRVDLFVFGNEERLNLVARLDNLGKGAAGAAVQCMNVHIGADEATGLVA

SEQ ID NO: 47762 - DNA, 930 bp, Ralstonia metallidurans CH34
  CDS (1)..(930): transl_table=11
atgagctctcctattgttttcatcgacggcgaccaaggcaccactgggttgctcatccacgaacggctgcgtaaccggaccgatatcagactgatcacgcttgctgccgcggagcgcaaggatttgcagcgtcgcgcggaagccatcaacgcctgcgacatcgccatcctctgcttgccggatgccgccgcgcgcgaggctgtggccacgattgtcaatcctgcggttcgcgtcatcgacgcaagctccgcgcaccgtacacagccggactggacttacgggtttcctgagatggcgccggggcaggctgagaaaattgcaaacgcgcgccgggtcaccaatcccggttgctatccgaccggtgcgattggcctgctgcgtccgttggtgcaggctgggctcatcccgggcgattaccccatcagcattcatgcggtatccggctactccggacggggacgcgccggcgtggaggaatacgagggaccgggagccgccagcgcgccttcctaccaggtatatggcctggaactcgcgcacaagcacacgccggagatccagcagcacgccgggctcgcgcaaccgcctattttcgtccccgcatacggcgcgttccgccagggcatcgtgctgactgtgccgctggcgttgcggctgctggcacccggcgtggatggcgccacgttacacgcctgcctcgcgcgccactatgccgaggcagaccacgtgcaggtcttgccgctgtcagaatcgtccgccgtgaagcacctggacccgcaattgctgaatggcacgaacgacatgcgcctgagcgtatttcctggcacggaacacgggcacgttctcctgtcagccgttttcgacaacctcggcaagggcgcatccggcgctgcgattcaaaacctgaacctgatgctcgcgtcgcgatag

SEQ ID NO: 47763 - protein, 309 aa, Ralstonia metallidurans CH34
MSSPIVFIDGDQGTTGLLIHERLRNRTDIRLITLAAAERKDLQRRAEAINACDIAILCLPDAAAREAVATIVNPAVRVIDASSAHRTQPDWTYGFPEMAPGQAEKIANARRVTNPGCYPTGAIGLLRPLVQAGLIPGDYPISIHAVSGYSGRGRAGVEEYEGPGAASAPSYQVYGLELAHKHTPEIQQHAGLAQPPIFVPAYGAFRQGIVLTVPLALRLLAPGVDGATLHACLARHYAEADHVQVLPLSESSAVKHLDPQLLNGTNDMRLSVFPGTEHGHVLLSAVFDNLGKGASGAAIQNLNLMLASR

SEQ ID NO: 47764 - DNA, 1053 bp, Acidobacteria bacterium Ellin345
  CDS (1)..(1053): transl_table=11
atgtccgctgctgtccagtccgccgttctcggcgctaccggctattccggctatgagttgaccaagcggttgctcgcgcatccgtccgtcaagcagcctgcgctcttccgcgtgaatcccgatcccacgcagtcgccgaaccttgccgactggtacccgcagctctccggcaacggctacggccagctcgtgatggacgcattctcgtgggacgcactcaaggccaaaggcacggacgtcatcttcttctgcaccccgcacgaagtctcccgcgaactcgcgatcgaagcgggcgaccgcggctttcgcgtcgtggacctcagcggcgcgtggcgtttgaaggaagcaactaaccgtgccgtgtacaagttcgaagatcatgacccggctcaagcagccctgctcgaccagcaggccgtctacggcagccccgaattgcataaatatgcaatcgaaaaagcagagctcgtcgccaaccctggctgctatgcgacctcgatcatcctcgctcttgcggcctggaccaacgacggcttgatcgacctcgaattcggagtaatctgcgactccaagtccggcgtcagtggcgccggcaaggcaccgagtccgacgactcacttcgtagaagtcgccgacagcctctccgcctacagcgttttcggccatcgccacaccggagaaatgctcgagcagctcggtctcgaagcttcgcagcttcagttcacgccgcacttgctgccgattccgcgcggcattctctcgacgatctacgttcgcccgaagactggcgttaccgccgaggtcctcgagtacagcctgaaagaattcgccgtcggtaagcccttcgtgcgcgtcttcgcgcccggcaagctgccgcagatcaagtactcgctgcacaccaactactgcgatatcggcttccagctctcgcccgacggctcgcgcgcagtcctcgtctcttgtcttgacaacctagtcaaaggcgcagccggacaggcgatccagaacatgaacctgatgttcggcttcgacgaacgagagggcctgcaatga

SEQ ID NO: 47765 - protein, 350 aa, Acidobacteria bacterium Ellin345
MSAAVQSAVLGATGYSGYELTKRLLAHPSVKQPALFRVNPDPTQSPNLADWYPQLSGNGYGQLVMDAFSWDALKAKGTDVIFFCTPHEVSRELAIEAGDRGFRVVDLSGAWRLKEATNRAVYKFEDHDPAQAALLDQQAVYGSPELHKYAIEKAELVANPGCYATSIILALAAWTNDGLIDLEFGVICDSKSGVSGAGKAPSPTTHFVEVADSLSAYSVFGHRHTGEMLEQLGLEASQLQFTPHLLPIPRGILSTIYVRPKTGVTAEVLEYSLKEFAVGKPFVRVFAPGKLPQIKYSLHTNYCDIGFQLSPDGSRAVLVSCLDNLVKGAAGQAIQNMNLMFGFDEREGLQ

SEQ ID NO: 47766 - DNA, 1029 bp, Silicibacter sp. TM1040
  CDS (1)..(1029): transl_table=11
atgacccataacgtggcaattcttggtgcgtccggctataccggcgcagagctgatccggctgatttctcagcacccgagcatcaccatcaaagccctcgcagccgagcgcaaggcaggcatggagatggcagatgtattcccgcatctgcgtcatctttcgctgccaaccctttgcaaaatagacgaaatcgacttcgcacagatcgatctgtgtttctgtgctctgccgcataagaccagccaagaggtgatcgcgaaactgccgggtgatctgaaaatcgtggatctgtcggcggacttccggctgcgcgacccggaggcctatgaaaaatggtacggcaacccgcatgcggcgctcgagcagcagcaggaggcggtctatggtctcaccgaattttatcgcgatgagattaagggcgcgcggctggtggcgggcacgggctgcaatgcggccaccgggcagtttgcgctgcggccgctgatcgcggcgggtgtgatcgaccttgatgagatcatcctcgatatgaaatgtgcggtctccggcgccgggcgggcgctcaaggaaaacctgctgcatgcggagctgagcgaaggctataacgcctatgccattggtggcacccaccggcatatcggcgagttcgatcaggagttctcggctatcgctgggcggcccgtgaaggtccagttcaccccgcatctgctgccggtgaaccgggggatccttgcgaccacctacgtcaaaggcgatgctcaggcgatctatgagacatttgccaaggcctatgccgatgagccctttgtcgagctgctgccttttggcgaggcgccttccacccatcatgtgcgcgggtcaaactttgtacatatcggggtcactgccgatcgcatcgcagggcgcgcaattgttatcgtggcgttggataacctgacaaaaggtagcagcggtcaggccttgcagaatgcaaacctgatgttaggtgaggacgagacagccgggctgatgatggcaccgctgttcccctga

SEQ ID NO: 47767 - protein, 342 aa, Silicibacter sp. TM1040
MTHNVAILGASGYTGAELIRLISQHPSITIKALAAERKAGMEMADVFPHLRHLSLPTLCKIDEIDFAQIDLCFCALPHKTSQEVIAKLPGDLKIVDLSADFRLRDPEAYEKWYGNPHAALEQQQEAVYGLTEFYRDEIKGARLVAGTGCNAATGQFALRPLIAAGVIDLDEIILDMKCAVSGAGRALKENLLHAELSEGYNAYAIGGTHRHIGEFDQEFSAIAGRPVKVQFTPHLLPVNRGILATTYVKGDAQAIYETFAKAYADEPFVELLPFGEAPSTHHVRGSNFVHIGVTADRIAGRAIVIVALDNLTKGSSGQALQNANLMLGEDETAGLMMAPLFP

SEQ ID NO: 47768 - DNA, 1068 bp, Myxococcus xanthus DK 1622
  CDS (1)..(1068): transl_table=11
atgacgcaggtcaacatctacatcctgggtgcctccggcttcggcggcggcgagctcttgcgcatcctctccggccaccccgcggtgggcagcatccgcgcggtgtcgcggcaccacgccggcgagcccatccacaaggtgcacccgcacctgcgcggactggtggagggccgcttcgagggcgagcccgactggaagtggctggcggactgcgagcagcccgtcgtcttcagcgcgctgggccacggcgacctggccaagcagttcgcgggcctggagaagcagtgggcggaggtcggcatcgccgagcgcctgctgctggtggacctgtcctccgacttccggctggaccacccgggccgctacgcgggcgcgtacggccggccccacccgtccccggagctgctgggcaccttcacctacggcctcaccgagtggaagcgcgacgcggtgaagacggcgaagcgcatcgccaacccgggctgcttcgccacggcggtgcagttggcgctcctgcccatcgcctccacgccgggcttggggctgctcgcggtgtccggcgtcacgggctcgtccggctccggctcgctgcccggtgagggcacgcaccacccgacgcgtgcgcaagacttccgcgcgtacaagccgctggagcaccagcacgaggccgaggtggaggtcatgctggtcgcccacggcgcgcagcggcaccggttggccttcgtcccgcactcggcgcccatggtgcgcggcatcttcgccaccgtgcagttcgagtggccggagcacggcggcgcggtggtgacggcgtcgctgatggagaagtaccgccgctactacgagggctcgaagttcgtgcgcatcgtcgagggtacgccgcgcatcgctgcggtggccggcagcaacttctgcgacatcgcggtggccaccaagggccgctcggtggccgtcatggcggcgctcgacaacctggtgaagggcatggccggccaggcggtgcagaacttcaacgtcgcgctggggctgccggaagacacggcgctgcgccaggccgcctgctacccgtag

SEQ ID NO: 47769 - protein, 355 aa, Myxococcus xanthus DK 1622
MTQVNIYILGASGFGGGELLRILSGHPAVGSIRAVSRHHAGEPIHKVHPHLRGLVEGRFEGEPDWKWLADCEQPVVFSALGHGDLAKQFAGLEKQWAEVGIAERLLLVDLSSDFRLDHPGRYAGAYGRPHPSPELLGTFTYGLTEWKRDAVKTAKRIANPGCFATAVQLALLPIASTPGLGLLAVSGVTGSSGSGSLPGEGTHHPTRAQDFRAYKPLEHQHEAEVEVMLVAHGAQRHRLAFVPHSAPMVRGIFATVQFEWPEHGGAVVTASLMEKYRRYYEGSKFVRIVEGTPRIAAVAGSNFCDIAVATKGRSVAVMAALDNLVKGMAGQAVQNFNVALGLPEDTALRQAACYP

SEQ ID NO: 47770 - DNA, 1050 bp, Mycobacterium sp. MCS
  CDS (1)..(1050): transl_table=11
atgcaaactctatgcatgacttctgtcgcggtcgccggggccagcggatacgccggcggggagatcctgcgcctgctgctcgggcatcccgcctactccgacggccggctcaccatcggtgcgctgaccgctgcgggcagtgcgggcacgatgctcggtgagcaccacccccatctgctgccgctggccggccgggtgctcgaggccaccgacgccgagacgctgtccggccacgacgtcgttttcctcggcctcccgcacggccactccgccgcgctggccgaacaactcggcgacgatacgctgatcatcgactgcggcgccgacttccggctcaccgatgccgccgcgtgggaacggttctacggttcggcgcacgccggcagctggccctacggcctgcccgagctgccgggtgcccgggagaagctgaccggtgccaagcggatcgccgtgcccggctgctatcccaccgcggcgctgctggcgctgctgcccgccgtggccgaagacctcgtagaaccggcggtcaccgtcgtggcggtcagcggcacctccggcgcgggccgggccgccaaacccgacctgctcggcgcggaggtgatcggatccgcgcgtgcctacaacgtcggcggcaagcaccggcacaccccggagatcgcgcagggcctgcgggccgtgacggacaaggacgtcacggtgtcgttcaccccggtgctgatccccacctcgcggggcatcctcgccacctgcaccgcccgcacctccgcgtcgctgtcgcagctgcgggccgcctacgagaaggcttacgacgcagaacctttcattcacctgctgcccgaggggcaactgcccaagaccggttcggtgatcggcagcaacgccgcgcagatcgcggtcgcgctcgacgaggatgcgcagacgttcgttgcgatcgcggcgatcgacaacttgaccaaggggaccggtggggcggcggtgcagtcgatgaacctggcgctgggttggccggagaccgagggcctgtcgatcgtgggggtcgcgccgtga

SEQ ID NO: 47771 - protein, 349 aa, Mycobacterium sp. MCS
MQTLCMTSVAVAGASGYAGGEILRLLLGHPAYSDGRLTIGALTAAGSAGTMLGEHHPHLLPLAGRVLEATDAETLSGHDVVFLGLPHGHSAALAEQLGDDTLIIDCGADFRLTDAAAWERFYGSAHAGSWPYGLPELPGAREKLTGAKRIAVPGCYPTAALLALLPAVAEDLVEPAVTVVAVSGTSGAGRAAKPDLLGAEVIGSARAYNVGGKHRHTPEIAQGLRAVTDKDVTVSFTPVLIPTSRGILATCTARTSASLSQLRAAYEKAYDAEPFIHLLPEGQLPKTGSVIGSNAAQIAVALDEDAQTFVAIAAIDNLTKGTGGAAVQSMNLALGWPETEGLSIVGVAP

SEQ ID NO: 47772 - DNA, 1023 bp, Rubrobacter xylanophilus DSM 9941
  CDS (1)..(1023): transl_table=11
atgggactcagcgtagggatctacggcggcagcgggtacgtgggcgtggagctggtacggctgcttgcggggcacccggaggtggggagccttgcggtggcctcccgggggcatgcggggcggaggataggcgaggtgtacccgcaggtggccgtcgggggggagtacctggacccgtcggaggtggacgtctcctctctggacgtggcctttgtggcctacgggcacggggagagcgcggaggcggtgcgcgggctgctggagggcggggtacggctggtggtggacctctcggcggacttccggctgccggacgtgcgggtctatgaggagtggtacggggagcacccggccccggagctgctcggggaggcgcactacgggctaccggaggtcttcggggctctggaggggaggctcgtggccaaccccggctgttatcccacggcggccatcctcgcgctcgcgccggtggtgcggcggatgggcggggaggtacgctcggtgaccatcaacgcgctctcgggggtcagcggggcgggggcgaagcccagcgcccggacccacttcgtgagcgtcaacgagagcgtctccccttatggggtttcgggtggcgagccccggcaccgccacacgccggagatagagatcatgctccgccgcctcggggaggcgccgccggtgaccttcgtgccccacctgctgcccataagccggggcgagctggagacgataaccgtggaggccggggagctgccgggcgcggaggaggtgctcggctggtaccgggaggactacggggggtggcgtttcgtggaggcccgggaggaggtgccgcacatctcgcacgtggccaacaccaaccgggccaggctctccgcggcggtggaccgcagggcggggaagctgctcctgttcgcggcggtggacaacctgctcaagggggccgccggggaggccgtgcagaacatgaacctcgcgctcgggtacccggaggatctggggctcgagcacctcaggtag

SEQ ID NO: 47773 - protein, 340 aa, Rubrobacter xylanophilus DSM 9941
MGLSVGIYGGSGYVGVELVRLLAGHPEVGSLAVASRGHAGRRIGEVYPQVAVGGEYLDPSEVDVSSLDVAFVAYGHGESAEAVRGLLEGGVRLVVDLSADFRLPDVRVYEEWYGEHPAPELLGEAHYGLPEVFGALEGRLVANPGCYPTAAILALAPVVRRMGGEVRSVTINALSGVSGAGAKPSARTHFVSVNESVSPYGVSGGEPRHRHTPEIEIMLRRLGEAPPVTFVPHLLPISRGELETITVEAGELPGAEEVLGWYREDYGGWRFVEAREEVPHISHVANTNRARLSAAVDRRAGKLLLFAAVDNLLKGAAGEAVQNMNLALGYPEDLGLEHLR

SEQ ID NO: 47774 - DNA, 933 bp, Mesorhizobium sp. BNC1
  CDS (1)..(933): transl_table=11
atgacggcaaagatcttcatcgacggcgaacacggcaccacggggctccagatccgcgcccgccttggagagcgcagggatatcgaactcctctcgatccccgtggagcggcgtaaggacccagccgcccgcgcagagttcctgaacgcggccgatatagccattctctgcctgccggacgatgcggcgcgcgaaagcgtctcgctcatcgcgaacgacacgacgcgcgtgatcgacgcctccaccgcgtaccgcgtgagcgaaggctgggcctatggctttcccgaaatggacaagagccagtccaaggccattgcgcaggcgaagcgtgtcgccaatcccggctgctggccgcagggtccaatcgcccttctgcgtccgctcgtctccgccggtctgctgccagcggatttcccggtcacgatcaacggcattaccggctattccggcggcggccgctcgatgatcgaggactatgagggcaagggcgaggacgcgccggaattcttcccctacggcctcacactcagccacaagcacctgccggagctgcgcacctacgccaagcttgcgcgcgacccgctgatgcagccggtggtcggcaattttgcccagggcatgatcactatggtgccgcttcagctcggccaccttccccgcgtgcccaaaggcgaggagctgcatgcggccatagccgatcactatgcgggcatcgaggggagcgccgtcgaggttgcgccgttccaggccatcgagcgttcgccggaaatcgagcccgagcgctacaacgacacgaataccatgcggctctacgtcttcgccaatgatgcgcgggcgcaggcgctgctcttggctgtctatgacaatctcggcaagggcgcgtcgggcgctgccgtgcagaatctcgacctgatgctttccgggctccgctga

SEQ ID NO: 47775 - protein, 310 aa, Mesorhizobium sp. BNC1
MTAKIFIDGEHGTTGLQIRARLGERRDIELLSIPVERRKDPAARAEFLNAADIAILCLPDDAARESVSLIANDTTRVIDASTAYRVSEGWAYGFPEMDKSQSKAIAQAKRVANPGCWPQGPIALLRPLVSAGLLPADFPVTINGITGYSGGGRSMIEDYEGKGEDAPEFFPYGLTLSHKHLPELRTYAKLARDPLMQPVVGNFAQGMITMVPLQLGHLPRVPKGEELHAAIADHYAGIEGSAVEVAPFQAIERSPEIEPERYNDTNTMRLYVFANDARAQALLLAVYDNLGKGASGAAVQNLDLMLSGLR

SEQ ID NO: 47776 - DNA, 975 bp, Cytophaga hutchinsonii ATCC 33406
  CDS (1)..(975): transl_table=11
atgagcacaaaaataaaaataggcatcgttggcggtgcaggatatacaggcggagaattgcttcgtattctggtaaatcacccgaatgcggagattgtattcgtacacagcaacagcaatgcaggtaatccaatctataaagttcatacagaccttatcggcagcacggatcttgtttttacaggtgaattaagcaatgctattgatgtattattcttatgcgttggtcacggtgatgcaattaaattcctgcaagctaatccggttgagtcacacattaagatcatcgatttaagtcaggatttccgtattgaaaaagacggcaacgactttatttatggtttaccggaattacagcgtgataaaataaagcttgctaaaaatattgcaaacccgggttgtttcgcaacagcgattcagttgggcttacttccgcttgcagcagagaacgtattaacaaacgatgtgcatgtatctggcataacaggttcaaccggggccggacaatcgttatcacagacgtcacacttcagctggagaaataataatatgtctgtttacaaggcattaaatcaccagcatttaaaagagatccgccagagtttaacgaatctgcaatcttcattagagaagaatattcatttcatcccgtaccgaggtgattttacacgtggtatcatagcaaccatgtatacgccatgcagctggacaattgacgaagctatagcgaagtacaaagcgtactatgcttcgcatccattcacacatgtggtagatgagaacattgatctaaaacaagtagtgaatacaaacaactgcctgctgtatctggaaaagcacggcgaccagttaatgattgtaagcatcatcgacaacttgttgaaaggtgcttcgggccatgcggttcagaatatgaatctgatgttcgggctggaagagacagttggtttgaggttgaaagcagcttctttttaa

SEQ ID NO: 47777 - protein, 324 aa, Cytophaga hutchinsonii ATCC 33406
MSTKIKIGIVGGAGYTGGELLRILVNHPNAEIVFVHSNSNAGNPIYKVHTDLIGSTDLVFTGELSNAIDVLFLCVGHGDAIKFLQANPVESHIKIIDLSQDFRIEKDGNDFIYGLPELQRDKIKLAKNIANPGCFATAIQLGLLPLAAENVLTNDVHVSGITGSTGAGQSLSQTSHFSWRNNNMSVYKALNHQHLKEIRQSLTNLQSSLEKNIHFIPYRGDFTRGIIATMYTPCSWTIDEAIAKYKAYYASHPFTHVVDENIDLKQVVNTNNCLLYLEKHGDQLMIVSIIDNLLKGASGHAVQNMNLMFGLEETVGLRLKAASF

SEQ ID NO: 47778 - DNA, 1056 bp, Rhodococcus sp. RHA1
  CDS (1)..(1056): transl_table=11
atgactgagcacgcgggaaaaccgatcaggattgccgtcgccggcgcgagcggatacgccggtggcgaagtgctgcgtctgctgctggggcacccgtcgtacgcggacggttcgctcgtcatcggcgcgctcactgccggcggcaatgccggatcgactctgggctcgcaccatccgcacctgcttcctctcgccgaccgagtgctcgaggacaccaccgtcgagacgctcgccggccacgacgtggtgtttctcggtctgccgcacggcaattcggcgcagtacgcgaaggcgctgcccgagtccacggtcatcatcgactgcggcgccgacttccggctgacgaacgccgaggactgggagcggtactacaagagcccgcacgcaggtagctggccgtacggacttccggaactgccgggtgcccgcgagaaactcgtcggcgccacacgcatcgccgtccccgggtgcttcccgacggtgtcgagtctggcgatggcccccgcggtcgcggcgggtgtcgtcgaaccgcgagtcacgatcgtcgccgtcaccggtgcctccggcgcgggccgcgcacccaaggccgatctgctcggctcggaggtgatgggttcggtccgtgcctacggtgtcggtggcgtgcaccgccacaccccggagatcatccagaacctttccgaactcgccggtgagcgcgtcaccgtgtcgttcacccccgtgctggcgccgatgccgcgcggcatcctcgccacgtgcaccgcggccaccacggcgtccgaggacgaggtgcgcgcgatctacgaaaaggcctacgcggacgagccgttcgtgcacgtcctgccccagggtgtgttgccgcagaccggtgccgtcgtcggatcgaacgcggtccagatcgccgtgacggtcgacgccgacgccggtcagatcgtcgtggtcgcggtgatcgacaaccttgcgaagggcaccgccggcggagcggtgcaatcgatgaatcttgcgcttggactacccgagaccgccggtctctcgacagtgggagttgccccgtga

SEQ ID NO: 47779 - protein, 351 aa, Rhodococcus sp. RHA1
MTEHAGKPIRIAVAGASGYAGGEVLRLLLGHPSYADGSLVIGALTAGGNAGSTLGSHHPHLLPLADRVLEDTTVETLAGHDVVFLGLPHGNSAQYAKALPESTVIIDCGADFRLTNAEDWERYYKSPHAGSWPYGLPELPGAREKLVGATRIAVPGCFPTVSSLAMAPAVAAGVVEPRVTIVAVTGASGAGRAPKADLLGSEVMGSVRAYGVGGVHRHTPEIIQNLSELAGERVTVSFTPVLAPMPRGILATCTAATTASEDEVRAIYEKAYADEPFVHVLPQGVLPQTGAVVGSNAVQIAVTVDADAGQIVVVAVIDNLAKGTAGGAVQSMNLALGLPETAGLSTVGVAP

SEQ ID NO: 47780 - DNA, 1059 bp, Trichodesmium erythraeum IMS101
  CDS (1)..(1059): transl_table=11
atgaaaaaatcagcacctgtgccaataggaattgtaggtgcttccggctatggcggggtgcaacttgtgaagctgcttcagaatcatcccaaagtagaagttgtttatttgggaggggatagcagtgcaggaaaacctttttcttcaatctaccctcacttagagcattctgtagacttaaaaatagaatcaatagagttggacaaaattgccaataaatctcagatagttttcctctccctacctaatggtctagcttggaagatggcacccaacctattagaaaaaggatgtaaagtattagacctctcagctgactatcggtttagtaatcttgaaacctatcaatcttggtatggcggagaacgtacagatcaaaaaatagcagctactgcggtttatggtttaccagaattgtatcgcgatcgtatagccaatgctcaacttattggttgtcctggttgttatgttactgctagtcttttagcgctttcgccactgtttaaacagggtttgatagtaccagaaactgcaattattgatgctaaatcaggtacatcgggaggtggccgaaaagcaaatattaatatgttactggctgaagcagataactctgttggtccttacggagtagctagtcatcgacatactccagaaattgaacaaatttgtagtaacctggcaggttatgatgtgaaagtgcaattcactcctcatctaatgccaatggtacgggggatattagctacagtatatggtactctccgagaccctggattggtgcgagaagacttattgactatttacaatgctttttatcgtaattgtccttgggtaaaggtattgcccagtggtacttatcctcaaactaagtgggcaagtggtactaatctttgttatcttggtattgaggtggatcatcgtactgatagagtgattattatgtcagccattgataatctaatcaaaggtcaagctggccagagtattcagtgtatgaatttgatgatgggttgggaagagactttgggtttgcctcaattaagtttttatccctaa

SEQ ID NO: 47781 - protein, 352 aa, Trichodesmium erythraeum IMS101
MKKSAPVPIGIVGASGYGGVQLVKLLQNHPKVEVVYLGGDSSAGKPFSSIYPHLEHSVDLKIESIELDKIANKSQIVFLSLPNGLAWKMAPNLLEKGCKVLDLSADYRFSNLETYQSWYGGERTDQKIAATAVYGLPELYRDRIANAQLIGCPGCYVTASLLALSPLFKQGLIVPETAIIDAKSGTSGGGRKANINMLLAEADNSVGPYGVASHRHTPEIEQICSNLAGYDVKVQFTPHLMPMVRGILATVYGTLRDPGLVREDLLTIYNAFYRNCPWVKVLPSGTYPQTKWASGTNLCYLGIEVDHRTDRVIIMSAIDNLIKGQAGQSIQCMNLMMGWEETLGLPQLSFYP

SEQ ID NO: 47782 - DNA, 1065 bp, Synechococcus sp. CC9311
  CDS (1)..(1065): transl_table=11
atggcgatcaaacgagttgcggtcatcggagcatccggttatgggggcttgcaaagcctgaggctgttgcagtcccatcccgaatttgagatcagcctgctcggcggagaacgcagtgctggcaaacgctggagtgagctctgcccgtttttgccccttccggatgatccccttgtggagagtcctgaccccaccagaattgccgagtgcgctgatgtagctctgctcagccttcccaatggactggcgagtggactggttcctggacttcttgaacgtggtgttcgggtcgttgatctctccgctgattaccgctaccgctcgctcgatcagtgggcgagggtctatgcccaggagtctctctcttgcaagcgcacggatactgacctgtgtatggaggcggtctacggattgcctgagtggaatgcttccgccatcgcaacagcacgattggttgccgcacctggctgttttcccaccgcgagcttgctgcctttgttgcccttcctcaagcaagggttgatcgaacaagacggtgtgatcatcgatgcaaagacgggcacatccggtggtggacgcgctgcgaaagaacatcttctgttggcggaggcctctgaatcgatctgtccttacggcgttgtaggccatcgccacacctcagaaattgaacagatggccagtgaggttgcaggatgtggcatccagttgcagttcacaccgcatctggttccaatggttcgcgggctgctgtcaacggtgtacgccagattgcgggaccctggactaacggccgaagactgcaccactgttctcgatagtttttaccgccatcacgcctgcgtcacggtgttacctgttggcacctacccagcaaccaaatgggccaaacacaccaaccgggcctttttatccgtgcaagtcgacaaccgaaccggacggcttgtcttgatgagcgctgtggacaacttgatgaaaggacaggccgcacaagcctttcaatgtctcaatctcatggcaggtctgccgggtgaaacaggtttaccgctagttcccttctatccctga

SEQ ID NO: 47783 - protein, 354 aa, Synechococcus sp. CC9311
MAIKRVAVIGASGYGGLQSLRLLQSHPEFEISLLGGERSAGKRWSELCPFLPLPDDPLVESPDPTRIAECADVALLSLPNGLASGLVPGLLERGVRVVDLSADYRYRSLDQWARVYAQESLSCKRTDTDLCMEAVYGLPEWNASAIATARLVAAPGCFPTASLLPLLPFLKQGLIEQDGVIIDAKTGTSGGGRAAKEHLLLAEASESICPYGVVGHRHTSEIEQMASEVAGCGIQLQFTPHLVPMVRGLLSTVYARLRDPGLTAEDCTTVLDSFYRHHACVTVLPVGTYPATKWAKHTNRAFLSVQVDNRTGRLVLMSAVDNLMKGQAAQAFQCLNLMAGLPGETGLPLVPFYP

SEQ ID NO: 47784 - DNA, 981 bp, Shewanella sp. MR-4
  CDS (1)..(981): transl_table=11
atgaaaaacatcgccattatcggtgccagtggttacacaggcgcacaactaacagctttagtccatgcggagtctgaattatcgattcaaggtctgtatgtctctgaaaatagtttagataaaggtagagctttagcagatttgtaccctgtctacagccacattgatttagctctgtcaccactgactgaagaagcgaaggcgaagatcgtcgccgaggcggatgccgtggtgttagcgaccgaacattcggtgagtttgcatttagcggcgtggttctataaccaaggtttagccgtgtttgacttaagcggtgcctatcgtttcagcgatgtggcgcagtaccctaagtggtacggttttgagcacgaatatcctgaagtgttggccaaggccgtctatggtctagccgagtggaatgccaaagaagtcgccgcgactaaaatgattgctgtgccaggttgttacccaacagcatcattaacagcattgaaaccattaaagaatttactgacgtcagcctatccagtgatcaatgcggttagtggtgtgacgggcgcgggtcgtaaggcgcagctgcataccagtttttgcgaagtgagcctcacaccctacggcgtattaggccacagacatcaacccgaaattgccactcaactggggcaagaggtgatcttcacgccgcacctaggcaacttcaagcgcggcattttagcgaccatcacggtacagctaaaaccaggcactaccactgccgatgtggctgcggcatacagtgtgtatgaccaagctccgctggtgacagtgaaacagaaccagttcccgaaagtggatgatgtggtgctgactccgaattgccacttaggttggaagtttgatgagaacagtggctacttagtggttgccagtgccatcgacaatttgatgaaaggcgcggcgagccaagccctgcaatgcataaagattcactttaacctttaa

SEQ ID NO: 47785 - protein, 326 aa, Shewanella sp. MR-4
MKNIAIIGASGYTGAQLTALVHAESELSIQGLYVSENSLDKGRALADLYPVYSHIDLALSPLTEEAKAKIVAEADAVVLATEHSVSLHLAAWFYNQGLAVFDLSGAYRFSDVAQYPKWYGFEHEYPEVLAKAVYGLAEWNAKEVAATKMIAVPGCYPTASLTALKPLKNLLTSAYPVINAVSGVTGAGRKAQLHTSFCEVSLTPYGVLGHRHQPEIATQLGQEVIFTPHLGNFKRGILATITVQLKPGTTTADVAAAYSVYDQAPLVTVKQNQFPKVDDVVLTPNCHLGWKFDENSGYLVVASAIDNLMKGAASQALQCIKIHFNL

SEQ ID NO: 47786 - DNA, 1032 bp, Alkalilimnicola ehrlichei MLHE-1
  CDS (1)..(1032): transl_table=11
atgatcgaggtcggcatcgtcggagggaccgggtatacgggtgtggagttgctgcgccttctggcgcgccatcccgaggcccggctgcgcgtgatcacctcccgtggcaatgccggcacccgggtggacgagctctttccctccctgcgcggtgaggtggagcttgccttctcggaaccggacgtggaccggctcgccgcctgcgatctggttttcttcgccacccccaacggcacggcgatgcagatggttccggacctactggcccgggacacccgggtggtggacctgggggcggattttcgcctcaaggacgtggagacctggtcgcgctggtacggcatgacccacgcctgccccgaactggtcgccgaggccgcgtatggcctgccggagttgaaccgggaggccatacgcggtgcccggctggtggccaaccccggctgctaccctaccgctgtcggcctgggctggctgccgttgctggaggcggggctggtcgagacccgcggcctggtggcgagctgtgtctccggggcctccggggccggacgggcggcgaatgtcgctaccttgctgtgtgaggtcaatgagagcttcaaggcctacggcgccgatggccaccgccacctgccggagatccgccagtccctggcgcaggtggcgggcggtgcggtggagctgaccttcgtgccccacctggtgcccatgacccgcgggatgcacgccagcctctacgccaccctccgcggggatgccggtgatctgcaggtattgttcgagcagcgttatgccgacgagccctttgtcgacgtgctgccggccggtgcccatccggagacgcgcacggtgcgcggcaccaacctctgccggctggccgtgcggcgggcgccggagagcgatcaggtcatcgtcctgtcggtgatcgataacctgaccaagggggcggccggccaggcggtgcagaacatgaacctcatgttcgggttgccggaaacggccggactggatgcgcccgcggtgctgccctga

SEQ ID NO: 47787 - protein, 343 aa, Alkalilimnicola ehrlichei MLHE-1
MIEVGIVGGTGYTGVELLRLLARHPEARLRVITSRGNAGTRVDELFPSLRGEVELAFSEPDVDRLAACDLVFFATPNGTAMQMVPDLLARDTRVVDLGADFRLKDVETWSRWYGMTHACPELVAEAAYGLPELNREAIRGARLVANPGCYPTAVGLGWLPLLEAGLVETRGLVASCVSGASGAGRAANVATLLCEVNESFKAYGADGHRHLPEIRQSLAQVAGGAVELTFVPHLVPMTRGMHASLYATLRGDAGDLQVLFEQRYADEPFVDVLPAGAHPETRTVRGTNLCRLAVRRAPESDQVIVLSVIDNLTKGAAGQAVQNMNLMFGLPETAGLDAPAVLP

SEQ ID NO: 47788 - DNA, 936 bp, Hyphomonas neptunium ATCC 15444
  CDS (1)..(936): transl_table=11
atgttgcccaaggttttcattgatggcgaggccgggacgaccggccttcagattgccgagcggctcaaagtccgcaccgatctggagctgatctcgatccatgccgacaagcgcaaggatgtcgatgagcgggcacgcctgatcaacaaggcggatgttgtgatcctctgcctgccggatgacgcggcgcgccttgcggtgagcctggtgagcaatccgaacacggtggtgattgatgcctcgaccgcgcaccgggtgtcgtcgggctgggtttatggctttgcagaaatggaccgcggacagcgcgcgatcatctcggcggccaagcggatctccaatccgggctgctatcccacaggatttgttgccctcgtgcgtccgctggtgaagacgggtttgttgccggcagactggccggtgacggtcaatgccgtgtcgggctattcgggcggcgggaagccgatgattgccgaattcgaggaccgcgagacgcaggacaatttccgcatctatgcgctgggccagcagcacaagcacccgccggaaatgaagaagttctccggcctctctcatgtgccgatgtttacgcccgccgtggggcggtatgcgcagggcatgatcgtggaagtgccgttgccgctctgggcggtgcccggcaagccgaagcgcaaggacattcataaggcgctgacagcggcctatgcgggcgaggcatttgtgaaggttattccgcttgcggaagcggacgcgatcaagtcgctcgacgcggaaggctgcaatgataccaaccggctggagatttatgtgttcggcacggatgagcaggcgcggctcgtggcgcggttggacaatctgggcaagggcgcttcaggggcggcggtgcagaatctgaatattgcgctggggctggatgagggcgcggggctcaaggtttaa

SEQ ID NO: 47789 - protein, 311 aa, Hyphomonas neptunium ATCC 15444
MLPKVFIDGEAGTTGLQIAERLKVRTDLELISIHADKRKDVDERARLINKADVVILCLPDDAARLAVSLVSNPNTVVIDASTAHRVSSGWVYGFAEMDRGQRAIISAAKRISNPGCYPTGFVALVRPLVKTGLLPADWPVTVNAVSGYSGGGKPMIAEFEDRETQDNFRIYALGQQHKHPPEMKKFSGLSHVPMFTPAVGRYAQGMIVEVPLPLWAVPGKPKRKDIHKALTAAYAGEAFVKVIPLAEADAIKSLDAEGCNDTNRLEIYVFGTDEQARLVARLDNLGKGASGAAVQNLNIALGLDEGAGLKV

SEQ ID NO: 47790 - DNA, 1035 bp, Pseudomonas aeruginosa UCBPP-PA14
  CDS (1)..(1035): transl_table=11
atgatcaaggtcggcatcgttggcggtacgggttatacgggcgtggaactgctgcgcctgctggcgcagcatccgcaggcccgggtggaagtgatcacttcgcgttccgaggcgggggtgaaggtcgccgacatgtacccgaacctgcgaggtcattatgacgacctgcagttcagcgtgccggacgtgcagcgcctcggcgcctgcgacgtggtgttcttcgccacgccgcacggcgtggcgcacgcgctggctggcgaactgctggacgccgggacccgggtcatcgatctgtccgctgacttccgcctggcggacgccgaggagtgggcgcgctggtacggccagccgcatggcgctccggcgctgctcgacgaggctgtctacggcctgccggaagtgaaccgcgagaagatccgccaggcccgcctgatcgccgtgccgggttgctacccgaccgcgacccaactgggcctgatcccgctgctggaggccggcctggccgacgcctcgcggctgatcgccgattgcaagtccggggtcagcggcgccggtcggggcgccaaggttggctcgctgttctgcgaggcgggcgaaagcatgatggcctacgcggtcaaggggcatcggcatctcccggaaatcagccagggcctgtgtcgggcctccggcggcgacgtcgggctgacgttcgtaccgcacctgacgccaatgatccgcggtatccatgcaaccctctatgcccatgtcgcggatcgctcggtcgacctccaggcgctgttcgagaagcgctacgccgacgaacccttcgtcgacgtgatgccggccggcagccatccggagacccgcagcgtgcgtggcgccaatgtctgccgaatcgccgtgcatcgcccccagggcggcgacctggtggtggtgctgtcggtgatcgacaacctggtcaagggcgcctcgggtcaggcgctccagaacatgaacatcctgttcgggctggacgagcgcctgggcctctcgcatgcggccctgctcccctga

SEQ ID NO: 47791 - protein, 344 aa, Pseudomonas aeruginosa UCBPP-PA14
MIKVGIVGGTGYTGVELLRLLAQHPQARVEVITSRSEAGVKVADMYPNLRGHYDDLQFSVPDVQRLGACDVVFFATPHGVAHALAGELLDAGTRVIDLSADFRLADAEEWARWYGQPHGAPALLDEAVYGLPEVNREKIRQARLIAVPGCYPTATQLGLIPLLEAGLADASRLIADCKSGVSGAGRGAKVGSLFCEAGESMMAYAVKGHRHLPEISQGLCRASGGDVGLTFVPHLTPMIRGIHATLYAHVADRSVDLQALFEKRYADEPFVDVMPAGSHPETRSVRGANVCRIAVHRPQGGDLVVVLSVIDNLVKGASGQALQNMNILFGLDERLGLSHAALLP

SEQ ID NO: 47792 - DNA, 1041 bp, Leuconostoc mesenteroides subsp. mesenteroides ATCC 8293
  CDS (1)..(1041): transl_table=11
atgacagacaaaattataaaaattgctatcgttggcattacaggatacggcggtcttgaattattgcgactgctttacaatcaccctaatgctaaggttgtgtccatacataatacccaaacagaaaacactgacattagcgaacagtttccgcatctaaaatcaatgtataatttaacgcctacgacattcgacccaatgcatattatgcaagaagcggatcttgtattttttgcaacatccagtggcgtttccaaagatttagctcaggactttattcaagctaagtttcccgtcattgatctatctggtgattttcgtcttcccgctgatatttataaaaaatggtacaaaaacgaaccagcctctgacgaagcgattcaacaagcacactacagcttagcagatttttatgacaataaagtaacttacattgccaatcctggttgttatgccacgggcacacttcttgctcttgcccctcttgcacaaaaccacctgcttgataaagataacatcatcattgatgctaaaagcggattatctggtgctggcaaatccctgacattagcgagtcattttgttaacgttaatgaaaacttcaccatgtataaggccaaccatcatcaacacattcctgaaattacccagcaactgcaacaatggcaatccgatattgctcatattcaattcaccacatccctactaccaattaatcgcggcatttttgtcagtgcttatgtcaagataaacgacgacagccaggccgaaaaaattcaggaattatacactgcaacgtatgcaaataagcaatttgtacgtgtcatgcccaaaaatcaattaccaagcatcaaacaggttatcggtactaactttactgatatcggactaacatacaatcctgataccaaatacctcaccattgttagtgttcttgacaatatgatcaaaggcgctgctggacaagctatccaaaacatgaatcatatgtttgatctagaggaaagcacaggacttcatttaattgctcaatacgcataa

SEQ ID NO: 47793 - protein, 346 aa, Leuconostoc mesenteroides subsp. mesenteroides ATCC 8293
MTDKIIKIAIVGITGYGGLELLRLLYNHPNAKVVSIHNTQTENTDISEQFPHLKSMYNLTPTTFDPMHIMQEADLVFFATSSGVSKDLAQDFIQAKFPVIDLSGDFRLPADIYKKWYKNEPASDEAIQQAHYSLADFYDNKVTYIANPGCYATGTLLALAPLAQNHLLDKDNIIIDAKSGLSGAGKSLTLASHFVNVNENFTMYKANHHQHIPEITQQLQQWQSDIAHIQFTTSLLPINRGIFVSAYVKINDDSQAEKIQELYTATYANKQFVRVMPKNQLPSIKQVIGTNFTDIGLTYNPDTKYLTIVSVLDNMIKGAAGQAIQNMNHMFDLEESTGLHLIAQYA

SEQ ID NO: 47794 - DNA, 1044 bp, Solibacter usitatus Ellin6076
  CDS (1)..(1044): transl_table=11
atgcaaagtgtggtattattcattcaagcgaatatttatacaatgcagcgagtcggaatcgtaggacataccgggtatagcggggcggagctgatccgtatcttgaagcgccacccgcacgtggaaccggtactgatggaccatcgtgaaaacgccgcggcatctgccctgcgccgtcccgccgggccggaccgcatcccgtgcaccggtgacgcagtgcgcgccgaaggcctggctgtggtcttcctcgccactccacccgaagtctccatggaactgaccccgacgctgctcgatgccggcgcccgagtggtcgatctcagcggcgcctttcgcctgcgcactccggaaaactaccagacctggtacaaggagccgcacacccagccggagctgctcgccgaagccgtctacgggcttccggagtattgccgggatcgcattccatcggcgcggctgctttccaatccgggctgctatcccaccgcggcgaacctggcaatccggccgctgatcgaggccggcgtggtggatcgctccgccggaattgtctgcgacgccaaatcgggcgtcagcggcgccggacgcaagcccagcctcaagaccagcttctgcgaagtcaccgagaacttttcggcatactcgatcctgcaccaccggcacgttcccgaggtcctgctcacctccggcctcgaagagggcgaattcagcttcacggcgcagctcattccgatcgatcgcgggatcctcgaaaccatctacttccgcgcgcccggcgtctctagcgcggaggacctgctcgcggtctacgagcggcgctacggcagcgagcccttcgtacgcctttacaatcgcgggcacgtgcccgatctgcacgcggtggcgcataccaacttctgcgacatcggggtcgccttcgaccccaggaccggccgcaccgtggtggtcgccgccatcgacaatctggtgaaaggcgccgccggacaggccgtgcagaacatgaacctgatgctcggctatgccgagaccgaggcgctgctgtga

SEQ ID NO: 47795 - protein, 347 aa, Solibacter usitatus Ellin6076
MQSVVLFIQANIYTMQRVGIVGHTGYSGAELIRILKRHPHVEPVLMDHRENAAASALRRPAGPDRIPCTGDAVRAEGLAVVFLATPPEVSMELTPTLLDAGARVVDLSGAFRLRTPENYQTWYKEPHTQPELLAEAVYGLPEYCRDRIPSARLLSNPGCYPTAANLAIRPLIEAGVVDRSAGIVCDAKSGVSGAGRKPSLKTSFCEVTENFSAYSILHHRHVPEVLLTSGLEEGEFSFTAQLIPIDRGILETIYFRAPGVSSAEDLLAVYERRYGSEPFVRLYNRGHVPDLHAVAHTNFCDIGVAFDPRTGRTVVVAAIDNLVKGAAGQAVQNMNLMLGYAETEALL

SEQ ID NO: 47796 - DNA, 1050 bp, Magnetococcus sp. MC-1
  CDS (1)..(1050): transl_table=11
atgggtcgcaccctgcgggttgccatcttgggcgcaactggttacaccggtggtgaacttatccggttattgcatcgacaccctggcgctgagttgagctttgtgagctccgaacggtttgcgggtcaatccattgccaaggtctatacccatcttcaagcggtgggacatttgatctgccaacccatggatgctaaaaaggcttgcgaggcggcggactttatcttctgtgccttgccccatgtcacctccatggaggtggtgccagagctgttacagcggggggctaaggtggtggatctatccgccgacttccggcttaaaagcgccgagacctatgcccattggtatggtacacaacatttggccccggaactgctgccacaggcggcttatgggttgcccgaactgtttcgtgaatccatcaaaggggccaacttggtggcgaaccctggctgttatccaacctcggtgcagctgccgctctttccgctcttacaagagggcatgattgatccagcactggtcattgcggatagtaagtcgggtgtgagtggggcggggcgttctcctgcgcagggcacgctgtttgctgagttgtcagaaggatttaaagcctataaagtagaggcacaccggcatatcccagagatggagcaaaatttggctttggcagcggggaaagagattaaaatacgttttaccccccaccttttgcctcaaagccgtggtatactttcgacctgctatctacgcccaacaagtggggtgaatgcacaacgggtgcgggatactttaatgacacgctaccgggatgagccttttgtgacggtgttaccccatggggatatgccggccacctccgatgtgcgcggcagtaatgcttgccatatgggcgtgacagaagatctacgtagtggatggttgatcatcgtttcagttatcgataatctggttaagggtgcttctggggctgcggtacagaactttaacctgatgaccggatgggatgaaacaacggcgcttgacagtttgccgatgtttccgtaa

SEQ ID NO: 47797 - protein, 349 aa, Magnetococcus sp. MC-1
MGRTLRVAILGATGYTGGELIRLLHRHPGAELSFVSSERFAGQSIAKVYTHLQAVGHLICQPMDAKKACEAADFIFCALPHVTSMEVVPELLQRGAKVVDLSADFRLKSAETYAHWYGTQHLAPELLPQAAYGLPELFRESIKGANLVANPGCYPTSVQLPLFPLLQEGMIDPALVIADSKSGVSGAGRSPAQGTLFAELSEGFKAYKVEAHRHIPEMEQNLALAAGKEIKIRFTPHLLPQSRGILSTCYLRPTSGVNAQRVRDTLMTRYRDEPFVTVLPHGDMPATSDVRGSNACHMGVTEDLRSGWLIIVSVIDNLVKGASGAAVQNFNLMTGWDETTALDSLPMFP

SEQ ID NO: 47798 - DNA, 1044 bp, Mycobacterium avium 104
  CDS (1)..(1044): transl_table=11
atggccgacgtgatgagggtggcggtagccggtgccagcggctatgcgggcggtgaaatcctacgcctgctgctcgggcacccggcttacgcccaggggcggctgacgatcggcgcggtgaccgccgcggccagcgccggcagcccgctcggcgagcatcacccgcacctgacgccgttggcccagcgcgtgctggagcccaccgacgccgccgtgctggccggccacgacgtggtgtttctggcgttgccgcacggacattcggcggcgctggccgaccagctcggcgccgacacgctgatcgtcgactgcggcgcggacttccggctgaccgacgccgccgcctgggaacggttctacggcgcgccgcacgccggcagttggccctacgggctcccggagctgcccggggcgcgcgagcggctgcgcggcgcccgccggatcgcggtgccgggctgctacccgaccgcggcgctgctggccctgctgcccgcgatggccgaggacctgatcgagcccgccgtcaccgtggtcgccgtcagcggcacctccggagccggtcgcgccgccaagaccgacctactgggctcggaggtcatcgggtcggcgcgggcctacaacatcgccggggcgcaccggcacacccccgagatcgcccagggcctggcggccgtgtccggacgcgacgtcacggtgtcgttcaccccggtgctgatcccgacctcgcgcggcatcctggccacctgcaccgcccgcaccaccgcgccgttgtcggcgcttcgggccgcatacgaaaagacttatgacgcagagcctttcatctacctgatgcccgagggacagctgccgcggaccggggcggtgatcggcagcaacgcggcgcacatcgcggtggcggtggacgaggcggcgggcgtgctggtggcgatcgccgcgatcgacaacctggtcaagggaaccgccggggcggccgtgcagtcgatgaacctggcgctgggttggccggagacacaaggactttcggtgatcggggtggcgccgtga

SEQ ID NO: 47799 - protein, 347 aa, Mycobacterium avium 104
MADVMRVAVAGASGYAGGEILRLLLGHPAYAQGRLTIGAVTAAASAGSPLGEHHPHLTPLAQRVLEPTDAAVLAGHDVVFLALPHGHSAALADQLGADTLIVDCGADFRLTDAAAWERFYGAPHAGSWPYGLPELPGARERLRGARRIAVPGCYPTAALLALLPAMAEDLIEPAVTVVAVSGTSGAGRAAKTDLLGSEVIGSARAYNIAGAHRHTPEIAQGLAAVSGRDVTVSFTPVLIPTSRGILATCTARTTAPLSALRAAYEKTYDAEPFIYLMPEGQLPRTGAVIGSNAAHIAVAVDEAAGVLVAIAAIDNLVKGTAGAAVQSMNLALGWPETQGLSVIGVAP

SEQ ID NO: 47800 - DNA, 1032 bp, Mycobacterium smegmatis str. MC2 155
  CDS (1)..(1032): transl_table=11
atgacttcgatagccgtggcgggtgccagcgggtatgcgggaggcgaaattctccggctgctgctgggccatccggcctatgccgacggcaggctgacgatcggtgcgctgaccgccgcatccagcgcgggcaccacgttgggcgagcatcacccacacctgctgcctctggcggaccgagtcctcgaatccaccgacgtcgaggtgctgaccggccacgacgtggtgttcctggcgttgccgcacggacattcggccgcgctggccacccaactgggtggcaccgtcatcatcgactgcggtgcggatttccggctggccgaggccgccgactgggagaagttctacggcagcgcccacgccggcacctggccctacggccttcccgaactgcccggcggccgcgaggcgctcaagggcgcgacccgcatcgccgtgccgggttgctacccgacgtcggcgctgctggccctgctgcccgcggtcgcggctggtctggtcgaacccaacgtcaccgtcgtcgccgtcagcggcacctcgggtgcgggcaagtccgccaaggtcgacctgctgggcgccgaggtcatcgggtcggcgcgcgcctacaacgtcggcggcaagcaccggcacaccccggagatcgcgcagggtctgcgcaaggtcaccgacaagcccgtcacggtgtcgttcactccggttctcatcccgacctcgcgcggcatcctcgccacgtgcaccgcgccgaccaccgccaccgagcccgagatccgggccgcgtacgaaaaggcctacggcgccgagccgttcatccacctgctgccggaagggcaactgcccaagaccggttcggtgatcggtagcaacgccgcgcagatccagatcgcggtggacaccgaggccaagacgctggtggccatctgtgcgatcgacaacctgaccaagggcactggtggtgccgcagtgcaatccatgaacctggccctgggctggcccgaaaccgaaggactttcgatcgtgggagtggcaccgtga

SEQ ID NO: 47801 - protein, 343 aa, Mycobacterium smegmatis str. MC2 155
MTSIAVAGASGYAGGEILRLLLGHPAYADGRLTIGALTAASSAGTTLGEHHPHLLPLADRVLESTDVEVLTGHDVVFLALPHGHSAALATQLGGTVIIDCGADFRLAEAADWEKFYGSAHAGTWPYGLPELPGGREALKGATRIAVPGCYPTSALLALLPAVAAGLVEPNVTVVAVSGTSGAGKSAKVDLLGAEVIGSARAYNVGGKHRHTPEIAQGLRKVTDKPVTVSFTPVLIPTSRGILATCTAPTTATEPEIRAAYEKAYGAEPFIHLLPEGQLPKTGSVIGSNAAQIQIAVDTEAKTLVAICAIDNLTKGTGGAAVQSMNLALGWPETEGLSIVGVAP

SEQ ID NO: 47802 - DNA, 1047 bp, Nocardioides sp. JS614
  CDS (1)..(1047): transl_table=11
atgcacatgaccagcattcggatcgcggtcgccggcgccagcggctacgcggggggcgagctgttgcgcctgctcctgggccacccggacgtggagatcggcgccctcaccggcgcctcgaacgcgggccagcccctgggcgcgttgcagccgcacctggtcccgctcgccgaccgggtcctggtggagacctccctggagacgctctccggccacgacgtggtgttcctggcactcccgcacggtcagtccggtgagctcgccgcgcggctcggcgacgcggacccggagaccgtggtcgtcgactgcggtgccgacttccggctcgccgacgccgccgcgtgggagcggtactacggcggcccgcacgccggcacctggccctacggcctcccggagctccccggtcagcgggagcggctgtccggcgcccgccggatcgcggtgcccggctgctacccgacgatctcgacgctcgcgctcgcgccggcggtcgcggccggcatcgtcgaacccgacgtggtcgtggtcgccgcctccggcaccagcggcgccggcaaggcggccaagccccacctgctcggcagcgagatcatgggcaacgcgagcgcctacggcgtcggcggcgtccaccggcacacccctgagatcacccagaacctctccgcgctggtccacgagaccgtcaaggtcagcttcacgccgctgctcgtgccgatgccccgcggcatcctcgccacctgctcggcgcccctgcgcggcgacgtcagcgccgaggacgcctacgccgtctacgccaaggcgtacgccgacgagccgttcatccacctgctcccggtcggccagtggccgcagaccaagtcggtgaccgggtccaacgccgtgcacctccaggtcacggtcgacgaggacgcacgacgaatggtcgccgtcggagccgtggacaacctgtccaagggcaccgccggcgctgccgtccagtgcatgaacctcgcgctcggtctcgacgaaggactgggcctctcgaccgtaggagtagctccgtga

SEQ ID NO: 47803 - protein, 348 aa, Nocardioides sp. JS614
MHMTSIRIAVAGASGYAGGELLRLLLGHPDVEIGALTGASNAGQPLGALQPHLVPLADRVLVETSLETLSGHDVVFLALPHGQSGELAARLGDADPETVVVDCGADFRLADAAAWERYYGGPHAGTWPYGLPELPGQRERLSGARRIAVPGCYPTISTLALAPAVAAGIVEPDVVVVAASGTSGAGKAAKPHLLGSEIMGNASAYGVGGVHRHTPEITQNLSALVHETVKVSFTPLLVPMPRGILATCSAPLRGDVSAEDAYAVYAKAYADEPFIHLLPVGQWPQTKSVTGSNAVHLQVTVDEDARRMVAVGAVDNLSKGTAGAAVQCMNLALGLDEGLGLSTVGVAP

SEQ ID NO: 47804 - DNA, 924 bp, Azoarcus sp. BH72
  CDS (1)..(924): transl_table=11
atgcccaaggtcttcatcgacggcgaagccggcaccaccggcctgcagatccgcgaccagctgcagcagatgccgcagatcgaactcgtctccatcgcgcccgaactgcgcaaggacgtcggcgccaagcgcgagctgatggccggcgtcgatctggtcatcctgtgcctgcacgacgacgccgcgcgcgaatcggtggcgctgatcgatggcctgccgggcaagcgcccgcgcatcatcgacgcctccaccgcgcaccgggtgtcgccgggctgggtgtacggcttcccggaattgaccgcgggtcacgcccaggcggtggcgggcgccgagcgggtcgccaacccgggctgctacgccaccggcgcgatcgcgctgatccgcccgctgatcgacgccggcctgctgccggccggcttcccggtgtcgctgccctcggtcagcggctactccggcggcggccgcagcatgatcgaagcctacgaggccggcaccgcgccgctgcacgaggcctacgcgctcggcctcaagcacaagcacatcccggaaatcatgcaatacaccggactggaatgccgtccgctgttcatccccgcggtcggcaatttccgccagggcatgctggtacagttgccgctgcacctcgacgccctgcccggcaagccgcgcgccgccgatctggaagcggcctacgccgcgcactacgcgaagagcaacacgccggagcagttcgtgcaggtgctgcctgccaccgaggacggcaagctggacgcgctcgcgctcaacgacaccaaccggctcgagatccgcgtcttcgccaacgaggaataccgccacgcggtgctgatcgcccggctggacaacctgggcaagggggccagcggcgcggcggtgcagaacctcaagctgatgctggggctctga

SEQ ID NO: 47805 - protein, 307 aa, Azoarcus sp. BH72
MPKVFIDGEAGTTGLQIRDQLQQMPQIELVSIAPELRKDVGAKRELMAGVDLVILCLHDDAARESVALIDGLPGKRPRIIDASTAHRVSPGWVYGFPELTAGHAQAVAGAERVANPGCYATGAIALIRPLIDAGLLPAGFPVSLPSVSGYSGGGRSMIEAYEAGTAPLHEAYALGLKHKHIPEIMQYTGLECRPLFIPAVGNFRQGMLVQLPLHLDALPGKPRAADLEAAYAAHYAKSNTPEQFVQVLPATEDGKLDALALNDTNRLEIRVFANEEYRHAVLIARLDNLGKGASGAAVQNLKLMLGL

SEQ ID NO: 47806 - DNA, 1044 bp, Neisseria meningitidis FAM18
  CDS (1)..(1044): transl_table=11
atgagtaaaaaaatcaaagtcggcattgtcggcgcgacgggctacaccggcgtggaactgctgcgcctgcttgccgcccatcccgatgtcgaagtcgccgccgtaaccagccgcagcgaagcgggaaccgcagttgccgattactttccgagtttgcgcggcgtgtacggcctcgccttccaaacgcccgacgaggcaggtttggaacaatgcgacatcgtcttcttcgccacgcccaacggcatcgccatgaaagacgcgccgcgcctgattgaacagggcgtgcgcgtcatcgacctttccgccgacttccgcatatgggacattccgacctgggaacactggtacggcatgccccacgccgcccccggcctcgtttcccaagccgtgtacggattgagcgaactcaaccgcgaagccgtcgcacaggcgcgcctcgtcgccaaccccggctgctacccgacctgcgtatccctgccgctcgtgccgctgttgcggcaatgccgtctgaagcccggtatgccgctgattgccgactgcaaatccggcgtgtccggcgcgggcaggaaaggcaatgtcggttcgctgttgtgcgaagtcggcgacaacttcaaagcctacggcatagccggacaccgccacctgcccgaaatcaggcagaccatcgccgggcttcaggacggcatcgccgaaggattcgtgttcacgccgcacctcgcgccgatgatacgcggtatgcacgccaccgtttacctccacctttcagacggcatctgccccgaaaccatcctgcgcgactattaccgcgacagcctgttcgtggacatcctgcccgccggttcgacaccagaaacccgcagcgtgcgcggcgcaaacctctgccgcatcagcatccaacaggcggcgcaatccgatgtgtgggtcgtcctttccgtcatcgacaacctcgtcaaaggcgcggcgggtcaggcggtgcaaaatatgaacatcatgttcggactgaaagaaacacacggcttgggcgcaatccccctgctcccctga

SEQ ID NO: 47807 - protein, 347 aa, Neisseria meningitidis FAM18
MSKKIKVGIVGATGYTGVELLRLLAAHPDVEVAAVTSRSEAGTAVADYFPSLRGVYGLAFQTPDEAGLEQCDIVFFATPNGIAMKDAPRLIEQGVRVIDLSADFRIWDIPTWEHWYGMPHAAPGLVSQAVYGLSELNREAVAQARLVANPGCYPTCVSLPLVPLLRQCRLKPGMPLIADCKSGVSGAGRKGNVGSLLCEVGDNFKAYGIAGHRHLPEIRQTIAGLQDGIAEGFVFTPHLAPMIRGMHATVYLHLSDGICPETILRDYYRDSLFVDILPAGSTPETRSVRGANLCRISIQQAAQSDVWVVLSVIDNLVKGAAGQAVQNMNIMFGLKETHGLGAIPLLP

SEQ ID NO: 47808 - DNA, 933 bp, Acidovorax sp. JS42
  CDS (1)..(933): transl_table=11
atgtccaaggtctttattgatggcgaggcaggcaccaccggcctgcagattcgtgagcgcctgcaggccatgccccaggtggagttggtcagcatcgcccccgaactgcgcaaggacgccgccgccaagcgcgcactgatcgccggtgtggacctggtcgtgctgtgcctgcacgacgatgccgcgcgcgaaacggtcgcgctggtggacgccatcactgccgagaccggccgcgccatcaagatcattgatgcctccaccgcccaccgcacggcgccgggctgggtgttcggctttcccgaactggcacccggccagttggaggccgtgcgcagcgccacgcgcgtatccaaccccggctgctatgccaccggcgccatcgccctgctgcgcccgctggtcgacgccggcctggtgcccgccgaccacccactggcgctgccgtcggtgagcggctactccggcggcggccgtacgatgatcgaggcctacgagcaagggcaggcggcgccctttgagctgtatgcgctgggcctgtcgcacaagcacctgcccgagatcctgaagtacaccgggctcacgcgccgcccgatcttcatcccctcggtgggcaacttccgccagggcatgctggtgcaactgccgctgcatctggacctgctgcccggccagccgaaggcggcggacctgcacgacgcactggcggcccattacgccaagagcaatacgcccgagcagtgggtgaaggtgctgccgcccaccgaggacggcaagctcgatgccctcgcgctcaacgacaccaaccagttggaactgcgcgtgttcgccaatgagagctaccgccacgccgtgctggtggcgcgcctggacaacctgggcaagggcgcgagcggcgccgcggtgcagaacctgcggttgatgctcgggctataa

SEQ ID NO: 47809 - protein, 310 aa, Acidovorax sp. JS42
MSKVFIDGEAGTTGLQIRERLQAMPQVELVSIAPELRKDAAAKRALIAGVDLVVLCLHDDAARETVALVDAITAETGRAIKIIDASTAHRTAPGWVFGFPELAPGQLEAVRSATRVSNPGCYATGAIALLRPLVDAGLVPADHPLALPSVSGYSGGGRTMIEAYEQGQAAPFELYALGLSHKHLPEILKYTGLTRRPIFIPSVGNFRQGMLVQLPLHLDLLPGQPKAADLHDALAAHYAKSNTPEQWVKVLPPTEDGKLDALALNDTNQLELRVFANESYRHAVLVARLDNLGKGASGAAVQNLRLMLGL

SEQ ID NO: 47810 - DNA, 972 bp, Nostoc punctiforme PCC 73102
  CDS (1)..(972): transl_table=11
atgattactaaacctaagattttcattgatggcgaatcaggaaccacaggcttacaaatttattcacgtctcaatcaacgtgatgatatcgagttagttagcattgaggcatctaaacgtaaagatgcaagtgagcgagctaaactaattaataccgtcgatgttgttattctctgcctacctgatgatgcagcccgtgaagctgttagcttagtaagtagtactacggttaagatccttgatgctagtagtgcccatcggacagctaatggctgggtatatgggttccccgaactcaatccagggcagagagagaaaatcgccagcgcccagtatgtcagtaatccaggctgttatcccacaggatttttagcctgtatccgtccgttgattgctaagggactgttcaaaagtaattttcccatcaccgtgaatgcagtatcaggttactctggtggcggaaaaaatcttattaaacaataccataccttccatgaacagcaagccgggggtgagtcactatatccattcggaatctacggtttgcagtttggacataagcatgtcaaggaaatgcattattattcagggttagcatcgccgccactatttgtaccttcagtaggggattttgagcaagggatgctagttcaagtgcctttgccgttaggaactttggataatccaccatcaggtgaggtaatctatgaagcgatcgctgattactaccaaggtgaaaagtttgtgcaggttgctccattccaagattctactctgctgcgagacggaatatttttggatgcgattgcagtgaacggcactaatattgttcaggtttttgtattcgccaatgacaccaccaaagaagcattgctagttgctcgtctcgacaacttgggcaaaggcgcatcaggagccgcaatccaaaacctaaacatcatgctgggctttccagaagaattgggattgtga

SEQ ID NO: 47811 - protein, 323 aa, Nostoc punctiforme PCC 73102
MITKPKIFIDGESGTTGLQIYSRLNQRDDIELVSIEASKRKDASERAKLINTVDVVILCLPDDAAREAVSLVSSTTVKILDASSAHRTANGWVYGFPELNPGQREKIASAQYVSNPGCYPTGFLACIRPLIAKGLFKSNFPITVNAVSGYSGGGKNLIKQYHTFHEQQAGGESLYPFGIYGLQFGHKHVKEMHYYSGLASPPLFVPSVGDFEQGMLVQVPLPLGTLDNPPSGEVIYEAIADYYQGEKFVQVAPFQDSTLLRDGIFLDAIAVNGTNIVQVFVFANDTTKEALLVARLDNLGKGASGAAIQNLNIMLGFPEELGL

SEQ ID NO: 47812 - DNA, 1059 bp, Nostoc punctiforme PCC 73102
  CDS (1)..(1059): transl_table=11
atgggcaaatttagacgcgtacccgttgggattattggcgcgtcgggctatggcgaagtacagttagtacggctactgatggatcatccagaagtcgaactggtttatttaggcggtgagagtagtattggtaaatcctttggggatttgtacccacatctggctcatacagctaatctaccaatagaagcggtagaaccagaaataattgctcatcgctgtgaagtagttttcctgtctttaccaaatggtctggcttgccaaatcgcgcccaaactattagaaaaaggatgtaaagtgctggatctgagcgcagactatcggttcagtgatttgacaacttatacaaattggtatggcattgagagaagcgatcgcaccattgcagctacagcagtttatggattaccagaactttatcgcgatcgcattgccgaagctcaacttattggctgtcctggttcctatccgactgcgagtctccttgcactttcgccactcttaaagcaaggcttaatcttaccagaaacagctattatcgatgccaaggctggcacatctagcggtggacggcaacctcaaaccaacttattactatctgaagcagataattccatcgcagctttcaatatcggccgtcaccgtcataccccagaaattgagcaaatttgcagtgacttagctggtcacgaactgatgatccaatttacaccccatcttgtcccaatggtacgcgggattttggcaacggtatatgccaaaatgagcgatcctggtctagtgcgagatgacttaatcacaattttctcagccttctaccgcaactctccttgggtaaaagtttgcggtagcggcatttacccccaaaccaagtgggctaatggcagcaacctttgttacatcggcgtagaagttgactcgcgcacaggtagggtgattgtcatatcggcaattgacaatctaattaaagggcaggcgggtcaagcgattcaatgtctaaacctgatgatgggctgggatgaaactttggggttgcccaagttggggttttatccatga

SEQ ID NO: 47813 - protein, 352 aa, Nostoc punctiforme PCC 73102
MGKFRRVPVGIIGASGYGEVQLVRLLMDHPEVELVYLGGESSIGKSFGDLYPHLAHTANLPIEAVEPEIIAHRCEVVFLSLPNGLACQIAPKLLEKGCKVLDLSADYRFSDLTTYTNWYGIERSDRTIAATAVYGLPELYRDRIAEAQLIGCPGSYPTASLLALSPLLKQGLILPETAIIDAKAGTSSGGRQPQTNLLLSEADNSIAAFNIGRHRHTPEIEQICSDLAGHELMIQFTPHLVPMVRGILATVYAKMSDPGLVRDDLITIFSAFYRNSPWVKVCGSGIYPQTKWANGSNLCYIGVEVDSRTGRVIVISAIDNLIKGQAGQAIQCLNLMMGWDETLGLPKLGFYP

SEQ ID NO: 47814 - DNA, 948 bp, Actinobacillus pleuropneumoniae serovar 1 str. 4074
  CDS (1)..(948): transl_table=11
atgatgagtaaatataaaatttttgtggacggagcagtcggtacgaccggtttacgtatttttgaccgtctagccagtgcggaagatatagaattattaagcttgccggaagaattacgtaaagatcttaatgccagagtggcaaaagtcgcggaagcggatttgactttcctctgtttaccggacgaagcctctaaagaattagtggctcatgcaccggcggatgcaagaatttgcgatacttcaaccgctcatcgtgttaatccgaactggacctatggctttgcagaattttccgggcagtttgaaaaaattcaaaatgcgaatcgggtcgccgtaccgggttgtcacgccacaggttatattgctttagttcgtcctcttattgaaaaaggtgcattgagtgccgattatccactttcttgccattcgctcaccggctattccggcggcggtaaagcgatgatcgccgaatatcaaaatccggatcgcgaacaaaaatttagtgcgcctcgtgtctacggattggctctcaaacataaacatttaccggaaatgcaagcgcttaccggttcaaatcatcctcctattttcactccggttgttgccgactattacagcggaatgttggtgactgtaccgctccctgtttccgctctttcacaagcggtcaattctgccgaaaaaattgcaaatttattcagcgaatattaccaaaactcaaaattgattacggttcatcccgcttgctcgctacctgaagacggaatgttggcggcgaatacatttagcggcaaagacagccttgaaatctttgtttacggcaacgaaacgcagctattattgtgtgcacgttttgataatttaggcaaaggggcatccggtgcggcggtacaatgtatgaatattatgctaggtcgtgaagaaacagccggactagacgtgtag

SEQ ID NO: 47815 - protein, 315 aa, Actinobacillus pleuropneumoniae serovar 1 str. 4074
MMSKYKIFVDGAVGTTGLRIFDRLASAEDIELLSLPEELRKDLNARVAKVAEADLTFLCLPDEASKELVAHAPADARICDTSTAHRVNPNWTYGFAEFSGQFEKIQNANRVAVPGCHATGYIALVRPLIEKGALSADYPLSCHSLTGYSGGGKAMIAEYQNPDREQKFSAPRVYGLALKHKHLPEMQALTGSNHPPIFTPVVADYYSGMLVTVPLPVSALSQAVNSAEKIANLFSEYYQNSKLITVHPACSLPEDGMLAANTFSGKDSLEIFVYGNETQLLLCARFDNLGKGASGAAVQCMNIMLGREETAGLDV

SEQ ID NO: 47816 - DNA, 1032 bp, Listeria monocytogenes str. 1/2a F6854
  CDS (1)..(1032): transl_table=11
atgaaagtttcaatcattggcgcgacggggtatggaggacttgagctaattcgcttgcttcatcaacactcttcggtagacatagcgacgttacatagtttttccgctcaagcagaaacgttagcaactttttatccacatttaaaagatttagaagttagccccttagagaaaataaatccaacagaaatcatcgaaaaaagtgacacggtttttatcgcgacgccttctggaatcgcgaaagatattgcactgccatatgtagatgcgggtttgaatgtcattgatttatccggggactttcgattaaaagacaggcaactttacgaaaagtggtacggaaaaagcgcagcgccaaccgagtatatcgctaaggcggaatatggtttagcagaattccgtgaaaagaaagaaactactttcattgcgaatcctgggtgttatgcaactgcagcattgctaggtctcgcaccacttgcaacgaataagttgattgatcccacatctattattgtagacgctaaatcaggtatttccggcgcaggaaaagtgccctcagcaagtacacatttcacaaaaaccaatgaaaacatgacgctttataaaatgaattcccatcaacatattccagaaattatgcagcaattaactaaatgggatgaaagtatcccagcaattcaattttctacttcattaattcccatcacaagaggaatcttcacaaccatctacgttaaacccaaaaatcctatcacccaaaaagagttacataagctttacgaatccacctacgataatgctccatttgtccgaatccaaccagagaatgtatatccaactgtcaaacaagtgacagcctcaaattactgcgatataggtcttgcttataacgaaaaaacgaatgtgattactatcgtttctgtgattgataatttagtcaaaggggcggctggtcaggccattcaaaatttaaacataatggcgaattttgctgaaagtgacggattaaggtttattccggtgtatccgtga

SEQ ID NO: 47817 - protein, 343 aa, Listeria monocytogenes str. 1/2a F6854
MKVSIIGATGYGGLELIRLLHQHSSVDIATLHSFSAQAETLATFYPHLKDLEVSPLEKINPTEIIEKSDTVFIATPSGIAKDIALPYVDAGLNVIDLSGDFRLKDRQLYEKWYGKSAAPTEYIAKAEYGLAEFREKKETTFIANPGCYATAALLGLAPLATNKLIDPTSIIVDAKSGISGAGKVPSASTHFTKTNENMTLYKMNSHQHIPEIMQQLTKWDESIPAIQFSTSLIPITRGIFTTIYVKPKNPITQKELHKLYESTYDNAPFVRIQPENVYPTVKQVTASNYCDIGLAYNEKTNVITIVSVIDNLVKGAAGQAIQNLNIMANFAESDGLRFIPVYP

SEQ ID NO: 47818 - DNA, 1038 bp, Bacillus cereus G9241
  CDS (1)..(1038): transl_table=11
atgaaagtcgcaattattggagcaactgggtatggaggtattgagttaattcggttattagagcaacatccatatttttcgatagcatctcttcattctttttcgcaagttggcgagtgtataacaaatgtatatccacattttcaaaatgttcttgttcatacgttacaagaaattgatgcggaggaaataaagaagaaagcagaaattgtatttttagcaaccccagcaggagtatcagcagagttaactccgaaattattagcagtaggtttaaaagtaattgatctatctggagactttcgtatgaaagatccttcgacatatgaacagtggtataaaaggacagctgcaaaagaagaagttcttagggaagctatatatgggttaagcgaatggaaaaggtccgaaattcaaaatgcaaatttaattgcaaacccaggatgctttgctacagctgcattattagcgatattaccgttagttcgtagcggcataattgaagaagattcaattattattgatgcgaaatcaggagtatctggagcaggcaaaacgccaacaacgatgactcactttcctgagttatacgataacttgcgtatttataaagtaaatgagcatcaacacgttcctgagattgagcaaatgctcgcggaatggaatagagaaatgaagccaatcacgtttagtacacatttaataccgatatcacgtgggattatggttacactttatgcgaaagtaaagcgagaaatggaaatagaacaacttcaaaaattatatgaagaaacgtatgaacaatcggattttgttcgaattcgcatgcaaggagagtttccaagtccgaaagaagtgaggggctcaaattattgtgatatggggatagcttacgatgaaagaacaggaagcgtgacaatcgtttctgttatagacaatatgatgaaaggtgcggctggtcaagcgattcaaaatgcaaatatagtagcgggactagaagaaacgacaggtttacaacatatgccgctttatctataa

SEQ ID NO: 47819 - protein, 345 aa, Bacillus cereus G9241
MKVAIIGATGYGGIELIRLLEQHPYFSIASLHSFSQVGECITNVYPHFQNVLVHTLQEIDAEEIKKKAEIVFLATPAGVSAELTPKLLAVGLKVIDLSGDFRMKDPSTYEQWYKRTAAKEEVLREAIYGLSEWKRSEIQNANLIANPGCFATAALLAILPLVRSGIIEEDSIIIDAKSGVSGAGKTPTTMTHFPELYDNLRIYKVNEHQHVPEIEQMLAEWNREMKPITFSTHLIPISRGIMVTLYAKVKREMEIEQLQKLYEETYEQSDFVRIRMQGEFPSPKEVRGSNYCDMGIAYDERTGSVTIVSVIDNMMKGAAGQAIQNANIVAGLEETTGLQHMPLYL

SEQ ID NO: 47820 - DNA, 1059 bp, Crocosphaera watsonii WH 8501
  CDS (1)..(1059): transl_table=11
atgggtgagtcagaaaaaatatcagtgggaattattggtgcttcgggatatggtggagtccaattagttagactattacaagaacatcccttggtagaaattgtctatttagggggtaaagggagtgctggccttgcctactctgaattatatccccatttaggccatgcagtggatctaaccattgaacccattgatgtcgaagcgatcacttcccgttgtcaggtagtatttttaggattacctaatggccttgcttgtgatctggctcccccactgattgaaaaaggctgcaaagtattagacctatcggctgattatcgcttcaaaaatctagaaacctatagcaattggtacaataaagaccgtagcgacctagaaactgctaaaaccgcagtttacggactgcctgagctataccgtgatgaaattaaatccgcttctctgatcggctgcccagggtgttatcccactgccagtttaatggctttatctcctttactcaaacaagggttgatcttgcctgaaaccaccatcattgatgctaagtcaggaacatccggcggaggaagacaagccaaaacccatctcttactagcagaagccgaaggttcattcggggcttatggagtagctaaacaccgtcatacccccgaaattgaacaaatttcttctgatttaacaggtcatgaagtgagagttcagtttactcctcatttattaccaatggttcggggaattttagccacggtttatgccaccctcagagatcctgggcttgtcagagaggatttattgaccatttacagtgctttttatcgttcctctcctttcgtgaaaattttgtctaacggggtttatccgcaaacaaagtgggcttgttggacgaatttgtgttacttgggtatcgaaaccgatccccgtaccgatcgcgtcattgttctttctgctattgataacttgatcaagggacaagccggacaagcggtacaatgtcttaacattatgatgggatgggaggaaactctcggtttacctcaactggctttttatccctaa

SEQ ID NO: 47821 - protein, 352 aa, Crocosphaera watsonii WH 8501
MGESEKISVGIIGASGYGGVQLVRLLQEHPLVEIVYLGGKGSAGLAYSELYPHLGHAVDLTIEPIDVEAITSRCQVVFLGLPNGLACDLAPPLIEKGCKVLDLSADYRFKNLETYSNWYNKDRSDLETAKTAVYGLPELYRDEIKSASLIGCPGCYPTASLMALSPLLKQGLILPETTIIDAKSGTSGGGRQAKTHLLLAEAEGSFGAYGVAKHRHTPEIEQISSDLTGHEVRVQFTPHLLPMVRGILATVYATLRDPGLVREDLLTIYSAFYRSSPFVKILSNGVYPQTKWACWTNLCYLGIETDPRTDRVIVLSAIDNLIKGQAGQAVQCLNIMMGWEETLGLPQLAFYP

SEQ ID NO: 47822 - DNA, 1032 bp, Exiguobacterium sibiricum 255-15
  CDS (1)..(1032): transl_table=11
atgaaatgtacgattgtaggtgcgaccggatatgctgcgattgagctgatacgcctgattgaattacatcctcatttggaaatcgtctcattgatcagcgattcgcaaaccaatcaggaaatgaatgatttatacagtttcatgaataataaacaatttcctgtactgacagcattttcactggaacaaattgaagcggtggaaacagatcttttatttttagcgacgccgagcggaatttccacgaaatatctgaaacagctggatgactggaaaggaacggtcatcgatttgagcggagacttgcgtcttgaaaaatcattgtatgaaaaatggtatccccatgaaagcgtcgatacggttctccaaaaaaaagcaacctacggactgacggaatggaagcgggagcaaatcaaggacagtcgtttaattgccaatccgggttgttatgctacggctgtcttactcgggttattaccgttattagaagagcgggtgattgatccgtcgcaaatcatcattcatgcgagctccggcttgtcgggagcaggaaaaacattgacggaacaaacacaccacgttcgatcaagcgaaaatgtccgattgtacaaaatgaaccaacatcaacatattccggaaatcgaatcgattgctgaagacatcaccggacaacagatcaccgtgtcacttgcgacgtatctcgtgccactcaaccgtggcatcatggcgacgatgacgttgcagcccctcgttgaaaaaacggaagccgagtggcggacatggttcattgaaaaatataagcaggaatcctttatccgtgtcggacaaacggatccagaaatcaaatcggcagccggaagcaactattgtgacatttcggtctatctggatacacgtacgggaagactgacggtcgtatccgtgctggataacatgcaaaaaggcgcagcaggacaagcgattcaaaatgccaatgtcattggcggatatccagaaacactaggtctgacacaacagccattctttatatag

SEQ ID NO: 47823 - protein, 343 aa, Exiguobacterium sibiricum 255-15
MKCTIVGATGYAAIELIRLIELHPHLEIVSLISDSQTNQEMNDLYSFMNNKQFPVLTAFSLEQIEAVETDLLFLATPSGISTKYLKQLDDWKGTVIDLSGDLRLEKSLYEKWYPHESVDTVLQKKATYGLTEWKREQIKDSRLIANPGCYATAVLLGLLPLLEERVIDPSQIIIHASSGLSGAGKTLTEQTHHVRSSENVRLYKMNQHQHIPEIESIAEDITGQQITVSLATYLVPLNRGIMATMTLQPLVEKTEAEWRTWFIEKYKQESFIRVGQTDPEIKSAAGSNYCDISVYLDTRTGRLTVVSVLDNMQKGAAGQAIQNANVIGGYPETLGLTQQPFFI

SEQ ID NO: 47824 - DNA, 1017 bp, Prosthecochloris aestuarii DSM 271
  CDS (1)..(1017): transl_table=11
atgagaggttataaacagccaaccgtatccgttatcggggcctccggctattcaggggcagagcttacaaaaattcttgcgcgtcacccttcagtcaaactcgacaagctctacgcattttctcaggcaggcaaaaaaaccacagacctctatccgtggcttgctgtcgacatgacctatgaagcatatgacggggagttcgatagcgacatctgctttctgaccctgcctcacggcgaagcattaaagcttgtcccagacctcaggaatgcaggtaaaatggttattgacctgtctggagatttcagactgaaaaacgctgaagaacatctccggttctacggccgggaaaaacctgatgacgcatgcatgacctatgcaatgccggaactgttccatgaagagatccgcaatgcaacagcagtaagcaaccctggatgttatgccaccagcatcattcttgggctggcacctctcatactgaagccgcaggacagcgcaaaggtgaacacggtctgctgcagcggaatctccgggatatcgggagcgggaaaaaccgccaaaacggaactctcattttcagaaatgaatgacaatatacgggcctacaaagtagccaggcatcagcatacaccggagattctccaaacccttggaaccagcgcgaccgaaccgtcattcgggtttacctttacgccgatgatagcccctttgaccagaggtatttacactatattgaatatcgcgcttgataaacatcttcctgtttctgaaattacggagctctaccggagcttctatatttccgcgccatttgtacgagtcagagaaatgccgcctgaaatcctccatgtggcccatacaaatttctgtgatattcatgttgctgaaagcggaaaagatggttcggttgttgtgataacagcgatcgacaacctcgtcaaaggcgccgctggacaggcagtacaaaacatgaatatcatgcttggctatgatgaagcacttggattgacctaa

SEQ ID NO: 47825 - protein, 338 aa, Prosthecochloris aestuarii DSM 271
MRGYKQPTVSVIGASGYSGAELTKILARHPSVKLDKLYAFSQAGKKTTDLYPWLAVDMTYEAYDGEFDSDICFLTLPHGEALKLVPDLRNAGKMVIDLSGDFRLKNAEEHLRFYGREKPDDACMTYAMPELFHEEIRNATAVSNPGCYATSIILGLAPLILKPQDSAKVNTVCCSGISGISGAGKTAKTELSFSEMNDNIRAYKVARHQHTPEILQTLGTSATEPSFGFTFTPMIAPLTRGIYTILNIALDKHLPVSEITELYRSFYISAPFVRVREMPPEILHVAHTNFCDIHVAESGKDGSVVVITAIDNLVKGAAGQAVQNMNIMLGYDEALGLT

SEQ ID NO: 47826 - DNA, 1050 bp, Xylella fastidiosa Ann-1
  CDS (1)..(1050): transl_table=11
atgcgtcgcccactgcgcccaacatcccccaaccctgatcgattgaagatgagcaccgccaccttcacccttggcattgttggcgcccgcggctacaccggcgccgcattgatcagcctccttactgcccaccccgcgattgaactcatctttgtttcctcgcgtgaataccatggccagcccgttgccgcacacagccccacctactgcggtgatctgcgttttgaaaccctcgacccggctgccgttgctgccaaacgtgccgatgtcgtcatcctcgccctacccaatggcaacgccgccccttacgtacacgccattgatgccaccgccccccccaccatcatcatcgacctatccgcagatacccgctttgacccagactggtactacggcctccccgaactgacccgacacacctacaccggacacaaacgcatcagcaacccaggctgctacgccaccgcaatgcaactagccatcgccccccttcgtgaccaactggctggccccccacagtgctttggcgtctccggctactccggtgctggcaccaccccctcagacaaaaacaaccaagccctactgcgtgacaacctcatgccatacgcactcaccgaccacctgcatgaacgtgaagttagcgcccaacttggtatccccgtcgaattcatgccccatgtcgccccccactttcgcggcatcaccctcaccgccaacctctggttacaacgccccctgacccgggaacacatcaagaccctctacgcaacccgttatgccaacgacccactgatcgacatcatcgacccccccccctgggttaaccagattgccgcccgccataccgtacagatcggcgccttcaccatggcaccgggcaacaaacgcgttgtgatcgtcgccaccttggataacctcctcaaaggcgccgccacccaagccctacagaacctcaaccgcgcacttggcctggacgaacttaccgccatcccctaccaacccaatccccccgccaccccgctaccctcctccccccttgcatcatga

SEQ ID NO: 47827 - protein, 349 aa, Xylella fastidiosa Ann-1
MRRPLRPTSPNPDRLKMSTATFTLGIVGARGYTGAALISLLTAHPAIELIFVSSREYHGQPVAAHSPTYCGDLRFETLDPAAVAAKRADVVILALPNGNAAPYVHAIDATAPPTIIIDLSADTRFDPDWYYGLPELTRHTYTGHKRISNPGCYATAMQLAIAPLRDQLAGPPQCFGVSGYSGAGTTPSDKNNQALLRDNLMPYALTDHLHEREVSAQLGIPVEFMPHVAPHFRGITLTANLWLQRPLTREHIKTLYATRYANDPLIDIIDPPPWVNQIAARHTVQIGAFTMAPGNKRVVIVATLDNLLKGAATQALQNLNRALGLDELTAIPYQPNPPATPLPSSPLAS

SEQ ID NO: 47828 - DNA, 1032 bp, Xylella fastidiosa Ann-1
  CDS (1)..(1032): transl_table=11
atgcgtcgcccactgcacccaacatcccccaaccctgatcgattgaagatgagcaccgccaccttcacccttggcattgttggtgcccgcggctacaccggcgccgcattgatcacccttcttactgcccaccccgcgattgaactcatctttgtttcctcgcgtgaataccatggccagcccgttgccgcacacaaccccacctactgcggtgatctgcgttttgaaaccctcggcccggctgccgttgctgccaaacgtgcagatgtcgtcatcctcgccctacccaatggcaacgccgccccttacgtacacgccattgatgccaccgcaccccccaccatcatcatcgacctatccgcagatacccgctttgacccagactggtactacggcctccccgaactgacccgacacacctacaccggacagaaacgcatcagcaacccaggctgctacgccaccgcaatgcaactagccatcgccccccttcgcgaccaactggctggccccccgcagtgctttggcgtctccggctactccggtgctggcaccaccccctcagacaaaaacaaccaagccctactgcgtgacaacctcatgccatacgcactcaccgaccacctgcatgaacgtgaagttagcgcccaacttggtatccccgtcgaattcatgccccatgtcgccccccactttcgcggcatcaccctcaccgccaacctctggttacaacgccccctgacccgggaacacatcaagaccctctacgcaacccgttatgccaacgacccactgatcgacatcatcgacccacccccctgggttaaccagattgccgcccgccataccgtacagatcggcgccttcaccatggcaccgggcaacaaacgcgttgtgatcgtcgccaccttggataacctcctcaaaggcgccgccacccaagccctacagaacctcaaccgcgcacttggcctggacgaactgaccgccattccctaccaacctaaccctgtcccatcacccattccataa

SEQ ID NO: 47829 - protein, 343 aa, Xylella fastidiosa Ann-1
MRRPLHPTSPNPDRLKMSTATFTLGIVGARGYTGAALITLLTAHPAIELIFVSSREYHGQPVAAHNPTYCGDLRFETLGPAAVAAKRADVVILALPNGNAAPYVHAIDATAPPTIIIDLSADTRFDPDWYYGLPELTRHTYTGQKRISNPGCYATAMQLAIAPLRDQLAGPPQCFGVSGYSGAGTTPSDKNNQALLRDNLMPYALTDHLHEREVSAQLGIPVEFMPHVAPHFRGITLTANLWLQRPLTREHIKTLYATRYANDPLIDIIDPPPWVNQIAARHTVQIGAFTMAPGNKRVVIVATLDNLLKGAATQALQNLNRALGLDELTAIPYQPNPVPSPIP

SEQ ID NO: 47830 - DNA, 1029 bp, Sulfitobacter sp. EE-36
  CDS (1)..(1029): transl_table=11
atgacccataatatcgccattcttggtgcctccggctataccggagccgagctgatccggctgatcgctggccattcctctatgcagatcaaagctttgggggcaaactccaaggcggggcaaaccatcgcagaggtgtttccacatctgcgccatctcgacctgcccgcattggtcaccatcgaagagatcgatttctcggacattgacctgtgcttttgcgccttgccccataaaaccagccaagaggtcattgccaacctgcctaaagacctgaaaatcgtcgatctttcggcagatttccggctgcgcgaccccgaggcctacgccaagtggtacggcaacccccatgccgcgctggagcagcagaaagaggcggtctatggcctcaccgaattctaccgcgaagagatcaaatccgcgcgtcttgtggccggtacaggctgcaacgccgccaccggccagttcgccctgcgccccttgatcgaaaaaggggtgattgatctggacgacatcatccttgacctcaaatgcgccgtgtccggtgcggggcggtcgttgaaggaaaacctgctgcatgcagaactgtccgaggggtatcacgcctattcccttggcgggacgcaccgccatctgggtgagtttgatcaggagttttccgccattgctggccgtccggttaaggtgcagttcacccctcatctggtgcccgccaaccgcggtattttggcgaccgtctatgtcaaaggcgacgccgaggtgatccacaaaacccttgccgcggcctatgatgcagagccctttatcgaggtgctgcccatgggggaggccccgagcacgcgccatattcgcgggtcgaacttctgtcatatcggcgtggtggcagaccggattgacggccgtgccattgtggttgccgcgctcgataatttgaccaagggctccagcgggcaggcgttgcaaaacgccaacctgatgttaggtattgacgaggtcgaggggctgatgatggctccgctatttccctga

SEQ ID NO: 47831 - protein, 342 aa, Sulfitobacter sp. EE-36
MTHNIAILGASGYTGAELIRLIAGHSSMQIKALGANSKAGQTIAEVFPHLRHLDLPALVTIEEIDFSDIDLCFCALPHKTSQEVIANLPKDLKIVDLSADFRLRDPEAYAKWYGNPHAALEQQKEAVYGLTEFYREEIKSARLVAGTGCNAATGQFALRPLIEKGVIDLDDIILDLKCAVSGAGRSLKENLLHAELSEGYHAYSLGGTHRHLGEFDQEFSAIAGRPVKVQFTPHLVPANRGILATVYVKGDAEVIHKTLAAAYDAEPFIEVLPMGEAPSTRHIRGSNFCHIGVVADRIDGRAIVVAALDNLTKGSSGQALQNANLMLGIDEVEGLMMAPLFP

SEQ ID NO: 47832 - DNA, 1029 bp, Roseovarius nubinhibens ISM
  CDS (1)..(1029): transl_table=11
atggcccataaaatcgcaattctcggcgcatccggctataccggggccgagctcatccgcctgatcgccacccatcccaatatggagatcgtggcgcttggcgcgaattccaaggcggggcagagcatggcctcggtctttccgcatctgcgccatctggcgctgcctgatctggtgaccatcgaagagatcgatttcgcgggcgtcgacctgtgtttctgtgcgctgccgcatgccacctcgcaggaggtgatccgcgatctgccgaagcatctcaaggtcgtcgatctgagcgccgatttccggctgcgcgatccggcggaatacaagaaatggtatggcaatgatcatgccgcgctcgactgtcagaaagaggcggtctatgggctcaccgagttctaccgcgacgagatcgccagcgcgcggctggtggccgggaccggctgtaacgcggcgacggggcaatatatcctgcggcctctgatcagcgccggggtgattgatctcgacgatatcattctcgacctgaaatgcgcggtgtcgggggcggggcggtcgcttaaggaaaatcttctccatgccgagctcagcgaggggtataatgcctatgcggtgggcggcacccatcgtcaccttggtgagttcgatcaggagttttcggcgctggccgggcggccggtgcgggtgcagttcacgccgcatctgatccccgccaaccgcggcatccttgccaccagctatgtcaaaggcgcggcgcaggcggtgcatgagaccctgcaaaagacctatgcgggcgagccgttcattcaggttttgccctttggtgagacgccgtcgacgcatcatgtgcgcggctcgaacttttgccatatcggggtgaccggggaccggatcgaagggcgggccatcgtggtggcggcgctcgacaacctgaccaagggatcgagcggccaggccttgcagaacgccaacctgatgctgggcgaggcggagaccgaagggcttatgtccgtgccggtgtttccgtaa

SEQ ID NO: 47833 - protein, 342 aa, Roseovarius nubinhibens ISM
MAHKIAILGASGYTGAELIRLIATHPNMEIVALGANSKAGQSMASVFPHLRHLALPDLVTIEEIDFAGVDLCFCALPHATSQEVIRDLPKHLKVVDLSADFRLRDPAEYKKWYGNDHAALDCQKEAVYGLTEFYRDEIASARLVAGTGCNAATGQYILRPLISAGVIDLDDIILDLKCAVSGAGRSLKENLLHAELSEGYNAYAVGGTHRHLGEFDQEFSALAGRPVRVQFTPHLIPANRGILATSYVKGAAQAVHETLQKTYAGEPFIQVLPFGETPSTHHVRGSNFCHIGVTGDRIEGRAIVVAALDNLTKGSSGQALQNANLMLGEAETEGLMSVPVFP

SEQ ID NO: 47834 - DNA, 1029 bp, Oceanicola batsensis HTCC2597
  CDS (1)..(1029): transl_table=11
atgaccaagaaaatcgccataatcggcgcgtccggctataccggagccgagctgatccgcctcattgcctcccatcccgggatggaggtcgccgcactggccgccaattccaaggcgggccagagcatggcctcggtctttcccttcctgcgacatctcgacctgcccgacctcgtgatctgggagcagatcgatttcgcccggatcgacctgtgcttctgcgcgctgccccacaagacatcgcaagaggtcatcagccagctgcccgccgagatgaagatcgtcgacctctcggccgatttcaggctgcgcgacccggcggactacaagaattggtacggcaacgatcatgcggccgtggagatgcagcaggaggccgtctacggcctgaccgagttctaccgcgaccggatcgccggcgcgcggctggttgcgggcaccggctgcaacgcggcgacggggcagtactcgctccgcccgctgatccaggcgggggtgatcgggctcgacgacatcatcctcgacatgaaatgcgccgtctccggcgcggggcggagcctcaaggagaacctgctgcatgccgagctgtccgagggctacaacgcctatgccgtgggcgggcagcaccggcacctgggcgaattcgaccaggagttctcggcgcttgcggggcgtcccgtccgggtgcagttcacgccgcatctgatccccgccaaccgcggcatcctttcgacgggctatgtctcaggcgatgcgaaggcggtgcacgagaccatgctgcgcgcctatgccgacgagcccttcatcgaggtcctgcccttcggcgaaaccccgtcgacgcatcacgtgcgcgggtcgaacttcgtacatctcggcgtcaccggcgaccggatcgagggccgcgccatcgtggtggccgcgctcgacaacctgtgcaagggttcttcgggccaggcggtgcagaacgccaacctgatgctcggccttcccgagacccaggggctcatggcggccccgctcttcccgtga

SEQ ID NO: 47835 - protein, 342 aa, Oceanicola batsensis HTCC2597
MTKKIAIIGASGYTGAELIRLIASHPGMEVAALAANSKAGQSMASVFPFLRHLDLPDLVIWEQIDFARIDLCFCALPHKTSQEVISQLPAEMKIVDLSADFRLRDPADYKNWYGNDHAAVEMQQEAVYGLTEFYRDRIAGARLVAGTGCNAATGQYSLRPLIQAGVIGLDDIILDMKCAVSGAGRSLKENLLHAELSEGYNAYAVGGQHRHLGEFDQEFSALAGRPVRVQFTPHLIPANRGILSTGYVSGDAKAVHETMLRAYADEPFIEVLPFGETPSTHHVRGSNFVHLGVTGDRIEGRAIVVAALDNLCKGSSGQAVQNANLMLGLPETQGLMAAPLFP

SEQ ID NO: 47836 - DNA, 927 bp, Erythrobacter sp. NAP1
  CDS (1)..(927): transl_table=11
atggctacccgcattttcatcgatggtgctgccgggacgaccggcctcgaaatccgtgaccggcttgaggcgcgcgacgaattcgagttactcgtgctggacgatgcgcagcgcaaggacgttaccgcgcgcaaggacgccctgcacgaggcggacgtcgcgatcctgtgccttcccgacgacgcggcacgcgaagcggtgcagctggcggaagggtcggacacacggatcatcgacgcatcgagcgcacaccgcgtggctgatggctggacatacggcttccctgagctgatcgggcatgacgaggtcgcgaatgcgcgcttcgtgagtaatccagggtgctatccgaccggcttcctcgcgctggttgcgcctctggtccgcgccgggttgctgccagccgactggcccttcaccgtcaacgcggtcagtggatattcgggcggcggcaatgcgctgattgatcgcttcgcagccgagccggacatcgctttccgcacctatggcctcaacctcgcgcacaagcaccggccagagatgaagcttcacgcggggctcaagcacgaagtcctgtttgccccttcggtggtaccggctttgcgcggaatgatagtcgaggtgcccctgcaccttggggcgatgtctaccgatccgcactccgacagcctgcgcgccgcgctgctcgatttctattcgggatcgcgggtcgtaaaggtcgccgaaggcgaggcaccgaacgagttgctgctgctcgatggagcgccagccaatgatggcctcgagctgttcgtgtgcggcaatgagggcggttggaatgtgcgcctcatcgcccggctcgacaacctcggcaagggcgcgtccggagccgcaatccagaatctcaacatcatgtgcggactgcctgaagcaaccgggctgcggctctaa

SEQ ID NO: 47837 - protein, 308 aa, Erythrobacter sp. NAP1
MATRIFIDGAAGTTGLEIRDRLEARDEFELLVLDDAQRKDVTARKDALHEADVAILCLPDDAAREAVQLAEGSDTRIIDASSAHRVADGWTYGFPELIGHDEVANARFVSNPGCYPTGFLALVAPLVRAGLLPADWPFTVNAVSGYSGGGNALIDRFAAEPDIAFRTYGLNLAHKHRPEMKLHAGLKHEVLFAPSVVPALRGMIVEVPLHLGAMSTDPHSDSLRAALLDFYSGSRVVKVAEGEAPNELLLLDGAPANDGLELFVCGNEGGWNVRLIARLDNLGKGASGAAIQNLNIMCGLPEATGLRL

SEQ ID NO: 47838 - DNA, 1077 bp, Synechococcus sp. WH 5701
  CDS (1)..(1077): transl_table=11
atggtcagccccacagcagcccggcgcgtcgcggtgatcggcgccagcggctatggcggccttcagaccctgcgcctgctccatcaccaccccgaattcgtggtcagttatctggggggtgagcgcagtgccggccacgcctggagcgagctggttcccttcctgcccctggagggcaacccggtggtgcgggcccccgaccccgaggcaatcgccgctgaggccgacttcgcggtgctcagccttcccagtgggctggcctcccagctggtgcccgccctgctggagaggggggtgaaggtggtggatctctccgccgactaccgctatcgctccctggcccagtggaaggaggtgtactccagcgaggccgaacggtttgagcgtcacgatggcgttctctgcgccgaggcggtctatggcctggtggagtgggaggagaagcgtgtcagcgcggcgcggctggtggcggcccctggttgtttccccaccgccagcctcttgccgctgctgcccttcctcaagcagggtctgatcgatcgcagcggcatcatcatcgatgccaagaccggcacctccggcggtggccgagccgccaaggagaatctgctcctggcggaagcgggcgaggccgtggctccctacggcgtggtggggcaccgccacaccagcgagatcgagcagaccgccagccaggtggcggggcagccgatccagctgcagttcactccgcacctgatgccgatggtgcggggtctgctggccacggtctacgggcggctgcgggatccgggcctgaccgccgaagactgcaccaccgtgcttcaggccgcctaccgccacagcccctgcgtggaggtgctgccagtgggcacctacccctccaccaaatggacccgccagaccaaccgggccctgctctcggttcaggtcgacagtcgcacgggccagctgatcctgatgagcgccgtcgacaacctggtcaagggccaggcgggacagggggtgcagtgcctcaatctgatggccggcctgccggcgtcgatgggtttgccgctgctcccgttctatccctga

SEQ ID NO: 47839 - protein, 358 aa, Synechococcus sp. WH 5701
MVSPTAARRVAVIGASGYGGLQTLRLLHHHPEFVVSYLGGERSAGHAWSELVPFLPLEGNPVVRAPDPEAIAAEADFAVLSLPSGLASQLVPALLERGVKVVDLSADYRYRSLAQWKEVYSSEAERFERHDGVLCAEAVYGLVEWEEKRVSAARLVAAPGCFPTASLLPLLPFLKQGLIDRSGIIIDAKTGTSGGGRAAKENLLLAEAGEAVAPYGVVGHRHTSEIEQTASQVAGQPIQLQFTPHLMPMVRGLLATVYGRLRDPGLTAEDCTTVLQAAYRHSPCVEVLPVGTYPSTKWTRQTNRALLSVQVDSRTGQLILMSAVDNLVKGQAGQGVQCLNLMAGLPASMGLPLLPFYP

SEQ ID NO: 47840 - DNA, 1065 bp, Synechococcus sp. WH 7805
  CDS (1)..(1065): transl_table=11
atggtgaatcaacgggttgccgtggtgggtgcctcgggatatggagggctccagaccttgcgccttctcaaagagcacccctcatttcaggtgagctttctggctggcgagcgctctgctggccgtccctggaaggagatctgcccatttctcccactggatggtgatccgatcgttgaagctgcggacccggatcgcatcgcttcaacgtcagatttcgctgtgctgagcttgcccaacggactggccagcaagttggttccacctttgctggagcgaggtgtgagggtggtcgatctgtccgcggactatcgctacaaatcgcttgaccactggtcctccgtgtatgtgcaggaggccaggagcgcagcaagaacagaccatgatctctgcgaggaggccatctacggtctgcccgaatggcatcaccaggacattgccaatgctcggttggttgctgcgccgggctgtttcccgacagcaagtctcttgccactactccctttcctcaagcagggattgatcgagagtgatggcttaattatcgatgcaaaaacagggacgtcaggtggagggcgagccgcgaaggaacaccttcttcttgccgaggcgtctgaatcgattgccccttatggcgtgatcggtcaccgccacacctctgaaatcgaacagttggctagcaacgttgcaggctgccccatccaacttcagttcacgccccatcttgtaccgatggtgcgagggcttctttcaaccgtctacgccaggttgagagatccgggactaacagcagaggactgcacaactgtgctggagaccgtttaccagcagcatccctgcgtggaggttcttcccgtaggaacctatccagcgaccaaatgggccaaacacaccaaccgagccatgctttcggtacaggtggatacaagaactggtcgtctcgtgctgatgagcgctgttgacaatcttcttaagggccaggccggccaaggccttcagtgcctaaacctgatggccggtctgaaatccaccgaagggcttccactgacaccgttctatccctga

SEQ ID NO: 47841 - protein, 354 aa, Synechococcus sp. WH 7805
MVNQRVAVVGASGYGGLQTLRLLKEHPSFQVSFLAGERSAGRPWKEICPFLPLDGDPIVEAADPDRIASTSDFAVLSLPNGLASKLVPPLLERGVRVVDLSADYRYKSLDHWSSVYVQEARSAARTDHDLCEEAIYGLPEWHHQDIANARLVAAPGCFPTASLLPLLPFLKQGLIESDGLIIDAKTGTSGGGRAAKEHLLLAEASESIAPYGVIGHRHTSEIEQLASNVAGCPIQLQFTPHLVPMVRGLLSTVYARLRDPGLTAEDCTTVLETVYQQHPCVEVLPVGTYPATKWAKHTNRAMLSVQVDTRTGRLVLMSAVDNLLKGQAGQGLQCLNLMAGLKSTEGLPLTPFYP

SEQ ID NO: 47842 - DNA, 1017 bp, Pseudoalteromonas tunicata D2
  CDS (1)..(1017): transl_table=11
atgaacgtaattattgttggagcaagtggctatagcggtgcagagttagcaaagttagtagttgcacatcctaaattaaccttagctggtttatttgtttcagaacaaagcttggataaaggaaagttgctcagcgatttatacccgcaatatgttggtgttattgatgtaccgttacagcctttaacgagcgatgcaatgagttatattcagcaacaggccgattatgtctgtttatgcacagagcataaagtgagtgttgatttagcgccgttatttttagatatgggtaaaaaggtatttgatttatcaggtggctttcgtttagcaaacaatcaagattatcaaacatactatggttttactcatgaaaatgaagcgctcctaaatcaagccgcttatggtttggctgagtggaacagtgacgctattgaaaaagcccagctcgttgcagttgcaggctgttacccaacggcggcgttaaatgcactcaaaccgttagttaatgcaggtttagtgagtgagcaaaaaattattattaatgctgtgtcaggtgtcagtggcgccggtcgtaaagcaaatatatcaacggggttttgtgaagtgagtttaaaaccttatggtttgtttaaccacagacacagtcctgagattgagcgctatttagggcataaagtgctatttacaccgcatttaggtaattttcctcgtggcattttagaaactatttatgtggatttaaaaccaggcgttaccgagcagcaagttaatgatgcgtatcaatgtttggctgatcaaccgctaattcgtttattaggcaataagatcccatcaattaatggtgtagttaaccaagcgtttgttgatatcggttggcaacaacaagggcaaagcctcattgtgatgagtgcgattgataacttattaaaaggtgcagcaggtcaagcattgcagtgcataaacatttcaatgggcttaagtgctgcttatacattagtgggagcacatcatgagtaa

SEQ ID NO: 47843 - protein, 338 aa, Pseudoalteromonas tunicata D2
MNVIIVGASGYSGAELAKLVVAHPKLTLAGLFVSEQSLDKGKLLSDLYPQYVGVIDVPLQPLTSDAMSYIQQQADYVCLCTEHKVSVDLAPLFLDMGKKVFDLSGGFRLANNQDYQTYYGFTHENEALLNQAAYGLAEWNSDAIEKAQLVAVAGCYPTAALNALKPLVNAGLVSEQKIIINAVSGVSGAGRKANISTGFCEVSLKPYGLFNHRHSPEIERYLGHKVLFTPHLGNFPRGILETIYVDLKPGVTEQQVNDAYQCLADQPLIRLLGNKIPSINGVVNQAFVDIGWQQQGQSLIVMSAIDNLLKGAAGQALQCINISMGLSAAYTLVGAHHE

SEQ ID NO: 47844 - DNA, 1014 bp, Photobacterium sp. SKA34
  CDS (1)..(1014): transl_table=11
atgttaaagactctaattatcggtgcaagtggctataccggcgcagaacttgcgaaaatggtggttaagcatcctcatttagaacttgcgggtttatttgtttctgaaaatagccttgatgcaggtaaacagctaagtgatttacatggtcaattgaaaggcattgttgatttaccgttacaacctttaatcagtccaactgatatagctaaagatgctgacgttgttttacttgccacggctcaccaagtcagccatgaccttgctgtcagttttcttaatcaagggtgtcaggtttttgatttatccggtgcctttcgtgtgaaaggtgatgatttctatacccagtattatggttttgaacaccagtattcagattggcttgaacaagcggtttatggtttagctgaatggaatcatgatctaattgctaacgcacaattaattgctgttccaggctgttacccaacagcttcacaattagcgcttaaaccattaattgaagcgggtttactcgataccgagcagtggccagtgattaatgcggtcagtggtgtgtctggcgctggtagaaaagcgaccatgactaatagtttctgcgaagtaagcctccaagcttacggtttattttcccaccgtcatcagcctgaaatcagtactcacctaggccgagacgttatttttaccccgcatctcggcaactttaaacgcgggattcttgcaacgattacagcgaaattagctgacggcactacattagatcaggtaacagaagcctttactcttgcttatgcatcttcatcagatacacatgcggtacgactgttaggaacacaagcggcacgtctacagaatgtggtgggtaattgtttctgtgatattggctggcatgtggatggtcaacatatcattttaacatcagcgattgataaccttttgaaaggggcttcttcgcaagcgatgcagtgcataaatattcgaaatggtttcccgcaattaacagctttagcgtag

SEQ ID NO: 47845 - protein, 337 aa, Photobacterium sp. SKA34
MLKTLIIGASGYTGAELAKMVVKHPHLELAGLFVSENSLDAGKQLSDLHGQLKGIVDLPLQPLISPTDIAKDADVVLLATAHQVSHDLAVSFLNQGCQVFDLSGAFRVKGDDFYTQYYGFEHQYSDWLEQAVYGLAEWNHDLIANAQLIAVPGCYPTASQLALKPLIEAGLLDTEQWPVINAVSGVSGAGRKATMTNSFCEVSLQAYGLFSHRHQPEISTHLGRDVIFTPHLGNFKRGILATITAKLADGTTLDQVTEAFTLAYASSSDTHAVRLLGTQAARLQNVVGNCFCDIGWHVDGQHIILTSAIDNLLKGASSQAMQCINIRNGFPQLTALA

SEQ ID NO: 47846 - DNA, 1035 bp, Oceanospirillum sp. MED92
  CDS (1)..(1035): transl_table=11
gtgattaaggtcggtattgtaggtggaaccggttacaccggtgttgagttacttcgtttgttggcaaatcatccacaggctaaagttgaggtgattacttcccgttctgaggaaggtgttagcgtggctgacatgtatccaaacttgcgaggacaccacgatctgcgattcaccgtccctgatgtggaaactttgagcggttgcgatgtggttttctttgcaacgccgcacggtgttgctatgaatatggcggctgaactggttggtaaaggtgtgcgggtcatcgatctgggtgcggatttccgtattaaagacctggagctttggtctcagtggtatgcaatggaacatacacagcctgaaatggctgaattagcggtttatggtcttccagaagttaaccgtgaacagattaaagatgcacagttgattgcttgcccaggttgctacccgacagctacgcagcttgcattcctgcctctgctggaaaatacgctgatcgatcaccgtcgcctgattgctgattgtaaatctggagtcagtggtgctgggcgtggcgctaaagtaggtatgctgctttgtgaagctagtgagagcatgatggcttatggtgtgcatggacatcgtcaccttccagagatcaagcagggcttagcgctagcggcagagcgtccagtacatttaacatttgtaccgcacctgacgcccatgattcgtggtattcattcgacctgctatggcgtgcttaaagatcctgttgatcacgatttacaggcgatgtttgaagagcgttatgctgatgagccgtttgtagatgtgatgccagcgggtagccatccgcagacgcgtagcgtgaaaggggcgaatatgtgccggatcagcgtgcatcgtccacagggtgatgacaccgtagttgtgctatcggttatcgataacctggttaaaggtgcagcgggccaggctgttcaaaatatgaatattatgttcggttttgaagaaacggccgggcttaatattgttgggttgatgccttaa

SEQ ID NO: 47847 - protein, 344 aa, Oceanospirillum sp. MED92
MIKVGIVGGTGYTGVELLRLLANHPQAKVEVITSRSEEGVSVADMYPNLRGHHDLRFTVPDVETLSGCDVVFFATPHGVAMNMAAELVGKGVRVIDLGADFRIKDLELWSQWYAMEHTQPEMAELAVYGLPEVNREQIKDAQLIACPGCYPTATQLAFLPLLENTLIDHRRLIADCKSGVSGAGRGAKVGMLLCEASESMMAYGVHGHRHLPEIKQGLALAAERPVHLTFVPHLTPMIRGIHSTCYGVLKDPVDHDLQAMFEERYADEPFVDVMPAGSHPQTRSVKGANMCRISVHRPQGDDTVVVLSVIDNLVKGAAGQAVQNMNIMFGFEETAGLNIVGLMP

SEQ ID NO: 47848 - DNA, 978 bp, Flavobacteria bacterium BBFL7
  CDS (1)..(978): transl_table=11
atgattaaagcaggaataataggtggtgctggttatacagcaggagaattaataagacttttaattcatcatgatgaggtagtcatagattttatatactcaacttctaatgctggtaatgcggtgagcgatgtgcatcaagatcttttaggcactacaaatttggtgtttacataccaattaaatagtaatgtagatgttttgtttttatgtctaggtcatggcaattcaaaatcgtttttagagaaacatcaattttcaacaagtacaaaaatgatcgatttaagtaatgattttaggttgatggaatatgcacgctttcgcgaaagcgagttcacatacggactgtgcgagtatcaaaaagaagagattaaaaaagctactcatgtggcaaatccaggatgttttgcaacagcgatacaacttgccattttaccactagctgtacagcaattgataaaagaagatgtacacgtaaatgcagttactggtgcaacaggtgcaggtacaagtttatcaccaacaacacattttacctggagagataataatttctcacactacaaagctttcacacatcagcatcttggagaaataaatcagactttaagacagtcgcaacaagattttgattctaatgtgctatttgtacctaatcgtggtgatttcagtagagggatttttgcgacagcttatactaaagtagacttgccacttgaagatataaagaacttttataaggactattataaagactcaccatttgtatttgtgtctgataaagaggtgcatttaaagcaaatagttaatactaataagtgtctaatacacctacataagcataacgacattttattgataacgagtgtgatcgataacttattgaaaggtgcgtctgggcaggcagtacagaatatgaatttgatgttcgatttttctgaagatcaaggtttacaacttaaagccaactttttttaa

SEQ ID NO: 47849 - protein, 325 aa, Flavobacteria bacterium BBFL7
MIKAGIIGGAGYTAGELIRLLIHHDEVVIDFIYSTSNAGNAVSDVHQDLLGTTNLVFTYQLNSNVDVLFLCLGHGNSKSFLEKHQFSTSTKMIDLSNDFRLMEYARFRESEFTYGLCEYQKEEIKKATHVANPGCFATAIQLAILPLAVQQLIKEDVHVNAVTGATGAGTSLSPTTHFTWRDNNFSHYKAFTHQHLGEINQTLRQSQQDFDSNVLFVPNRGDFSRGIFATAYTKVDLPLEDIKNFYKDYYKDSPFVFVSDKEVHLKQIVNTNKCLIHLHKHNDILLITSVIDNLLKGASGQAVQNMNLMFDFSEDQGLQLKANFF

SEQ ID NO: 47850 - DNA, 1038 bp, delta proteobacterium MLMS-1
  CDS (1)..(1038): transl_table=11
atgatcaaggtaggaattataggggcttccggttacaccggggccgagttgacgcgcctgttgattaatcatccgggggtggagcttaccctggccacttcccgccagtacgccggccagcccttggcccgggtctatccccacctgggcggccagaccgagctgctctgccaggatccgcaaggccttgattttcgtggtcaggccgagctctttttcaccgccgttccgcaccagaccgccatggcggtggtgccggcgctgctggccggcggcgctaaagtaattgatctctccgccgatttccggctccatgaccaggcgacttacgaggcctggtatcaggttcattcggctcccgagttgctggccgaggcggcctatggcctgccggagattcaccgtcggcggattgccgccgcccgcctggtggccaatcccggttgctatcccaccagcgtgatcctggggctggcgccgttgctcaaagccggggtgatcgatcccggctccctgatcatcgatgccaaaagcggcacttccggggccggtcgggcagcacaggtcggcaccctgtactgcgaggtgaccgacggcttcaaggcctacaaggtggcctcccatcggcacaccccggaaatcgagcaggagctggggcagttggccggccggcccctgacggtctcctttaccccccacctggtgcccatgtcccgggggatgttgagcaccatctacggcaagctgaccaccgccatcgaccaggccgggctggaacagctctatcgtgatttttatggccgggaaccctttgttcgggtgctggccgacgggcaactgcccgccacccagtatgtccggggcagcaatttctgtgatctggccctgcggctggatgagcgctgcggccgggtgatcgtcctggcggccatcgataacctggtcaagggggcagccggccaggcggtgcagaatatgaacctgctttgcggctggccggaaaaagagggtttgaacgtggtaccgcttttcccttaa

SEQ ID NO: 47851 - protein, 345 aa, delta proteobacterium MLMS-1
MIKVGIIGASGYTGAELTRLLINHPGVELTLATSRQYAGQPLARVYPHLGGQTELLCQDPQGLDFRGQAELFFTAVPHQTAMAVVPALLAGGAKVIDLSADFRLHDQATYEAWYQVHSAPELLAEAAYGLPEIHRRRIAAARLVANPGCYPTSVILGLAPLLKAGVIDPGSLIIDAKSGTSGAGRAAQVGTLYCEVTDGFKAYKVASHRHTPEIEQELGQLAGRPLTVSFTPHLVPMSRGMLSTIYGKLTTAIDQAGLEQLYRDFYGREPFVRVLADGQLPATQYVRGSNFCDLALRLDERCGRVIVLAAIDNLVKGAAGQAVQNMNLLCGWPEKEGLNVVPLFP

SEQ ID NO: 47852 - DNA, 1035 bp, Oceanobacter sp. RED65
  CDS (1)..(1035): transl_table=11
gtgatcaatgttggtctggttggcggtaccggttataccggcgtcgaactgttgcgtattttggttcaacaccccgaagtcaacttaaaagtggtgacttcacgcggtgaagaaggtaaaccagttgctgatatgtatcccaacctgcgaccatacacggatatctgcttcagtgtaccccagcttgaaacactaagtgagtgtgatctcgtgttttttgcaacacctcatggtgtagctatggaaatgacgccggacttagtcgctaatggtgtgcgtattattgaccttggggctgatttccgcatttatgatacggatgaatatagtaagtggtatggaatagagcatacctgcaaagatattatggcggaaaccatttatggtttgcctgaagtaaatcgtgagcaaattaaagatgcgcgtgtcgtgggtaacccgggttgttatccgacagcggttcaacttggttatttgcctttaattaaatccggcgtggttgatacccaaaatttaattgccgattgtaaatctggcgttagcggtgcgggtcgccaagcaaaagttggtactttactttgtgaggcaagtgagagctttagtgcatatggagcatctggacaccgccacttgccggaaattaagcaaggtttggcgtttgctaaccagaacaaagacgtgggcttaacatttgtgccacacttgacgccaatgatacgcggtatacacgctacactttacgctaagcttacggatacgaacgtcgatttgcagaagttatacgaagaattctaccaagatgaacactttgtcgatgtcatgccattcggcagtcacccggcaacgcgcaatgtaaaaggcagtaacttcaatcagatttcactgcacagaccccaagatggcgataccatcgtggttctctctgtgattgataatttggtgaaaggagcagcagggcaagctgtgcaaaacatgaatatcatgtttggtttccctgaacatacaggcatgacacagcctgctatgttgccttaa

SEQ ID NO: 47853 - protein, 344 aa, Oceanobacter sp. RED65
MINVGLVGGTGYTGVELLRILVQHPEVNLKVVTSRGEEGKPVADMYPNLRPYTDICFSVPQLETLSECDLVFFATPHGVAMEMTPDLVANGVRIIDLGADFRIYDTDEYSKWYGIEHTCKDIMAETIYGLPEVNREQIKDARVVGNPGCYPTAVQLGYLPLIKSGVVDTQNLIADCKSGVSGAGRQAKVGTLLCEASESFSAYGASGHRHLPEIKQGLAFANQNKDVGLTFVPHLTPMIRGIHATLYAKLTDTNVDLQKLYEEFYQDEHFVDVMPFGSHPATRNVKGSNFNQISLHRPQDGDTIVVLSVIDNLVKGAAGQAVQNMNIMFGFPEHTGMTQPAMLP

SEQ ID NO: 47854 - DNA, 1056 bp, Desulfitobacterium hafniense DCB-2
  CDS (1)..(1056): transl_table=11
gtgaaagtaggaattatcggagccacagggtatacaggccaagagctggtgcgtttactccaaaatcaccctgaaatagaattagcctacttaggctcatccagtaatagcggagcagtctatggggagatgttcccacagttttcagggctaagtgccagcctggatgcagagtcagggttaggaacagggaaactggatgatgaacaggtgccggatttggacgttttattctgcgcccttcctcatggtcttaccgcaggccgaactgcccaatggctgagccgggggatcaaagtcatcgatttgggagcagattttcgtcttaaagatggagcagtttatgaagcctggtacaaagttcagcaccccgctcaagagctgctgcctgaagccgtctatgggcttccggaattatatcgggataagattgccggaaaaactctcgtagccaaccccggctgctatcccacagccaccctattggctttggccccactgctgcggaaggggctgctgcaaaaagatggactgatcatcgatgccaaatccggagtttccggagccgggcggggcgttgctttaggaaaccatttcagtgaagtcaatgagaattttaaagcctatggggtagccagtcaccgccataccccggaaatagagcagcaattatcggaggctgccggagcagagctcctggttaattttacccctcatcttgtgccgatgattcggggaatccttgccaccatctacgctcaggttacgcccggcgttacagaggctgaccttaaagcctgctggcaggagcagtatgaggaagaggagttcgtccatatccttccggagggaatctggccccagacaaagttcgctttaggaagcaatcatagttttctccagcttaaaatagatccgcgaaccgggcgggctatcctggtctcggcgctggataatttggtcaaaggcgcttcagggcaggctattcagaatatgaatctgatctgtggactgccggagaatatggggcttaaaatgagagggctttggccataa

SEQ ID NO: 47855 - protein, 351 aa, Desulfitobacterium hafniense DCB-2
MKVGIIGATGYTGQELVRLLQNHPEIELAYLGSSSNSGAVYGEMFPQFSGLSASLDAESGLGTGKLDDEQVPDLDVLFCALPHGLTAGRTAQWLSRGIKVIDLGADFRLKDGAVYEAWYKVQHPAQELLPEAVYGLPELYRDKIAGKTLVANPGCYPTATLLALAPLLRKGLLQKDGLIIDAKSGVSGAGRGVALGNHFSEVNENFKAYGVASHRHTPEIEQQLSEAAGAELLVNFTPHLVPMIRGILATIYAQVTPGVTEADLKACWQEQYEEEEFVHILPEGIWPQTKFALGSNHSFLQLKIDPRTGRAILVSALDNLVKGASGQAIQNMNLICGLPENMGLKMRGLWP

SEQ ID NO: 47856 - DNA, 1107 bp, Synechococcus sp. RS9916
  CDS (1)..(1107): transl_table=11
atgcagtccaccccaacggctcaggctccgatttccaccgctgggctggtcggacgcgtcgctgtggtgggtgcgtccgggtatgggggcctacagaccctgaggctgctgcaacggcatccacaattcgccatcacctttctgggtggtgagcgcagtgccggcaagcattggagcgaaatctgttcgttcctgccccttctggatgatcccgttgttgaaactccggatccagcacgcatcgctgagacggctgactttgctgtgctgagcctccccaacggacttgccagtgatttggtccctgacctgcttgaacggggagttcgggtggtggatctgtcggctgactaccgctatcgctccctcgaggagtggtctcaggtgtatgtgcaagaggcccaaaagcatcagcgaactgacgtccagctctgtcaggacgccgtttatggattgcccgaatggtttggtccagagatcgcccaagcccgtttggtggccgctccgggctgtttccccaccaccagcctgctgcccctactgccctttctgaagcaaggcctgatcgaaaccgatggcttgattattgatgccaaaactggcacctcgggtggaggcagggccgcgaaggagcatcttctattggctgaagcgtcggaatcgatcacgccgtatggcgttgtgggccaccgtcacacgtcggaaattgaacagatcgccagtgctgtagccgcatgtccgattcagctgcagttcacgccccacttggtgccgatggtgcgaggtctgctctcaacggtgtatgcccgtctgcgggatcccggtcttaccgccgacgactgcaccacagtgcttgaggcggtctaccgccaccacccctgtgtgcgtgtgctccccgtcggcacttatccggcgacgaagtgggcaaagcacacgaatcaggctttgctgtccgtgcaggtcgacagtcgcacaggccgattggtgttgatgagcgccgtcgacaatctgatgaaaggtcaggccggccagggtgtgcagtgcctcaacctgatggctggtttgcccgccacgacaggactacccctggagcctttctatccctga

SEQ ID NO: 47857 - protein, 368 aa, Synechococcus sp. RS9916
MQSTPTAQAPISTAGLVGRVAVVGASGYGGLQTLRLLQRHPQFAITFLGGERSAGKHWSEICSFLPLLDDPVVETPDPARIAETADFAVLSLPNGLASDLVPDLLERGVRVVDLSADYRYRSLEEWSQVYVQEAQKHQRTDVQLCQDAVYGLPEWFGPEIAQARLVAAPGCFPTTSLLPLLPFLKQGLIETDGLIIDAKTGTSGGGRAAKEHLLLAEASESITPYGVVGHRHTSEIEQIASAVAACPIQLQFTPHLVPMVRGLLSTVYARLRDPGLTADDCTTVLEAVYRHHPCVRVLPVGTYPATKWAKHTNQALLSVQVDSRTGRLVLMSAVDNLMKGQAGQGVQCLNLMAGLPATTGLPLEPFYP

SEQ ID NO: 47858 - DNA, 1011 bp, Alteromonadales bacterium TW-7
  CDS (1)..(1011): transl_table=11
atgaatgtagcgattattggcgcaagtggatacagcggcgcagaactagcaagccttgtggctaaacacccaaatttaaaactgtcaggtagctatgtatctgaaggaagcctagataaacacaaattactgagtgatttatatccagagcacttaggtttacttgatactcctttacttcctcttacaaagtcagcgttcgacgacattaatgcgaatgcagattacgtatgcctgtgtaccgaccataaagtaagcgtagatttagcgccgcaatttttagcgctgggcaaaaaggtgtttgacctatcgggtggttatcgccttgcaagcaatgatgattacgttacttattacggctttgaacataagcaccctgagttattaaatgaatcggcctatggtttagctgaatggaatagcaacgaaattgcaaatgcaaatttagtggctgttgctggctgttatcctaccgcggcgctgaatgcgttaaagccacttcagcaagcaggtttgttaagcgacgacaaaattattattaatgcagtgtcgggtgtaacaggcgcagggcgtaaagccagtataggtactcatttttgtgaagtgtcgctagcgccatatggtttatttaatcatcgccacggaccagaaatagagcaacaccttggtcatcaggttttatttacccctcatttagggaactttgctcgcggtattttagaaaccatttacgtgcaactaaaacctaatgttacaagtgagcaagtggctaaggcctacagcgtgcttgaaaacgagcctttaatccgcttgttaggtagtaagatcccgtcaattaagggagttgcaaagcagccttatgttgatattggttggcagcagcaaggctctcaactcattgttatggcagccattgataatttactaaaaggtgctgcagggcaagctctgcagtgtattaatttatcaatgaatttagaccacaccacaggcttaaaaggagcgttttaa

SEQ ID NO: 47859 - protein, 336 aa, Alteromonadales bacterium TW-7
MNVAIIGASGYSGAELASLVAKHPNLKLSGSYVSEGSLDKHKLLSDLYPEHLGLLDTPLLPLTKSAFDDINANADYVCLCTDHKVSVDLAPQFLALGKKVFDLSGGYRLASNDDYVTYYGFEHKHPELLNESAYGLAEWNSNEIANANLVAVAGCYPTAALNALKPLQQAGLLSDDKIIINAVSGVTGAGRKASIGTHFCEVSLAPYGLFNHRHGPEIEQHLGHQVLFTPHLGNFARGILETIYVQLKPNVTSEQVAKAYSVLENEPLIRLLGSKIPSIKGVAKQPYVDIGWQQQGSQLIVMAAIDNLLKGAAGQALQCINLSMNLDHTTGLKGAF

SEQ ID NO: 47860 - DNA, 1056 bp, marine gamma proteobacterium HTCC2143
  CDS (1)..(1056): transl_table=11
gtggaggaaaattgcgtggttaaggtaggtatagtaggcggcacaggttataccggtgttgagttgttgcggatgttagttaatcacccggaagctgaggtggttgttataacgtcgcgtgcagaagaagggcttcgagttgacgcactctacccaagcttgcgaggtcatctgaatattcgtttttctcacccaaatctggatgtattagctcagtgtgacgtggtgttttttgccacgccacacaatgtggcaatgaacttaatgccgcagttgttggagctagggacacgggttgtggatttatccgctgacttcagaattcgggatcataaactgtggtcaaagtggtatggtgagccccatgcctgccctgaattactatcccgcgctgtttatgggcttcctgaagtcaatcgtgcggccatacgcgacgctcagctggttgcttgtcctggttgttacccaacttctgttcagttggggctgttgcccttgcttgaaaataatctggtggatgagcagcgtttgatagccaacgcaacgtcgggtgttagtggtgcgggccggcaggcaaaaatcgataatctgtttgctgaagtcagcgatagttttaaggcttatggcattccagggcatcgccatttacctgaaattgagcagggcttgggagacatagcgggaagagaggtcagtgtgacttttgctcctcatttggtgcctatggttcggggaatgcattcaaccttgtatgctgaattgaccgatagcgccgttacccttgaagaaattcagtcattgtatgagcagcgcttcgaagacgaaccttttgtcgacgttttgccggcgggcagccatccgcaaacgcgcagtgtgcgtggcgctaatcactgtcgtctggctattcataggcctcaggatcgagacactttagtggttttatcggtcatcgataacttggtaaagggggcatccggacaggccattcagaatatgaacatcatgttgggattggacgaaaacgctggtttgacgacagtagcggtaatgccttag

SEQ ID NO: 47861 - protein, 351 aa, marine gamma proteobacterium HTCC2143
MEENCVVKVGIVGGTGYTGVELLRMLVNHPEAEVVVITSRAEEGLRVDALYPSLRGHLNIRFSHPNLDVLAQCDVVFFATPHNVAMNLMPQLLELGTRVVDLSADFRIRDHKLWSKWYGEPHACPELLSRAVYGLPEVNRAAIRDAQLVACPGCYPTSVQLGLLPLLENNLVDEQRLIANATSGVSGAGRQAKIDNLFAEVSDSFKAYGIPGHRHLPEIEQGLGDIAGREVSVTFAPHLVPMVRGMHSTLYAELTDSAVTLEEIQSLYEQRFEDEPFVDVLPAGSHPQTRSVRGANHCRLAIHRPQDRDTLVVLSVIDNLVKGASGQAIQNMNIMLGLDENAGLTTVAVMP

SEQ ID NO: 47862 - DNA, 942 bp, Pseudomonas putida GB-1
  CDS (1)..(942): transl_table=11
atgcacacccctgttgtcttcatcgatggcgaccaaggcaccaccggcctgcaaattcatgcccgcctgcagggccgtggcgacctgcgcctgctgaccctgcccgaggccgagcgcaaagacccgcaacgccgccgcgaggcgatcaacagcgccgacatcgcgctgctgtgcctgcccgacgatgctgcacgtgaggccgtggcagcaatcagcaaccctcacgtgcgggtgatcgacgccagctccgcgcaccgcatcacgccaggctgggtgtatggcctgccggaacttgacgagcaacaagccgagcgtatcgcgaacagcaagcgggtcagcaacccaggttgctaccccacgggtgccatcgccttgctacggccgctggtcaaggctggcctgttgcctgcagattacccactgaacatccatgccatctccggctactccggcggcgggcgcactgcggtggagcggcatgaacaacccggcgcgggcaaagccccggccttgcagttgtatggcctggaactggcgcacaagcacgtgccggaaatccagcagcatgccgggctgtcggcgcggccgatgttcatgcccggttacggcgcctaccgccaaggtatcgtgctgagcattccactgcagctgcgcctgttgcctgggcaggtcaacgccgaacagttgcaggcctgcctggagcagcattaccagggtgcccgccacgtccagatgatgcccttgcaccagcacggcgctgcggcaaacctcgaccccgaggcattgaacgacagcaacaacctgcgcctggcgctgtacgccaaccccgagcatggccaggtcctgctcaccgccgtgttcgacaacctgggtaaaggcgcctcgggtgctgcggtgcaaaacctcgacctgatgctcggtgcattacaggcacaaggctga

SEQ ID NO: 47863 - protein, 313 aa, Pseudomonas putida GB-1
MHTPVVFIDGDQGTTGLQIHARLQGRGDLRLLTLPEAERKDPQRRREAINSADIALLCLPDDAAREAVAAISNPHVRVIDASSAHRITPGWVYGLPELDEQQAERIANSKRVSNPGCYPTGAIALLRPLVKAGLLPADYPLNIHAISGYSGGGRTAVERHEQPGAGKAPALQLYGLELAHKHVPEIQQHAGLSARPMFMPGYGAYRQGIVLSIPLQLRLLPGQVNAEQLQACLEQHYQGARHVQMMPLHQHGAAANLDPEALNDSNNLRLALYANPEHGQVLLTAVFDNLGKGASGAAVQNLDLMLGALQAQG

SEQ ID NO: 47864 - DNA, 1035 bp, Pseudomonas putida GB-1
  CDS (1)..(1035): transl_table=11
atgatcaaggtcggtatcgtcggcggcacgggttacaccggcgtcgaactgttgcgtctgctggcacagcatccacaggccgaagtggcggtcatcacttcgcgctccgaggcgggcgtggcggtggcggacatgtacccgaacctgcgcggccattatgacgggctggccttcagcgtgcccgacagcaaggccctggctgcttgcgatgtggtgttctttgctaccccgcatggtgttgcccacgccctggcaggtgaactgctggcggctggcacgaaggtgatcgacctgtcggccgacttccgcctgcaggatgccgccgagtggggcaagtggtatggccagccgcacggtgcgccagaactgctcaaggatgcggtgtacggcctgcctgaagtcaaccgcgagaagatccgccaggcacgcctgatcgcggtgccgggttgctacccgaccgcaacccagttgggcttcctgccgctgctggaagcgggcctggccgacccgtcgcgcctgatcgctgattgcaagtcgggtgtcagcggtgctggccgtggtgctgcggtcggttcgctgttctgtgaggctggcgaaagcatgaaggcctacgcagtgaaaggtcaccgtcatctgcctgaaatcagccagggcctgcgcctggctgctggcaaggacatcggccttaccttcgtgccgcacctgacgccgatgatccggggtatccacgccaccctgtacgcgaatgttgtcgatacgtcggtcgacctccaggcgttattcgaaaagcgttatgccgacgagccgttcgtcgacgtgatgcccgctggcagtcacccggaaacacgcagcgtgcgcggcgccaacgtctgccgcattgccgttcatcgcccgcagggtggtgacctggtggtggtgctgtcggtaatcgacaacctggtcaagggggcctctggccaggcggtacagaacctcaacatcctgttcggcctggatgagcgcatgggcctgtcccatgccggcttgctgccttaa

SEQ ID NO: 47865 - protein, 344 aa, Pseudomonas putida GB-1
MIKVGIVGGTGYTGVELLRLLAQHPQAEVAVITSRSEAGVAVADMYPNLRGHYDGLAFSVPDSKALAACDVVFFATPHGVAHALAGELLAAGTKVIDLSADFRLQDAAEWGKWYGQPHGAPELLKDAVYGLPEVNREKIRQARLIAVPGCYPTATQLGFLPLLEAGLADPSRLIADCKSGVSGAGRGAAVGSLFCEAGESMKAYAVKGHRHLPEISQGLRLAAGKDIGLTFVPHLTPMIRGIHATLYANVVDTSVDLQALFEKRYADEPFVDVMPAGSHPETRSVRGANVCRIAVHRPQGGDLVVVLSVIDNLVKGASGQAVQNLNILFGLDERMGLSHAGLLP

SEQ ID NO: 47866 - DNA, 1038 bp, Marinobacter sp. ELB17
  CDS (1)..(1038): transl_table=11
gtgattaaagtaggtattgtaggtggcaccggatacaccggcgtggaattgttgagggttctggccgtgcatccccaggcacaagtgcattgcattacctcgcgttcggaagcgggtatgcccgtttctgacctttacccaaatctgcgcggccactttgatctggcgttttcagaacccgatgttgctgtgctttgccaatgtgatctggtgttttttgccacgccacacggtgtagccatgcgaatggtgccggagttgatggcagcgggtgtgcgcgtcgtggatttgtcggccgatttccgcttgaaaaatttggacgtgtgggctaattggtatgggatgcctcacgagagtccggagtgggcggaaaaggccgtttacggtctgcccgaagtagtgcgtagtgaactccatgatgcccagctggtggctaaccccggttgttatcctactgcggtgcaactgggttttctgcctttgttggaaaacaggctggtagacagctcccgcttaattgccgacgccaaatcgggctccagtggtgcgggccgtcaggccagcgtgggtatgttgcatggcgaggttggtgaaagtttcaaagcctatggtgcctctggccatcgccacctgccggaaattcgccaaggcttgagccaggccgcaggaacagcggtgggcgttacatttgtgccgcacttggtgccgatgattcgcggtatagaagcaacgctctacgctgaattgcataatgcaggcgattttgaccggctgcaggagttgtacgaagagcgttatcgcgatgagccctttgtggatgtaatgccgtttggcagtcacccggaaacccgcagtgtgcgcggcgcaaatcactgccgcatggcgttgcaccgccaggaaaacagcaacgtgattattgttacctcggtgattgataatctggtgaagggtgctgccggtcaggccgtacagaatatgaacgtcatgtttggcctgcccgaaaccatgggcctggaagcgccagccatgctgccatga

SEQ ID NO: 47867 - protein, 345 aa, Marinobacter sp. ELB17
MIKVGIVGGTGYTGVELLRVLAVHPQAQVHCITSRSEAGMPVSDLYPNLRGHFDLAFSEPDVAVLCQCDLVFFATPHGVAMRMVPELMAAGVRVVDLSADFRLKNLDVWANWYGMPHESPEWAEKAVYGLPEVVRSELHDAQLVANPGCYPTAVQLGFLPLLENRLVDSSRLIADAKSGSSGAGRQASVGMLHGEVGESFKAYGASGHRHLPEIRQGLSQAAGTAVGVTFVPHLVPMIRGIEATLYAELHNAGDFDRLQELYEERYRDEPFVDVMPFGSHPETRSVRGANHCRMALHRQENSNVIIVTSVIDNLVKGAAGQAVQNMNVMFGLPETMGLEAPAMLP

SEQ ID NO: 47868 - DNA, 945 bp, Erythrobacter sp. SD-21
  CDS (1)..(945): transl_table=11
ttgacgcatagcgtcttcatcgacggggcggcggggacgaccggcctcgagattgccgaacggctcaagggccgcagcgaatttacgctgatcacgctcgacgacgcgcagcgcaaggatgcgaacgcccggcgcgaagccttgaacgatgccgatgtcgcgatcctgtgcctgcccgacgaggcggcgatcgaggcgatcgaactgctcgacccggccagcggcacgcgggtaatcgacgcctcttccgcccatcgcaccgccgagaactggtgttacggctttcccgaactcaacgggcgcgaacgcgtggccgacgcgcgccgggtcagcaatccgggctgctatcctaccggcttcctcgctctaatcgcgccgctggtgcgcaagggacttctgcccgccgactggccctacaccgtgcacgccgtcagcggtttttccggcgggggcaagggcctgatcgagcggttcgagatcttcgaaccctcccccgcctttcgcgcctatggcctggcgatggggcacaagcacctgcccgaaatgcaggcccatgcgcagctcacccatcctccggtgttttccccggccgtggtcgatgcctatcgcggcatggtggtcgaagtgccgctggcgctggggctgatcgatggtgccgtcgatgctggggcgctgctcgaggctctggaacgcttctacgaaggctcgccaatcgtccgcgtccaccccgatttcggcctgcccgtcgaattgctggtcaagcccgatgcccccgcgcgcgacgacatggaactgttcgtcttcgcttctcccgatcgctcgcaggcgcgcctcatggccaccctcgacaatctcggaaagggagcgagcggggccgcagtgcagaacctcaacctcctgtgcggcctgccggaaacagcggggctgcacttgccgattgcctaa

SEQ ID NO: 47869 - protein, 314 aa, Erythrobacter sp. SD-21
MTHSVFIDGAAGTTGLEIAERLKGRSEFTLITLDDAQRKDANARREALNDADVAILCLPDEAAIEAIELLDPASGTRVIDASSAHRTAENWCYGFPELNGRERVADARRVSNPGCYPTGFLALIAPLVRKGLLPADWPYTVHAVSGFSGGGKGLIERFEIFEPSPAFRAYGLAMGHKHLPEMQAHAQLTHPPVFSPAVVDAYRGMVVEVPLALGLIDGAVDAGALLEALERFYEGSPIVRVHPDFGLPVELLVKPDAPARDDMELFVFASPDRSQARLMATLDNLGKGASGAAVQNLNLLCGLPETAGLHLPIA

SEQ ID NO: 47870 - DNA, 978 bp, unidentified eubacterium SCB49
  CDS (1)..(978): transl_table=11
atgctagaagtaggaattattggaggtgcaggatacacttctggagagctgttaagactgttggtacatcaccctaaagttgctataaactttgtgtatagcacttctaattcgggcaatcttataacagatattcatcaagatttattgggctctttagatttaaaatttacaaatacaattaattcaaatgttgatgtgttgtttttatgtctaggacatggaaattcgaagaaatttttagaaaataatagcttttctgaaacaacaaaaataattgatttaagtaatgatttcagattgaaaaaagacaagacatttaacggaaagacttttgtatatggattgccagaattgcaaaaacaaagtataaaaaaggcagcttatattgcaaatccaggttgttttgctacggctttacaattggcgcttttaccattagctcataatgagttattacaagcagacatccatattaatgcagtaacaggagcaacaggcgcaggaacttcattgtcatctagcacccattttgcgtggcgagataataatttttcatattataaaccatttgtacatcagcatttagatgagatctaccagacggtttctcaattacaatctagttttgattcagaaattcattttatgcccaatagaggtaacttttctagaggaatttttgcaacggtgtacaccacttttaatggaagtcttgatgaagcaaaacaagtatataaagacttttataaagatgctgcttttacgtttgtatcagataatgaagtgcatttaaagcaagtggtcaatacaaataaatgtttcttacacctacataaacacaaagacaaactacttatcacaagcgtgattgataacctattaaaaggtgcatctggtcaagcgatcctcaatatgaatttaatgtgcggttttgacgaacaggaaggattacaactaaaagcgaacttcttttaa

SEQ ID NO: 47871 - protein, 325 aa, unidentified eubacterium SCB49
MLEVGIIGGAGYTSGELLRLLVHHPKVAINFVYSTSNSGNLITDIHQDLLGSLDLKFTNTINSNVDVLFLCLGHGNSKKFLENNSFSETTKIIDLSNDFRLKKDKTFNGKTFVYGLPELQKQSIKKAAYIANPGCFATALQLALLPLAHNELLQADIHINAVTGATGAGTSLSSSTHFAWRDNNFSYYKPFVHQHLDEIYQTVSQLQSSFDSEIHFMPNRGNFSRGIFATVYTTFNGSLDEAKQVYKDFYKDAAFTFVSDNEVHLKQVVNTNKCFLHLHKHKDKLLITSVIDNLLKGASGQAILNMNLMCGFDEQEGLQLKANFF

SEQ ID NO: 47872 - DNA, 960 bp, Moritella sp. PE36
  CDS (1)..(960): transl_table=11
atgaaaaaagtgtttattgatggtcaagcaggaacaactggcttgcaaatttattcaagactgaaatgtcgagatgatatagagctcatagagattgatcatgcacgcagaaaggatgttgctgcacgaaaagaagcaattaacaatgcagatgttgtgatcttatgtttacctgatgaagcggctaaagaatcggttttgcttattgagtctcctcatgtgagagtgttggatgctagttcagctcacagagttacagctggatgggtgtatggcttgcctgagatatctctagctcaacgccaagaaattgcagaagctaaacgagtatcaaatcctggttgttatcctaccggagcaatacttcttttaaaccctcttgtgtcatctggtttgcttgataccgactacccatattcgattaacgccatatcgggttacactggtggtggtcgggatgcaatcgaacgctttgaagatccttctcgctctgactatttatcaaacccataccgtcgttatgcgttgcatcatgagcataagcatgtgaaggagatggcgcagtacaatggattaaccaaaaaaccggtttttcaacctgcatacggtttgtatcgccagggtatcttgcttcagattccaatacatttaagcgatcattctctagagttaacgggggatatattaagggaaaaactaaatgatcattatgctgactcatcatttgtaacagtgctaaataagtctgaaactttgagtattgatggacttagcccagacattcataatgacagtaacgatgttacattaggcgtgtttactcctgatggtacagaccacgcggtattaactgcatcttatgataacttggggaaaggtgcgtcaggagctgcagttcaaaacttggagataatgctaaaccttgtgcaatcggatggtcatgtatcagcactagattaa

SEQ ID NO: 47873 - protein, 319 aa, Moritella sp. PE36
MKKVFIDGQAGTTGLQIYSRLKCRDDIELIEIDHARRKDVAARKEAINNADVVILCLPDEAAKESVLLIESPHVRVLDASSAHRVTAGWVYGLPEISLAQRQEIAEAKRVSNPGCYPTGAILLLNPLVSSGLLDTDYPYSINAISGYTGGGRDAIERFEDPSRSDYLSNPYRRYALHHEHKHVKEMAQYNGLTKKPVFQPAYGLYRQGILLQIPIHLSDHSLELTGDILREKLNDHYADSSFVTVLNKSETLSIDGLSPDIHNDSNDVTLGVFTPDGTDHAVLTASYDNLGKGASGAAVQNLEIMLNLVQSDGHVSALD

SEQ ID NO: 47874 - DNA, 1011 bp, Moritella sp. PE36
  CDS (1)..(1011): transl_table=11
atgttaaaaacaattttagtcggtgcgaccgggtataccggtgctgagctagcccattacattacgaaacatccagaacttgaattagctggcctgtatgtttcagaacacagtttagatgcaggaaaatcgttttcttcattatatggtcatttattaggggttgttgaccaaacgattcagcctttagcggtgagcaacattaagcatatttgtgctgacgttgatattgtggtgttagcgaccgcgcatgaagtcagtcatgatattgccgctgaatttctagcgcaggatactgtggtatttgatttatccggtgcatttagagtgaatgatcctgctttttacgaaaactattacggctttaaacataacttcgataaagaattgaagagtgctgtttatggtttagcagaatgggcgagtgccgatattgctaaagcaaatttgattgccgtaccagggtgttatccaacggcctcgttatcagcattaaaaccgttagcaaaacatggcttgattgctgcggatcaaaaacccatcattaatgccgtgagtggcgtgagtggtgcagggcgtaaagcggcattaggctccgctttttgcgaagtgagccatgcaccttatgctgtgtttaatcatcgtcatcaacctgaaataagtacacatttaggccatgaggttatttttacaccgcacttaggttgttttaaacgtggcatcttagcaacgattaacgtcaagcttgccgcgggtgtgacaccggaacaagtcacggcggcttatcaagacgcgtatcaagatcaacctatggtgcggttattaccaagtggctggccaagtattaaagcagtagagaaaaccgcttattgtgatctagcgtggcagcaacaaggccaagacctgattgtggtttctgccattgataatttattaaaaggtgccgcggcgcaagcaatgcagtgtatcaatattcgttttggtttcgccatgacaacgtcgttagtatag

SEQ ID NO: 47875 - protein, 336 aa, Moritella sp. PE36
MLKTILVGATGYTGAELAHYITKHPELELAGLYVSEHSLDAGKSFSSLYGHLLGVVDQTIQPLAVSNIKHICADVDIVVLATAHEVSHDIAAEFLAQDTVVFDLSGAFRVNDPAFYENYYGFKHNFDKELKSAVYGLAEWASADIAKANLIAVPGCYPTASLSALKPLAKHGLIAADQKPIINAVSGVSGAGRKAALGSAFCEVSHAPYAVFNHRHQPEISTHLGHEVIFTPHLGCFKRGILATINVKLAAGVTPEQVTAAYQDAYQDQPMVRLLPSGWPSIKAVEKTAYCDLAWQQQGQDLIVVSAIDNLLKGAAAQAMQCINIRFGFAMTTSLV

SEQ ID NO: 47876 - DNA, 1038 bp, Herbaspirillum seropedicae
  CDS (1)..(1038): transl_table=11
atgatcaaggtaggtatcgttggcggaaccgggtataccggcgtcgaattgctgcgtattttcgctacccacccggaagcccgggtgcaggcggtgacctcgcgcaaggaagacggcatgccggtggccgagatgtatccgtccctgcgtggccgtgtggatgtggccttctcctcgcctgacaaggccaggctgaccgactgtgacgtggtcttcttcgccaccccgcacggcgtggccatggcgcaggcgcctgagctggtggcagcgggcgtgaaggtgatcgacctggctgccgatttccgcatgcaggacgtggccgccttcgagaagtggtacaagctgccgcacagctgcaccgatctgttgaaggaagccgcctacggcctgcccgaactgaaccgcgaagccatccgcaaggcgcgcgtggtgggcaatccgggctgctacccgaccaccatgcaactgggctacgccccgctgctcaaggccggcgtgatcgacgcctcgcacctgatcgccgactgcaagtcgggcgtctccggggcgggccgcaaggccgagctgagcctgctgttctcggaagcttctgataacttcaaggcctacggcgtttccggccaccgtcattcgcccgaaaccatcgagcgcctgtcgcacctgaccagcgacaaggtcggcctgctgttcacgccgcacctggtgccgatgatccgtggcatgcattccaccctgtacgcgcgcctgaccaaggagatcgacaacgccgccctgcaggcgctgttcgaagacgcctacaaggacgaacccttcgtcgacgtgctgcccttcggcgcgcaccccgagacccgcaccacgcgtgcctccaacatgctgcgcctggccgtgcatcgtcctggcgacggcgataccgtggtggtgctggtggtccaggacaatctggtcaagggcgcttccggccaggccgtgcagtgcatgaacctgatgttcgggctggatgagaccactggcttgcagcaagtcccggttctgccgtga

SEQ ID NO: 47877 - protein, 345 aa, Herbaspirillum seropedicae
MIKVGIVGGTGYTGVELLRIFATHPEARVQAVTSRKEDGMPVAEMYPSLRGRVDVAFSSPDKARLTDCDVVFFATPHGVAMAQAPELVAAGVKVIDLAADFRMQDVAAFEKWYKLPHSCTDLLKEAAYGLPELNREAIRKARVVGNPGCYPTTMQLGYAPLLKAGVIDASHLIADCKSGVSGAGRKAELSLLFSEASDNFKAYGVSGHRHSPETIERLSHLTSDKVGLLFTPHLVPMIRGMHSTLYARLTKEIDNAALQALFEDAYKDEPFVDVLPFGAHPETRTTRASNMLRLAVHRPGDGDTVVVLVVQDNLVKGASGQAVQCMNLMFGLDETTGLQQVPVLP

SEQ ID NO: 47878 - DNA, 1041 bp, Magnetospirillum gryphiswaldense
  CDS (1)..(1041): transl_table=11
atgagcgaggtcaaggtcgcgattctgggggccagcggctataccggggccgaattggtacgcatgctggccagccatcccagcttccgcatgaccgcgctgaccgccgaccgcaaggccggccaggagatggcggcggtgttcccgcaattcgctggcctcgatctgccgcgtctggtcagcatcgatcaggtggatttcgccggtatcgatgcggtgttctgcgccctgccccacggcaccacgcaagaggtgatcgccggcctacccgatcacgtcaagatcgtcgatctgtcggcggatttccgcctttacgacctggaggcctacaacacctggtacggccatccgcaccaggcgccggagctgcaaaagcaggcgatctacggcttgaccgagttgaagcgcgacgcggtcaagaccgcacggctggtggccaatcccggctgctatccgacctcggtgcagatcccgctggtgccgttgctcaaggccgggctgatcgcggcggaagacatcatcatcgacgccaagtcgggcacctcgggcgccgggcgcgcggccaaggaaaacatcctttattgcgaagtgaccgagggcctgcacgcctatggcatcgccagccaccgccacgcccccgagatcgagcaggaactgggcgaagcggcgcgcaagccggtcatcgtcagcttcaccccgcatctgatgcccatgagccggggcatgctgtcgaccatcaacgtgcggctggtcgatggcgccaaggccgccgatctgcgcgccgcctggcagcaggtctataaggacgagcccttcgtcaaggtgctgcccgccggggtggcgccgcagacccggcatgtgcgcggctccaattattgcttcatcaatgccttcgacgaccggctgccgggccgggtgatcatctgctcggtcatcgacaatctggtcaagggcgcctcgggccaagccatccagaacatgaacctgatgttcggccagcaagaaaccgccggcatcagccagcaacccttgttcccctag

SEQ ID NO: 47879 - protein, 346 aa, Magnetospirillum gryphiswaldense
MSEVKVAILGASGYTGAELVRMLASHPSFRMTALTADRKAGQEMAAVFPQFAGLDLPRLVSIDQVDFAGIDAVFCALPHGTTQEVIAGLPDHVKIVDLSADFRLYDLEAYNTWYGHPHQAPELQKQAIYGLTELKRDAVKTARLVANPGCYPTSVQIPLVPLLKAGLIAAEDIIIDAKSGTSGAGRAAKENILYCEVTEGLHAYGIASHRHAPEIEQELGEAARKPVIVSFTPHLMPMSRGMLSTINVRLVDGAKAADLRAAWQQVYKDEPFVKVLPAGVAPQTRHVRGSNYCFINAFDDRLPGRVIICSVIDNLVKGASGQAIQNMNLMFGQQETAGISQQPLFP

SEQ ID NO: 47880 - DNA, 1158 bp, Medicago truncatula
  CDS (1)..(1158)
atgagcgccacagcattccgttctattttctttaacagacctcgctcttccaacaaggatttgataaagccacagaatgtcaagttgtcgcctattaagtgttcgatcaaaagttcacaaaacaatgttcgtgttggtgttcttggagcaagtggctatactggttctgagattcttcggctcttggcaaatcatccacaatttggggttgcattgatgaccgctgataggaaagctggacaggcaatctcatctgtattccctcatttgggcacacaagacttgccagatttgattgcaataaaggatgcaaatttttctgatgtggatgctgtattctgttgtttaccacatggaactacgcaggaaataattaaaggccttccgaagcacttgaagattgttgatctttcagcagattttcgtctaagagatgtttctgagtatgaagagtggtatggtcagccacacagggcaccagatttgcagaaagaagctatatatggattaacagaggttttaagggaggaaataaagaatgcgcgcctagttgctaatcctggttgctatccaacttccattcaacttcctcttgttccactaataaaggctaatcttattcagactactaatattattgttgatgctaaatctggtgttagtggagcagggagaagtgcgaaagaaaatttattgttcactgaagtaaccgagggtatgagttcttatggtgttactcggcatcgccatgctccagaaattgagcagggactcgctgatgctgcaggttcaaaagtaaccattagttttactccacacctgattccaatgagccgtggtatgcaatcaactatttatgtggaaatggctccaggagtaagaattgatgacttgcgccatcaactgcaactatcatacgaggatgaagaatttgttgtactgttggaaaatggagtcattcctcgaactcatagtgttaaaggatcaaattactgtttattcaatgtttttcctgaccgaattcctggaagagcgatcattatatctgtgattgataatttagtgaagggagcttcaggtcaagccttacaaaaccttaatttgataatgggatttccagaaaatttgggccttcaatacctgcctctgtttccgtag

SEQ ID NO: 47881 - protein, 385 aa, Medicago truncatula
MSATAFRSIFFNRPRSSNKDLIKPQNVKLSPIKCSIKSSQNNVRVGVLGASGYTGSEILRLLANHPQFGVALMTADRKAGQAISSVFPHLGTQDLPDLIAIKDANFSDVDAVFCCLPHGTTQEIIKGLPKHLKIVDLSADFRLRDVSEYEEWYGQPHRAPDLQKEAIYGLTEVLREEIKNARLVANPGCYPTSIQLPLVPLIKANLIQTTNIIVDAKSGVSGAGRSAKENLLFTEVTEGMSSYGVTRHRHAPEIEQGLADAAGSKVTISFTPHLIPMSRGMQSTIYVEMAPGVRIDDLRHQLQLSYEDEEFVVLLENGVIPRTHSVKGSNYCLFNVFPDRIPGRAIIISVIDNLVKGASGQALQNLNLIMGFPENLGLQYLPLFP

SEQ ID NO: 47882 - DNA, 1035 bp, Thermoanaerobacter ethanolicus
  CDS (1)..(1035): transl_table=11
atggtgagagtaggaatatttggggcaacgggttatacaggagtcgaacttataagaattctctcaaagcatgaaaaagtagagataaaatatctttcttctcaaagttataataccaaagcaatttcggatgtttattcatccctcattggtttttgcgacaaagagttggaagagttaagcctagaaaaggcaatgtcagaatgcgatgtcatatttacggctttgccttcaggtcatgcttcaaaaatcgccagagaagctgtaaaaaaaggagtaaaggtgattgacttaggagctgactttagatttgacgattactctgtctataaagaatggtatggtggagattatgaaaattatgaaggtattaaaagggtatatggtcttccggaaatttacagagatactataaaagaggctcaagttgtaggaaatcctggatgttatcctacaagcgttatattagagcttatgcctcttttgaaaaatggcataatagaggggaatgtaattgttgattcaaagtcaggcgtatcaggggcaggtcacaatccctcccataacaatatgtatgcagaatgcaatgaaaacataaaagcgtataatgttgcaaagcatagacatatcccagagatggagcaagagctttcaaaagtttttggtgaaaaagtgtctgttgtgtttactccccaccttacgccaatgacaagaggaattttaagtactatgtactgcaaactaaaaaaagatatggatgtaaacactgtttataatatttacaccgatttttataaaaatgagtattttgtaaaagtgttacaacctggcgattaccctgcaacaaaaaatgtttatgggtcgaatttttgtcacatagggtttgaagttgataaacatactaatactttaatagtgatgtctgcaattgataatctcgttaaaggggcgtcaggccaggcagtgcaaaatatgaatattatgtttggaatagatgaaaatactggacttgatatagttccaatatatccgtag

SEQ ID NO: 47883 - protein, 344 aa, Thermoanaerobacter ethanolicus
MVRVGIFGATGYTGVELIRILSKHEKVEIKYLSSQSYNTKAISDVYSSLIGFCDKELEELSLEKAMSECDVIFTALPSGHASKIAREAVKKGVKVIDLGADFRFDDYSVYKEWYGGDYENYEGIKRVYGLPEIYRDTIKEAQVVGNPGCYPTSVILELMPLLKNGIIEGNVIVDSKSGVSGAGHNPSHNNMYAECNENIKAYNVAKHRHIPEMEQELSKVFGEKVSVVFTPHLTPMTRGILSTMYCKLKKDMDVNTVYNIYTDFYKNEYFVKVLQPGDYPATKNVYGSNFCHIGFEVDKHTNTLIVMSAIDNLVKGASGQAVQNMNIMFGIDENTGLDIVPIYP

SEQ ID NO: 47884 - DNA, 1026 bp, Streptomyces griseus subsp
  CDS (1)..(1026): transl_table=11
gtggtacgagcagcagtggcaggggcgagcggctacgccggcggggaactgctccgtcttctgctggcgcacccggacgtcgagatcggcgccctcaccgggcactccaacgccgggcaggcgctcgggtcgctccagccgcatctgcggcccctggccggccgggtgctggagcccaccaccgccgaggtgctcgccgggcacgacgtggtcttcctggcgctgccgcacgggcagtccgccgccgtcgccgagcagctcggggacgaggtcctcgtcgtcgacatgggggccgacttccggctgaaggacgcgggggactgggaggcgttctacggttccccgcacgccgggacctggccctacgggctgcccgagctgccgggcgggcgggccgcgctcgccggatcgaagcggatcgccgtgccggggtgctacccgaccgccgtgtccctcgcgctctttccggcgtacggggccggcctcgccgagccggaggccgtgatcgtcgccgcgtccggcacctccggcgcgggcaaggcggccaagccccacctgctcggctccgaggtgatgggcaacatgaccccgtacggtgtcggcggcgggcaccgccacacgccggagatgatccagaacctcagcggagccgccggcgagccggtcaccgtctccttcacgcccaccctcgcccccatgccccggggcatcctcgccacgtgcagcgcgaaggcgaagcccggcgtgagcgcggagagcctgcgcgcggtgtacgagaaggcgttcgcggacgagccgttcgtcgagctgctgcccgaggggcagtggcccgccaccgccgcggtgtacggctccaacgccgtacagctccaggtcgcgtacgacgcggcggccgggcggatcattgtgatcagcgccatcgacaacctcgccaagggcaccgcgggcggcgccctccagagcatgaacatcgccctcggactccccgaggacaccggactttcgacgatcggagtcgcaccgtga

SEQ ID NO: 47885 - protein, 341 aa, Streptomyces griseus subsp
MVRAAVAGASGYAGGELLRLLLAHPDVEIGALTGHSNAGQALGSLQPHLRPLAGRVLEPTTAEVLAGHDVVFLALPHGQSAAVAEQLGDEVLVVDMGADFRLKDAGDWEAFYGSPHAGTWPYGLPELPGGRAALAGSKRIAVPGCYPTAVSLALFPAYGAGLAEPEAVIVAASGTSGAGKAAKPHLLGSEVMGNMTPYGVGGGHRHTPEMIQNLSGAAGEPVTVSFTPTLAPMPRGILATCSAKAKPGVSAESLRAVYEKAFADEPFVELLPEGQWPATAAVYGSNAVQLQVAYDAAAGRIIVISAIDNLAKGTAGGALQSMNIALGLPEDTGLSTIGVAP

SEQ ID NO: 47886 - DNA, 2574 bp, Candida albicans
  CDS (1)..(2574): transl_table=12
atgatcagacaagtgaataaaaaggctatttcaaacagtcttttcaaaagattatcgctcagcggtagtgcttttgctaatattacagccaataaaaaatcgtccactcatcaactcaaccaaaagactcaattagcaaatgttcgtttctattcaacaaaatccactgttattcagttattgaacaacattggttccaaacgtgaagttgaacaatacttgaaatatttcacttcggtatctcaacaacaatttgctgtgatcaaagttggtggtgcaattatcacccaacaattgaacgaattagcatcatgcttggcatttttgtatcatgttggtttgtaccctattgttttacatggtactggtccacaaatcaatgaattgttggaaaacgaaggtgttgaaccagaatatattgatggtatcagaatcaccaaccccaaaacaatggaagtagtacgtaagtgtttcttagagcaaaacttgcgtttggtgacagctttggaaaaaattggtgttcacgctcgtccaataactgctggtgtatttgaagctgaatatttggataaggacaagtatcaattagttggtaaaatcactagtgtcaacaaatccccagttgaagctgccatcaatagtggatacttgccaattttgacatctttggccgaaacctctctgggtcaattattaaatgtcaatgccgacgttgctgccggagaattagctcgtgaatttgaacctttgaaaattgtttacttgaatgaaaaaggtggtattataaacggaaacactggtgagaaagtttctgctatcaatttggatgaagaatatgaagatttgttaaaggaaagttgggttaaatatggtactaaattgaagatcaaggaaattcacgatttattacaacatttgccaagatcttcttcagttgccattattgatgtcaacgatttacaaaaggaattgttcactgattctggtgctggtactttaatcagaagaggttacagattaattaacagaaactccttgcgtgattttggtaacccagacttgttaagaaacgcattgttaagagacccagaaatcaaaactggtaaagtgtctgttgcttcatacttgaagtttttggattctgttcaattcaagagttatggagacgaacctttggaagtattggctattgtggtagaacaaaatgacaaaattcctaaattagacgagtttttgtcatccaagacaggttggttaaacaatgttaccgataatattttcaatgctatcaagaaagattacagtcaattatgttgggttgttaatgaaaacgatgccaacttaccttggtatttctccaaatcagatggttcatttgccaagaatggccaaatcttgttttggtacggtttaaacattgacgaagctagtaaattgattaaagaatttgattcttcatctattggatcatcgttgtcatcttctaaagaatctggcgtattcacatctgctcaacaaaagcgtggtttccaccactctacagtccgtagaaacaccaatcctaatcctccattatctgaaggtaagcaaaccgagagaaaaaaagttgctttgattggtgctagaggttacactggacaaaacttgattaaattgatcgacaaccatccatacttggatatttcatatgtgtcgtcacgtgaattggaaggtcaaaaattacaaggttacaacaaggataacattgtttactccaacttgcaaattgaagacatcaagagattagaagaaaacaatgaggttgatgtttgggttatggctttacctaatggtgtttgtaaaccatttgttgacactattgatttagttcagaacccaaattctaaaattgtcgatttatctgctgattatcgttttgacacaactggtgaatggacttatggattaccagaactaaatgatcgtaagaccatagctcaagctaagaaaatttccaacccaggttgctatgccactgctgctcaagtcgccattgccccgttaaaagaatatatttctggaactccaagcatttttggtgtttctggctattcaggtgctggaaccaaaccatctccgaagaacgacgtcaatttattgtcaaataatttaattccttactcgttaactgatcatgtacacgaaaaagaaattagtagtcaattaggtttacaagttgcatttaccccacacgttgctcaatggtttcaaggtattactcatactatcaacattccaattaaaaaaggatctttgacttctcgtgaaattagaaacatttaccaagatagatatcaaggtgaaaagctaatcaccattagtggagaagcaccacttgttaaagacattagtggcaaacacggtgtcgttgttggtggctttgctgtcaactctaatgaagaccgtgttgttattgttgccactattgacaatttgttgaaaggtgcagctacccaatgtctacaaaatataaatttgagtcaagaatttggtgaatacgatggtattccaaccgaatccttgatcagaggctaa

SEQ ID NO: 47887 - protein, 857 aa, Candida albicans
MIRQVNKKAISNSLFKRLSLSGSAFANITANKKSSTHQLNQKTQLANVRFYSTKSTVIQLLNNIGSKREVEQYLKYFTSVSQQQFAVIKVGGAIITQQLNELASCLAFLYHVGLYPIVLHGTGPQINELLENEGVEPEYIDGIRITNPKTMEVVRKCFLEQNLRLVTALEKIGVHARPITAGVFEAEYLDKDKYQLVGKITSVNKSPVEAAINSGYLPILTSLAETSSGQLLNVNADVAAGELAREFEPLKIVYLNEKGGIINGNTGEKVSAINLDEEYEDLLKESWVKYGTKLKIKEIHDLLQHLPRSSSVAIIDVNDLQKELFTDSGAGTLIRRGYRLINRNSLRDFGNPDLLRNALLRDPEIKTGKVSVASYLKFLDSVQFKSYGDEPLEVLAIVVEQNDKIPKLDEFLSSKTGWLNNVTDNIFNAIKKDYSQLCWVVNENDANLPWYFSKSDGSFAKNGQILFWYGLNIDEASKLIKEFDSSSIGSSLSSSKESGVFTSAQQKRGFHHSTVRRNTNPNPPLSEGKQTERKKVALIGARGYTGQNLIKLIDNHPYLDISYVSSRELEGQKLQGYNKDNIVYSNLQIEDIKRLEENNEVDVWVMALPNGVCKPFVDTIDLVQNPNSKIVDLSADYRFDTTGEWTYGLPELNDRKTIAQAKKISNPGCYATAAQVAIAPLKEYISGTPSIFGVSGYSGAGTKPSPKNDVNLLSNNLIPYSLTDHVHEKEISSQLGLQVAFTPHVAQWFQGITHTINIPIKKGSLTSREIRNIYQDRYQGEKLITISGEAPLVKDISGKHGVVVGGFAVNSNEDRVVIVATIDNLLKGAATQCLQNINLSQEFGEYDGIPTESLIRG

SEQ ID NO: 47888 - DNA, 2616 bp, Neurospora crassa
  CDS (1)..(2616)
atgtactccgcttgcgctgttgccctccggggcggagcccgtcgcgttgttcgccgggttcctaagagcgctcgtgctctcccccgcgctgccgccgctcgccgtcagatctctaccacggccgctcgctcgaccgatcttactacccggggcatgatcgtccagaccctgtcctcggtcgggtcaaagcgcgaggtccagcagtacctctctctcttcacctcggtctcctcccagcgtttcgccgttatcaaggtcggcggcgctatcttgaccgactatctcgacgagctttgcgccgctctcaagttcctctacactgtcggtctctaccccgtcattgtccatggcgctggtccccagctcaacaggctcctcgaggatgctggtgttgagccccagttcgaggagggtatccgtgtgaccgatgccaagaccctccgtgttgcccgcgacctcttcctccaggagaacctcaagctcgtcaacaagctcgaggagatgggtgtccatgcccagccccttaccactggcatgtttcgcgccgactacctgaacaaggagaagtggggtcttgtcggcaaggtcaccggcgttaacaagcaggctatcgagactgccattagcaacggttatctccctatcctcacctctatggctgagaccgatgacggccagattcttaatgtcaacgctgatgtcgccgctgctgagctcgcccgtgcacttgagcccctcaaggttgtctacctttccgagaagggtggtctcttcgatgctggcggacagaagatctccgccatcaacctcgacgaggagtacgagcacctcatgtcccaggcctgggtcaagtatggcacccgtctcaagatcaaggagatcaaggagctcctcgacactcttccccgtaccaccagcgtcgccatcatccatcctgaggaacttcagaaggagcttttcaccgactccggcgccggtacccttatccgccgtggcagcaagctccaggcctccaccagcctttctgagttcaaggacctcgaggctctcaaatctgtcctgatccgcgaccgtgagggccccgatgccaaggagaccgttgaaaagtacctcgacttcctcaaggagaaccccttcaaggcctacttcgacagctccatgaacgccctcgccatcgtccttcccgccagcgagggtcgtcaggccacccttgccactcttactattaccaagtctggctggttgaccaacattgctgacaacatcttcactgccctcaagaaggagcacccctccctcgtctggactgtgaaggaggatgacgagaacctcggctggttctttgacaaggccgacggtagcatcacccgccagggtgatgtcatgttctggtatggcattgagaacggcgatgagattgtcaagctcatgaaggatttcaccgagaacggccgcgccatgcttggtaactccaacctcgagtctcgtcttcgtcaggctgccagcaagcccgctgcccagcaggttcgcggctactccactcttgctcgccgccctgcccttcccaagttcagcatctctaaccgcaggggctacctaacccagaccaaccccaacccccctgtcggcaagcaaaatgcctctatggaccgtcccgctcgcgttgccctcatcggtgctcgtggttacacgggccaggagctgatccgcctcatcgactctcatcccaacatggagcttcaccatgtctcctctcgtgagcttgctggcaagaaactcgaaggctacaacaagcaggaggttatctatgagaacctcagccctgaggatgtccgtgatatggagaagcgtggcgagattgactgctgggttatggctctgcccaacggtgtctgcaagcccttcgttgaggccgtctgggagggtcgcaaggcttccggccacaagagcgttattatcgatctttctgctgattaccgctttgacaacaagtggacctacggtctccctgagcttgtccagcgcagcaacatcatccaggctactcagattgccaaccccggctgctacgctactgccgcccagctcggtatttctcccttggttcctcacctcggtggtatgccccacgtcttcggtgtctctggctactctggtgctggcaccaagccttctcccaagaacgatgtcgagaatctcaccaacaacatcatcccctacagcttgactggccacatccacgagcgtgaggttagctcccagctcggtgccgagattgccttcatgccccatgtcgctgtctggttccgcggtatccaccacaccatctccattcccctcaacaagagcatgacttcccgcgacatccgtcagctgtaccaggaccgctatgccggcgagaagctcgtcaaggttgttggcgaggctccttccgttaagaacattggtggtaagcacggtgttgaaattggtggtttcgaggttgacaagtccggccgccgcgtcgtcatctgcgctaccattgacaacctcctcaagggtgccgctacccagtgcctgcagaacatgaaccttgcccttggctacgctgagtacgagggtattcccaccatgtaa

SEQ ID NO: 47889 - protein, 871 aa, Neurospora crassa
MYSACAVALRGGARRVVRRVPKSARALPRAAAARRQISTTAARSTDLTTRGMIVQTLSSVGSKREVQQYLSLFTSVSSQRFAVIKVGGAILTDYLDELCAALKFLYTVGLYPVIVHGAGPQLNRLLEDAGVEPQFEEGIRVTDAKTLRVARDLFLQENLKLVNKLEEMGVHAQPLTTGMFRADYLNKEKWGLVGKVTGVNKQAIETAISNGYLPILTSMAETDDGQILNVNADVAAAELARALEPLKVVYLSEKGGLFDAGGQKISAINLDEEYEHLMSQAWVKYGTRLKIKEIKELLDTLPRTTSVAIIHPEELQKELFTDSGAGTLIRRGSKLQASTSLSEFKDLEALKSVLIRDREGPDAKETVEKYLDFLKENPFKAYFDSSMNALAIVLPASEGRQATLATLTITKSGWLTNIADNIFTALKKEHPSLVWTVKEDDENLGWFFDKADGSITRQGDVMFWYGIENGDEIVKLMKDFTENGRAMLGNSNLESRLRQAASKPAAQQVRGYSTLARRPALPKFSISNRRGYLTQTNPNPPVGKQNASMDRPARVALIGARGYTGQELIRLIDSHPNMELHHVSSRELAGKKLEGYNKQEVIYENLSPEDVRDMEKRGEIDCWVMALPNGVCKPFVEAVWEGRKASGHKSVIIDLSADYRFDNKWTYGLPELVQRSNIIQATQIANPGCYATAAQLGISPLVPHLGGMPHVFGVSGYSGAGTKPSPKNDVENLTNNIIPYSLTGHIHEREVSSQLGAEIAFMPHVAVWFRGIHHTISIPLNKSMTSRDIRQLYQDRYAGEKLVKVVGEAPSVKNIGGKHGVEIGGFEVDKSGRRVVICATIDNLLKGAATQCLQNMNLALGYAEYEGIPTM

SEQ ID NO: 47890 - DNA, 2658 bp, Schizosaccharomyces pombe
  CDS (1)..(2658)
atgcttattgaattgcaacaaattgtcaagtccggtcttgtacggaatggagcgaaacactgtacgaaaaggagcttactatgttccaatgcatcagtcattgcaagcaaacgttttcaaggcagttttgccccgggtcaacaacaaccgttaaacccactcgcgaaaccaattgaacaagatcgtgatgccatcattagaattctttcctccatcggaagccgtcgtgaagttgagcaatacctacgatactttacttccttcgaagctcaacgtttcgctattatcaaggttggtggtgccattatcaccgacgaattagacacattggcacaaagtcttgcctttttgaatcatgtgggtctttatcccatcgttgtgcatggcgctggtccccaattaaacaaaattcttgccagcagaaatgttgaacccgagtatagcgatggtattcgaatcaccgatgccgagactctttctgtagctcgtaaagttttcttagaggaaaatgcgaaacttgtagatgctttggaaaagttgggaactcgtgctcgtcccattacaggtggtgtatttcaggcagagtatctcgacaaagaaaaatacaagtatgttggcaagattgtcaaggtaaacaaagctcctattgaacacagtattcgtgctggaaccctccctattcttacgtctatggccgaaactgcttctggtcaattgttgaatgtcaacgccgacattactgctggtgagcttgctcgcgtattgaagcctctaaaggtggtctatctcaatgaaaaaggtggacttatcaacggtgaaacaaagaaaaaaattagcagcatctatttggatagggagtacgatggcctcatgaagcaaccatgggtcaagtatggtacgaagctcaaaatcaaagaaatcaaagagttacttgatactcttccccgtacatcttccgtagccattattagtacgaaggatttgcaaaaagagctttttacggaatctggcgctggtactttgattagtcgcggttttgtcatcaacaaacatgactcgttggatagcattccagacgctgctctagaaaatttgatcattcaaaaaaattctttagccgcacctagtgaaagcttgaaacagttcaaggatactctgaaagacagaaaacttcgtatttatagtgactctttcaatgaatctgttgctattgtcgacaccaccgactcatccttgccagtactcttagcttttggtgccgccgacaataattggttaaacaatgttgttgatagcatattaacaacattaaaagcagacttcccttctttgctatggcgtcttcaaccttcagccaagaatctggaatggttcttctctaaaagcgaaggtactttgtttgctaataatttttactacttttggtacggtgtaaaagatttgaataaaatctccaagttcattcagtctgacaagccatttgccgatgctatcattcagacccaatccactaaaccccctactgcttcatctaccaccaacaacccttcctcttcacagatcaatcaaaaacgaagttactcaactagttctttattttcaaaaaacaaaaaaatgaatcgttctttgtttttaaagggtggaaaacgatttttttctgctgaggctcagaagacccaaaaacctttgaaggcggtctcatcgaagccagcaaaagtcgttctccttggagcccgtggttataccggaaagaacttgattggattgattaacactcatccttatctcgaattatctcatgtttcttctcgtgagttggaaggcaccaaacttcctggctacactaagaaagaaattcagtatgtcaacttgtccacagatgatgttaaaaaattagaggaagagggagcggttgatgcttgggtcatggccctacccaacggtgtatgcaaaccttatgtcgatgctttaacgtctgcaaatggtaaaagtgtcattgttgatttaagtgcggactaccgttttgagccctcgtggcagtacggtcttcctgaactaaatgaccgtgaagctttgcgtaactcgaaacgtatttccaatcctggttgttacgctactggatcgcaagtcggtttaactcccatactctctttgattgacggccagccctctatttttggtgtatctggttattctggggctggcactaagccctctccgaagaatgacttgaatgtattgacaaacaatttgataccttactcattaactgatcacatccatgaacgtgaaatttcttatcgtttaaagcaacctgtcgcctttattcctcacgttgctcaatggttccaaggaattactttaactattaatgttccgttaaagaaaagtataacttcccgtgagcttcgtaacttataccaagaccgttataatggtgagcctttaattcatgttcaaggagatgtacctttggtcaaggacaacgcacacaagcatcatgtttcagttggtggttttggtgtgcactcttctggaaagcgtgcagtcattgtagttactatcgacaatttacttaaaggtgctgctactcaagctctccagaatctcaatctgtcctgtggttacgatgaatatgccggtatccatttggattga

SEQ ID NO: 47891 - protein, 885 aa, Schizosaccharomyces pombe
MLIELQQIVKSGLVRNGAKHCTKRSLLCSNASVIASKRFQGSFAPGQQQPLNPLAKPIEQDRDAIIRILSSIGSRREVEQYLRYFTSFEAQRFAIIKVGGAIITDELDTLAQSLAFLNHVGLYPIVVHGAGPQLNKILASRNVEPEYSDGIRITDAETLSVARKVFLEENAKLVDALEKLGTRARPITGGVFQAEYLDKEKYKYVGKIVKVNKAPIEHSIRAGTLPILTSMAETASGQLLNVNADITAGELARVLKPLKVVYLNEKGGLINGETKKKISSIYLDREYDGLMKQPWVKYGTKLKIKEIKELLDTLPRTSSVAIISTKDLQKELFTESGAGTLISRGFVINKHDSLDSIPDAALENLIIQKNSLAAPSESLKQFKDTLKDRKLRIYSDSFNESVAIVDTTDSSLPVLLAFGAADNNWLNNVVDSILTTLKADFPSLLWRLQPSAKNLEWFFSKSEGTLFANNFYYFWYGVKDLNKISKFIQSDKPFADAIIQTQSTKPPTASSTTNNPSSSQINQKRSYSTSSLFSKNKKMNRSLFLKGGKRFFSAEAQKTQKPLKAVSSKPAKVVLLGARGYTGKNLIGLINTHPYLELSHVSSRELEGTKLPGYTKKEIQYVNLSTDDVKKLEEEGAVDAWVMALPNGVCKPYVDALTSANGKSVIVDLSADYRFEPSWQYGLPELNDREALRNSKRISNPGCYATGSQVGLTPILSLIDGQPSIFGVSGYSGAGTKPSPKNDLNVLTNNLIPYSLTDHIHEREISYRLKQPVAFIPHVAQWFQGITLTINVPLKKSITSRELRNLYQDRYNGEPLIHVQGDVPLVKDNAHKHHVSVGGFGVHSSGKRAVIVVTIDNLLKGAATQALQNLNLSCGYDEYAGIHLD

SEQ ID NO: 47892 - DNA, 2592 bp, Saccharomyces cerevisiae
  CDS (1)..(2592)
atgccatctgctagcttactcgtctcgacaaagagacttaacgcttccaaattccaaaaatttgtgtcttcattaaacaaatccaccatagcaggatttgcatctgtacccttgagagctccaccatccgttgcatttacgagaaagaaagtcggatactcaaagaggtatgtttcatctactaacggcttttcagctactagatccactgtgatccaactgttgaacaatatcagcacaaaaagagaggttgaacaatatttgaaatatttcacttccgtctcacaacaacaatttgctgtgatcaaggtgggtggtgccattatcagcgacaatctacacgaactcgcttcctgcttggcatttttgtatcatgttggtctatatccaatagttttacatggtaccggtcctcaggttaatggaaggctagaagcgcagggaattgagccagactatattgatggtattagaatcacggatgagcacacaatggccgtagttagaaaatgttttttggaacaaaatcttaagctagttactgcattagaacagctaggggtccgtgcaagacccattacttctggtgtttttactgctgactatttggataaggacaaatacaagctagtgggcaatattaaaagtgtcacaaaagagccaattgaagcatctattaaggcaggtgccctaccaatcttgacctctttagccgaaactgcttctggtcaaatgttgaacgtcaacgccgacgtagctgctggtgaattagcccgtgtttttgagcctttgaagatcgtttacctgaatgagaaagggggtattatcaatggctccacgggagaaaaaatttcgatgatcaatttggatgaagagtatgacgatttaatgaagcaaagttgggtgaagtatggtaccaaattaaaaattagagaaattaaagagcttttggactatcttcctcgttcttcttcagttgcaatcattaacgttcaagatctacaaaaagaactgttcactgattctggtgcgggtactatgatcaggagaggttacaaattagtgaagagatcctccattggcgaatttccatccgctgatgctctaagaaaagctcttcaaagggacgctggcattagttccggtaaagaatctgttgcttcttatttaagatatttggaaaactctgattttgtctcttatgctgatgaacctcttgaagcagtggccattgtaaagaaagatacgaacgttcccacactagacaaatttgtctgttctgacgcagcctggttgaataacgtcacagataatgtattcaatgttttgcgccgtgattttcctgctttacaatgggtagtcagtgaaaatgatgctaacattgcatggcattttgataagtctcaaggttcatatctaaaaggcggaaaagttttgttctggtatggtatcgatgatataaatacaatatccgagctcgttgaaaattttgtgaagtcgtgtgacactgcttctaccctcaactcatcagcaagtagtggagtatttgctaacaaaaaatcagctaggtcgtactcaactagatccactcctcgtcccgagggagttaacaccaaccctggtcgtgtcgcgcttattggtgctagaggttacacaggtaaaaatttggtatctttgatcaacggccacccatatttagaagtggcccatgtttcttctcgtgaattgaaaggtcaaaagttgcaagattatacaaaatccgaaattatatatgaaagtttgcaaatacaggatattaggaaactggaagaacaaaatgctgtggacttttgggttatggcattacccaacaaagtctgtgaacctttcgttgagacaatccaaagtgttcatggtaagtctaaaattattgatctgtccgctgatcacaggtttgtatcagaatcagactgggcttacggtttgccagaattgaatgatagagcaaaaattgcaaacgctgccaaaattgctaatcccggttgttatgctactggttcgcaattaacgatttctccgttaacaaagtatatcaatggtcttccaactgtgtttggtgtttcagggtattcaggcgcggggacgaagccttctccaaaaaacgatcccaaattcttgaacaataacttaattccttacgctttaagtgatcatatacacgaacgcgaaatctcagctcgcattgggcacaatgttgcattcatgccccatgttgggcagtggtttcaaggtatctctttgaccgtctctattccaataaaaaaaggttccttgtctattgatgagatcaggaaattatacagaaatttttacgaagacgaaaagctagtacatgtcatcgatgatatcccactggttaaagatattgagggcacccatggtgtagttattggtggtttcaagctgaatgatgctgaagatcgtgtagttgtttgcgcaaccatcgataacttacttaaaggcgccgctactcaatgtctgcaaaatattaatcttgctatgggttatggagagtatgctggtatccctgaaaataaaattattggtgtctga

SEQ ID NO: 47893 - protein, 863 aa, Saccharomyces cerevisiae
MPSASLLVSTKRLNASKFQKFVSSLNKSTIAGFASVPLRAPPSVAFTRKKVGYSKRYVSSTNGFSATRSTVIQLLNNISTKREVEQYLKYFTSVSQQQFAVIKVGGAIISDNLHELASCLAFLYHVGLYPIVLHGTGPQVNGRLEAQGIEPDYIDGIRITDEHTMAVVRKCFLEQNLKLVTALEQLGVRARPITSGVFTADYLDKDKYKLVGNIKSVTKEPIEASIKAGALPILTSLAETASGQMLNVNADVAAGELARVFEPLKIVYLNEKGGIINGSTGEKISMINLDEEYDDLMKQSWVKYGTKLKIREIKELLDYLPRSSSVAIINVQDLQKELFTDSGAGTMIRRGYKLVKRSSIGEFPSADALRKALQRDAGISSGKESVASYLRYLENSDFVSYADEPLEAVAIVKKDTNVPTLDKFVCSDAAWLNNVTDNVFNVLRRDFPALQWVVSENDANIAWHFDKSQGSYLKGGKVLFWYGIDDINTISELVENFVKSCDTASTLNSSASSGVFANKKSARSYSTRSTPRPEGVNTNPGRVALIGARGYTGKNLVSLINGHPYLEVAHVSSRELKGQKLQDYTKSEIIYESLQIQDIRKLEEQNAVDFWVMALPNKVCEPFVETIQSVHGKSKIIDLSADHRFVSESDWAYGLPELNDRAKIANAAKIANPGCYATGSQLTISPLTKYINGLPTVFGVSGYSGAGTKPSPKNDPKFLNNNLIPYALSDHIHEREISARIGHNVAFMPHVGQWFQGISLTVSIPIKKGSLSIDEIRKLYRNFYEDEKLVHVIDDIPLVKDIEGTHGVVIGGFKLNDAEDRVVVCATIDNLLKGAATQCLQNINLAMGYGEYAGIPENKIIGV

SEQ ID NO: 47894 - DNA, 1059 bp, Anabaena sp
  CDS (1)..(1059): transl_table=11
atgggcaattttggacgcgtacccgttgggattgttggcgcgtcaggctatggtggggtacagttagtccgattactgatggatcatccagaaatcgaactagtttatttaggtggtgagagtagtgtaggtaaatcttttgcatctctctacccccatttagctcatgcagttaaattatcaattgaagaagtagacccagaagtgattgcgcgtcgctgtgaagtggtgtttctctcgatgccaaatggtctggcttgtcaaattgtgccaacattgttggaaaaaggctgtaaagtactggatttgagtgcagactatcgattccgtaacttgacaacttacaccacttggtatggtgtggaaaggagcgatcgcactacagccgacaccgccatatatggtttacctgaactttaccgcgatcgcatctccgaagcccaattagtcggctgtcctggttcctaccccaccgctagcctcttagcattatcgccactgttaaaacaaggtttaatcgtccccgaaactgctattgttgacgctaaatctggtacatctggcggcgggagggaagctaaaacttatctattactagcagaagcagataattctctcgccccttatagtgtcgtccgtcaccgtcacaccccagaaatcgagcaaatttgtagcgatttggcgggtcacgaagttacagtccaatttacgccacatcttgtccctatagtacggggaattttggcaactgtatacgctaccctgcgcgatcctggtttagttggagatgatttaactactatttatacagccttctaccgtaattctccctgggtaaaagtttgtgaaagcggcatttatccgcaaacaaaatgggctgcgggcagcaatctttgttatatcggtgtagaagttgacccgcgtactggccgggtaattgtcatgtcagtaattgacaacctgatcaaaggccaagcgggtcaagcaattcagtgtctcaacatcatgatgggttgggatgagacattgggtttaccaaaaatggggttttatccgtga

SEQ ID NO: 47895 - protein, 352 aa, Anabaena sp
MGNFGRVPVGIVGASGYGGVQLVRLLMDHPEIELVYLGGESSVGKSFASLYPHLAHAVKLSIEEVDPEVIARRCEVVFLSMPNGLACQIVPTLLEKGCKVLDLSADYRFRNLTTYTTWYGVERSDRTTADTAIYGLPELYRDRISEAQLVGCPGSYPTASLLALSPLLKQGLIVPETAIVDAKSGTSGGGREAKTYLLLAEADNSLAPYSVVRHRHTPEIEQICSDLAGHEVTVQFTPHLVPIVRGILATVYATLRDPGLVGDDLTTIYTAFYRNSPWVKVCESGIYPQTKWAAGSNLCYIGVEVDPRTGRVIVMSVIDNLIKGQAGQAIQCLNIMMGWDETLGLPKMGFYP

SEQ ID NO: 47896 - DNA, 1251 bp, Deinococcus radiodurans; identical to SEQ ID NO: 47582
  CDS (205)..(1251): transl_table=11

SEQ ID NO: 47897 - protein, 348 aa, Deinococcus radiodurans
MSTEKKTVAIVGGSGYAGGEFLRLALGHPHLEVTQVTSERSAKLPVSMVHPNLRGATNLKFRKAAELEEADIIVLALPHNSAAKRITEFEAKGKVIVDLSADFRLKDPEVYERFYGEPHPAPEQLGQWVYGNPELHREDLRGATRIACAGCFATSVILALYPLLRLGALAPKDIIATGLVGSSAAGASASESSHHPERAGSLRVYKPVGHRHTAEAQQELPGKFPLHLTAISTPRVRGILTTIQAWVPDGWSDKDVWSAYREVYGQEPFIRIVKVAKGIHRYPDPMLLDGTNFCDIGFEMDVDTGRVVLMSAIDNLVKGTAGHAIQSLNVAQGWDERAGLGFLGLHPT

SEQ ID NO: 47898 - DNA, 1032 bp, Lactobacillus plantarum
  CDS (1)..(1032): transl_table=11
ttgaaaaataatatgaaagttggaatcttaggtggctctggctatgctggtgcagagctgtaccgcttgttactaaatcatccgaattttaacgttacttttatatcatctgaaaagtatgctggtaaacctgttgagaaaatgttgaaaggttttgcacataacggtcattcgcataatttacggttcaatcatctagatgatttaccatttgatttagacttcgttttttcagcgctgcctactggtgtattgccaaagtatgttgaaaagattctcgaaaaaactagtttaatttttaatgttagtggtgatttccgttttaaagatgccacaacacttcagcaatactatccggaaacattagcaattgaaagtgaccagatcttatcgtcatattatattcctgaatttagtgatttcgacaaaaacgccaatatcattaacttaccagggtgtatggcactagcttctatttatgctgcatatcctttagtgaaaaataaactaattaatccgaatatttttgttgatgtaaaaactggttcaagtggcgcaggaaaatcaacaaaagaaactgcagctgatagatttggcaatttccgattgtatagagcgttcaatcatcggcatctacctgaaattgcgatggctttaggatcctctgtgggtaaagtgggctttgctgcatactcactagatatttcacgtggaatttacgccagcgtttattctcaaattaaaaagggtgtgacagaagttgatgtaaaaaaagcttattttaaaacttataaatcttgcaaatttgtagctaatttaactggtaagcaaagtgttccaatgttgaagtcgactaatggtactaattttgctgaagtaaaggcaactgttcacgaaggacaatgcattgccgtagtttctttagacaatttattaaaaggtgcggccggtcaggcggttcaagctgctaataaatactatcagttagttgaagatacaggattagatactttagcagggatgtggccataa

SEQ ID NO: 47899 - protein, 343 aa, Lactobacillus plantarum
MKNNMKVGILGGSGYAGAELYRLLLNHPNFNVTFISSEKYAGKPVEKMLKGFAHNGHSHNLRFNHLDDLPFDLDFVFSALPTGVLPKYVEKILEKTSLIFNVSGDFRFKDATTLQQYYPETLAIESDQILSSYYIPEFSDFDKNANIINLPGCMALASIYAAYPLVKNKLINPNIFVDVKTGSSGAGKSTKETAADRFGNFRLYRAFNHRHLPEIAMALGSSVGKVGFAAYSLDISRGIYASVYSQIKKGVTEVDVKKAYFKTYKSCKFVANLTGKQSVPMLKSTNGTNFAEVKATVHEGQCIAVVSLDNLLKGAAGQAVQAANKYYQLVEDTGLDTLAGMWP

SEQ ID NO: 47900 - DNA, 1035 bp, Pseudomonas putida
  CDS (1)..(1035): transl_table=11
atgatcaaggtcggtatcgtcggcggcacgggttacaccggcgtcgaactgttgcgtctgctggcacagcatccacaggccgaagtggcggtcatcacttcgcgctccgaggcgggcgtggcggtggcggacatgtacccgaacctgcgcggccactatgacgggttggcgttcagcgtgccggacagcaaggctctgggggcctgcgatgtggtgttcttcgccactccgcatggtgttgcacacgccctggccggtgagctgctggcggctggcaccaaggtgatcgacctgtcggccgacttccgtctgcaggatgccactgagtggggcaagtggtacggtcagccccatggcgcgccagagctgctcaaggacgcagtctatggcctgcccgaagtcaaccgcgagaagatccgccaggcacgcctcatcgctgtgccgggttgctacccgactgcaacccagctgggcttccttccgctgctggaggcgggcctggctgacccgtcgcgcctgatcgccgactgcaagtcgggtgtcagcggcgctggtcgtggtgcggcagtgggctcgctgttctgcgaggccggcgaaagcatgaaagcctacgcggtaaagggccatcgccacttgccggagatcagccagggcctgcgcctggccgcgggcaaggacatcggcctgactttcgtgccgcacctgacgccgatgatccgtggcatccatgccaccctgtacgcgaacgtggtcgatacctcggtcgacctgcaggcgctgttcgagaaacgctacgccgatgaaccgttcgtcgacgtgatgccagcaggcagccatccggaaacccgtagcgtgcgtggtgccaacgtctgccgcattgccgttcatcgtccgcagggtggtgatctggtggtggtgctttcggtgatcgacaacctggtcaagggtgcctccggccaggcggtgcagaacctcaacattctgttcggtctggatgagcgcatgggcctgtcccatgccggcttgctgccgtaa

SEQ ID NO: 47901 - protein, 344 aa, Pseudomonas putida
MIKVGIVGGTGYTGVELLRLLAQHPQAEVAVITSRSEAGVAVADMYPNLRGHYDGLAFSVPDSKALGACDVVFFATPHGVAHALAGELLAAGTKVIDLSADFRLQDATEWGKWYGQPHGAPELLKDAVYGLPEVNREKIRQARLIAVPGCYPTATQLGFLPLLEAGLADPSRLIADCKSGVSGAGRGAAVGSLFCEAGESMKAYAVKGHRHLPEISQGLRLAAGKDIGLTFVPHLTPMIRGIHATLYANVVDTSVDLQALFEKRYADEPFVDVMPAGSHPETRSVRGANVCRIAVHRPQGGDLVVVLSVIDNLVKGASGQAVQNLNILFGLDERMGLSHAGLLP

SEQ ID NO: 47902 - DNA, 969 bp, Anabaena sp
  CDS (1)..(969): transl_table=11
atgaataaaccgaaaatttttattgatggggaagcgggaactacaggcttacagatttactcacgcctcaacgagcgagatgatattgagctagttagtattgcagcatcgaagcgcaaagatgcggatgagcgagcaaaattgctcaattccgtcgatgtagccattctttgtttacctgatgatgcagcgcgggaagctgttagtttagttaacagtagtcaggtgaagattctcgatgctagcaccgcttatcgcacggctcaaggttgggtatatggttttccggaaatgaacccaggacagcgagagaaaatcgccaatgctcagtttgtgagcaatccggggtgttatcctacagggtttttagcttgtgtacgtccgttaatagctcaaggtattcttcccagtagctttcccataacaattaatgcggtgtctggctactctgggggtggtaagagcctgatccaaaagtatgatagcttccacgagcagcagaaaggcgcaacttcagattatcccttcggtatctatggtttacagttcggtcataaacacgttaaagagatgcaccagcattctgggttagcatcaccaccattgtttatccctgcggtgggtgacttcgagcagggaatgttggtgcaaatacccttacctctgtggactttggacaatccgccatcgggtgaagagattcatcaagcgatcgcccaatactaccaaggggaaaagtttgtgcaggtagccccatttaaagaccctagcctgttacgtgacggcacatttttagacgcaacggcagttaacggtactaatattgttcaggttttcgtcttcggtaacgataatacgaaagaagcactgttagtggctcgactagataatttgggcaagggtgcatcaggagcagcagtccaaaacctaaatattatgctaggtcttccagaagagttaggattatga

SEQ ID NO: 47903 - protein, 322 aa, Anabaena sp
MNKPKIFIDGEAGTTGLQIYSRLNERDDIELVSIAASKRKDADERAKLLNSVDVAILCLPDDAAREAVSLVNSSQVKILDASTAYRTAQGWVYGFPEMNPGQREKIANAQFVSNPGCYPTGFLACVRPLIAQGILPSSFPITINAVSGYSGGGKSLIQKYDSFHEQQKGATSDYPFGIYGLQFGHKHVKEMHQHSGLASPPLFIPAVGDFEQGMLVQIPLPLWTLDNPPSGEEIHQAIAQYYQGEKFVQVAPFKDPSLLRDGTFLDATAVNGTNIVQVFVFGNDNTKEALLVARLDNLGKGASGAAVQNLNIMLGLPEELGL

SEQ ID NO: 47904 - DNA, 921 bp, Deinococcus radiodurans
  CDS (1)..(921): transl_table=11
atgaacaagcccaagattttcattgacggtgaagccggaaccaccggcctgcaaatcagagagcgcctcgccgggcggagcgacctcgaactgctgagcatcgacccagtgcggcgcaaagacagcgcggcgcgggccgaactgctcaacgccgccgacgtctccatcctgtgcctgcacgatgacgcggcgcgggaagcggtaagcctcacgaccaacccagcttcgcggctgctggacgccagcaccgctcaccgcattcaccccgactgggtctttggctttcccgaactgagcgcagagcagccggagaaaatccggcaggcgcggtacgtggccaaccccggctgctacagcaccggcgcgattgcgctgctggccccgctgactgggcgcgggctgctgcccgccgactttccggtgcatattcagggctacagcggctacaccggcggcgggcgcgcgctggtagacgcccacgagcagggcagcgcgcacccatccaagggcgcgtttatcagttacggtctcacgctggagcacaagcacctgcccgagacgatggtgtacggcggcctgacccgcaagcccgtgttcacgccgaacgtgggcggctgggcgcaggggatgaccgtgacggttcccctgcatctggccgagctgggagtgagtgccgaggcgctgcacgccgcgctgaaggagcactacgccgggcaacagtacgtgaaggtcttcgagctggccgacaaccccgagattctcgacccgcagacgctgaacggcaccaacaacctcgaactgttcgtatacccggcggcggacggcgaacgcgccctgctcgccgcgcggctcgacaacctcggcaaaggggcgagtggcgcagcggtgcagaatctggagctgatgctcggcctatcctga

SEQ ID NO: 47905 - protein, 306 aa, Deinococcus radiodurans
MNKPKIFIDGEAGTTGLQIRERLAGRSDLELLSIDPVRRKDSAARAELLNAADVSILCLHDDAAREAVSLTTNPASRLLDASTAHRIHPDWVFGFPELSAEQPEKIRQARYVANPGCYSTGAIALLAPLTGRGLLPADFPVHIQGYSGYTGGGRALVDAHEQGSAHPSKGAFISYGLTLEHKHLPETMVYGGLTRKPVFTPNVGGWAQGMTVTVPLHLAELGVSAEALHAALKEHYAGQQYVKVFELADNPEILDPQTLNGTNNLELFVYPAADGERALLAARLDNLGKGASGAAVQNLELMLGLS

SEQ ID NO: 47906 - DNA, 1026 bp, Lactobacillus plantarum
  CDS (1)..(1026): transl_table=11
atgcaagtcgcgctagttggcgttacggggtacagtggcatggtgttgtaccggctcttgaaacaacatcccgagatcgatcgcatccaattatacgggcacgtgggagcaactacggtggcattaaagacggtggcagccatgtaccagaaggaaacggcggttattcgaccattcgatgcgacggcaatcatgcgcgataacgcgattgtgttctttgcgacatcagcgggtatcacgcgacaattggcattaccattcatcgctgctcattttccagtcatcgatttatctggtgacttccgcttgcatgatccagagcaatatcagcggtggtaccaacgtgatccagcatcggcgaccgctttggcgcaggcgagctacggcttagctgatatgccggcgccgttgtccacctacattgcgaatcccggctgctatgcgactgctacgttattaggactagcgccacttgctcagcagcagttggtcgaaccgacttcgattgttgtggatgctaagtccggcttatctggtgctggcaaacgagcgacagctgcgagtcattacgtcgctgtgaatgataatttgagtttatataagttgaatcaacatcaacatatccctgaaatgatgcaacagttacagcagtggtggtccgcgatttctgcgattgaatttactaccactttgattccagtaacgcgtgggattatgacgacgatttatgccaaagcgaagtcagcattgacaacgacgcaggtccgcgctgcttttaccgcgacctatcatgagcagccgttcgtgcaagtgctaccaacggggatgccgacgctcaaggacgttgttgggtctaataactgtgcgttaggcgttgattataatccggtcacgaacaccatcgtggttgtgagcgtcattgacaatttgatgaaaggtgctgcggggcaggccgttcagaattttaatcgctattttgatttcgcggttacggccggattaccgacgttacctgtatttccctga

SEQ ID NO: 47907 - protein, 341 aa, Lactobacillus plantarum
MQVALVGVTGYSGMVLYRLLKQHPEIDRIQLYGHVGATTVALKTVAAMYQKETAVIRPFDATAIMRDNAIVFFATSAGITRQLALPFIAAHFPVIDLSGDFRLHDPEQYQRWYQRDPASATALAQASYGLADMPAPLSTYIANPGCYATATLLGLAPLAQQQLVEPTSIVVDAKSGLSGAGKRATAASHYVAVNDNLSLYKLNQHQHIPEMMQQLQQWWSAISAIEFTTTLIPVTRGIMTTIYAKAKSALTTTQVRAAFTATYHEQPFVQVLPTGMPTLKDVVGSNNCALGVDYNPVTNTIVVVSVIDNLMKGAAGQAVQNFNRYFDFAVTAGLPTLPVFP

SEQ ID NO: 47908 - DNA, 942 bp, Pseudomonas putida
  CDS (1)..(942): transl_table=11
atgcacacccctgttgttttcatcgacggcgaccaaggcaccacaggcctgcagatccatgcccgcctgcagggccggagcgatcttcgcctgctgaccctccccgaggccgagcgcaaggacccgcaacgccgctgcgaagcgatcaacagtgccgacatcgccctgctgtgcctgcccgacgacgccgcccgcgaggccgtggccgcaatccacaacccccaggtgcgggtgatcgacgccagctcggcgcaccgcaccacaccaggctgggtgtatggcctgccggagcttgacgaacagcaagccgagcgcatcgcgcaaagcacgcgtgtcagcaatcccggttgctatcccaccggcgccatcgcgctgctgcacccactggtcaaggccggcttgctgcctgcggactaccccctgaacatccacgccgtgtctggctattccggcggtggtcgcgcggcggtcgagcggcatgaacagcccggcgccgccaaagccccggcgctacagctgtatggcctggagctggcgcacaagcacgtaccggagatccagcagcacgcggggttgtcggcgcggccgatgttcatgcccggctatggcgcctaccgccaaggcatcgcgctgagcattccgctgcagcttcgcctgctgcctggacaggtcagcgccgagcatttgcaagcctgcctggaacagcattaccagggtgcccgccatgttcaggtgatgcctctgcatcagtgcggtgctgcggcaaacctcgaccccgaggcattgaacggcagcaatgacctgcgcctggcgttgtacgccaaccccgagcatggccaggtactgctcaccgcagtgttcgacaacctgggcaaaggtgcctctggtgctgccgtgcaaaacctcgacctgatgctcggtgccttacaggcacacggctga

SEQ ID NO: 47909 - protein, 313 aa, Pseudomonas putida
MHTPVVFIDGDQGTTGLQIHARLQGRSDLRLLTLPEAERKDPQRRCEAINSADIALLCLPDDAAREAVAAIHNPQVRVIDASSAHRTTPGWVYGLPELDEQQAERIAQSTRVSNPGCYPTGAIALLHPLVKAGLLPADYPLNIHAVSGYSGGGRAAVERHEQPGAAKAPALQLYGLELAHKHVPEIQQHAGLSARPMFMPGYGAYRQGIALSIPLQLRLLPGQVSAEHLQACLEQHYQGARHVQVMPLHQCGAAANLDPEALNGSNDLRLALYANPEHGQVLLTAVFDNLGKGASGAAVQNLDLMLGALQAHG

SEQ ID NO: 47910 - DNA, 1035 bp, Thermus thermophilus
  CDS (1)..(1035): transl_table=11
gtggataagaaaaccctttccatcgtgggggcctcggggtacgccgggggagagttcctcaggctcgccctttcccacccttatctggaagtgaagcaggtgacctcgaggcgcttcgcgggcgagcccgtccacttcgtccaccccaacctccgaggacgcacgaacctcaagttcatccccccggagaagctggagcccgcggacatcctggtcctggccctgccccacggggtcttcgcccgggagtttgaccgctacagcgccctcgcccccatcctcatagacctctccgcggacttccgcctgaaggacccggagctttaccgcaggtactacggggagcacccgaggccggacctcctcggctgcttcgtctacgccgtgcccgagctttaccgggaggcccttaagggggcggactggatcgccggggccgggtgcaacgccacggccaccctcctcggcctctaccccctcctcaaggccggggtcctgaagcccacccccatcttcgtcaccctcctcatctccacctcggccgccggggccgaggcgagcccggcgagccaccaccccgaaagggccgggtccatccgggtctacaagcccacgggccaccgccacaccgccgaggtggtggagaacctcccgggtaggcccgaggtccacctcaccgccatcgccaccgaccgggtgcgggggatcctcatgaccgcccagtgcttcgtccaggacggctggagcgaaagggacgtctggcaggcctacagggaggcctacgctggggagcccttcatccgcctcgtcaagcagaagaagggggtccaccgctaccccgacccccgtttcgtccagggcaccaactacgccgacatcggctttgagctggaggaggacacgggcaggctcgtggtcatgacggccattgacaacctggtgaagggcaccgcgggccacgccctccaggccctaaacgtccgcatgggctggcccgagaccctgggcctggacttcccggggcttcacccctaa

SEQ ID NO: 47911 - protein, 344 aa, Thermus thermophilus
MDKKTLSIVGASGYAGGEFLRLALSHPYLEVKQVTSRRFAGEPVHFVHPNLRGRTNLKFIPPEKLEPADILVLALPHGVFAREFDRYSALAPILIDLSADFRLKDPELYRRYYGEHPRPDLLGCFVYAVPELYREALKGADWIAGAGCNATATLLGLYPLLKAGVLKPTPIFVTLLISTSAAGAEASPASHHPERAGSIRVYKPTGHRHTAEVVENLPGRPEVHLTAIATDRVRGILMTAQCFVQDGWSERDVWQAYREAYAGEPFIRLVKQKKGVHRYPDPRFVQGTNYADIGFELEEDTGRLVVMTAIDNLVKGTAGHALQALNVRMGWPETLGLDFPGLHP

SEQ ID NO: 47912 - DNA, 1050 bp, Acinetobacter sp
  CDS (1)..(1050): transl_table=11
gtgatttctgtcggaattgttggtggaactggttatacaggcgttgagttattgcgcttattgcttcgacatccgcaagttacggttcgtgtattaacttctcgtactgaagcaggaaagcgcgttgcagatatgttcccgagtttaagagggcatactgaccttgagttttcagatcttaatgaagatgtattaaagcaatgtgatgttgtattttttgcgacaccgcatggtgttgcgatgaaatatgcaaaaggattagtcgctgccggagtgaaagtgattgatctggcggccgattttcgtcttcaaaacttagagcagtttgaaaaatggtatggactggagcatgagtgtccagagatacttaaagattcagtatatgggttgtctgaacttaatcgtgaaaaaatcaagacagccaaagttgttggcaacccaggctgttacccaacaactgtccaattaggtttagcacctttactacaagcagatgtggctttaatcaaacctgaaaatattattattgatgctaagtctggagtttctggtgcggggcgcaaagcaagtctgggtatgatttactcagaaaatgccgataactttaaagcttatggtgtggctggtcatcgtcatcaccctgaaattgtagaagcgcttgaacatatttctggacaaaaaggtgtctttgatcaaattatttttgtgcctcatttggtgcctatgattcgcggcatgctcagtacaatttatatcgatttgactgaagaaggtgcaaatagtgatcttcaatctttatatgagatatattacgccaatgaaaaatttgtagatgttatgcctgcaaatagctcgccagaaacacgcagtgttcgtggcgctaacgagttacgtattgcgctgtataaaccacaaccaaataaattagttatcttgtctgtgcaagataatctggtgaaaggtgcagcaggtcaggccgtacaaaatatgaatctcatgtttaatcttgatgaagatacaggattaacgggaattggtttattaccataa

SEQ ID NO: 47913 - protein, 349 aa, Acinetobacter sp
MISVGIVGGTGYTGVELLRLLLRHPQVTVRVLTSRTEAGKRVADMFPSLRGHTDLEFSDLNEDVLKQCDVVFFATPHGVAMKYAKGLVAAGVKVIDLAADFRLQNLEQFEKWYGLEHECPEILKDSVYGLSELNREKIKTAKVVGNPGCYPTTVQLGLAPLLQADVALIKPENIIIDAKSGVSGAGRKASLGMIYSENADNFKAYGVAGHRHHPEIVEALEHISGQKGVFDQIIFVPHLVPMIRGMLSTIYIDLTEEGANSDLQSLYEIYYANEKFVDVMPANSSPETRSVRGANELRIALYKPQPNKLVILSVQDNLVKGAAGQAVQNMNLMFNLDEDTGLTGIGLLP

SEQ ID NO: 47914 - DNA, 1068 bp, Aeropyrum pernix
  CDS (1)..(1068): transl_table=11
atggctcgtgcggttcgcgctggcatactaggagcctctggcatgactggtggtgaactcctcaggatacttgcttcccaccccggcgtagaggtggagtgggcgacgagcagggagtatgctggaaagcctgtccacacagctcaccctcacctgcggggcttctacactggccttaagtatacctctattgataagattgacattggagaggtcgatgttgtttttaacgctctccctcacggcgttggcgccagtattgttgcagaggcctacgaaaatggtgttagggttgtggatctgagcgccgactataggctaagggatcaatcgctatatcccaagctatacgggttcaagcatcccaggcccgatcttcttgaggaggctatatacgctcttccagagatctatggcgagaagctcaggggtgctaggctagcggcagtgccaggatgtaatgcaactgcggccatattagcagccgcacccctagtcgcctccaagattatagacatggatgtaggcattatagtcgacgttaaggcggcgagcagcgaggccggctccaagcccagccgccacagcatccaccccctacgagagggttctgcaagaccctacaccccctgggggcacaggcacgcggccgaggctgtccaggttctcagggacctggtaggacgcggcatacggttgagcctcgtgccgcacgctgtatcaatgacgaggggcgtcctagcaagcgcccacgccctgctccgggataatatcggtttctcggaggcggtgagggcttatgcatcattctacaaggactctcaaatagtgagagtcaagcccatggctccggggctgccagtcgaccctcctgatgtgaagaatgtgataggtagtatgtttgcggaggtagggttcgcagtagaggaggagtctggaaggataacggggttcgccgcaatagacaacctcgttagaggcgctgcggggcaggcagtctatgctatgaatgcaatgctaggatttgacgagtgggaggggctgaggagtcctcccctgagaccttag

SEQ ID NO: 47915 - protein, 355 aa, Aeropyrum pernix
MARAVRAGILGASGMTGGELLRILASHPGVEVEWATSREYAGKPVHTAHPHLRGFYTGLKYTSIDKIDIGEVDVVFNALPHGVGASIVAEAYENGVRVVDLSADYRLRDQSLYPKLYGFKHPRPDLLEEAIYALPEIYGEKLRGARLAAVPGCNATAAILAAAPLVASKIIDMDVGIIVDVKAASSEAGSKPSRHSIHPLREGSARPYTPWGHRHAAEAVQVLRDLVGRGIRLSLVPHAVSMTRGVLASAHALLRDNIGFSEAVRAYASFYKDSQIVRVKPMAPGLPVDPPDVKNVIGSMFAEVGFAVEEESGRITGFAAIDNLVRGAAGQAVYAMNAMLGFDEWEGLRSPPLRP

SEQ ID NO: 47916 - DNA, 933 bp, Agrobacterium tumefaciens
  CDS (1)..(933): transl_table=11
atgacagcgaagatcttcatcgatggcgaacacggcaccacgggtctgcagatccgcacgcgccttgccggtcgccgcgatatcgagctgctgtccattccagagaccgagcgccgcaacgcggcgatgcgcgaggatttgctcaacaacgccgacatttcgatcctctgcctgccggatgatgcctcgaaggaggctgtctccatggtggccggcaacaataatgtccgcattatcgacacctccaccgcctatcgcgtccatcaggactgggcttacggttttgccgaaatggaccgggaccagggcgagaaggttcgctcggcccgtttcgtcgccaatcccggctgctacccgaccggcgcaatcggcctcatccgtccgctgcgcgctagcggcatcctgcccgacggttatccggtcagtgtcaatgcggtctccggttacaccggcggtggcaagcagatgatcgcgcagatggaggaccaaagccgcgacgatgcgatcagcgccaataatttcctgtatggcctgacgctgaagcacaagcacgtgccggaaatgaccattcacggtcagctcgaccgcgcaccgctgtttgcgccctccgtcgggcgtttcccgcagggcatgatcgtgcaggttccgctgtttgcagcggaccttgcggaaggcaccacgatcgaaaccatccatgcggcgctgaccgcccattatgcgggccaggacatcgtcagcgtcgtgccgcttgccgaaagcaaggggatttcccgcatcgacgctgaggagctggcgggcaaggacacgatgaagctcttcgttttcggtacgccgggcggtgagcatatcaatctcgtggcgctgctcgacaatctcggcaagggtgcctccggcgctgcggtacagaacatggagttgatgctctcggcatga

SEQ ID NO: 47917 - protein, 310 aa, Agrobacterium tumefaciens
MTAKIFIDGEHGTTGLQIRTRLAGRRDIELLSIPETERRNAAMREDLLNNADISILCLPDDASKEAVSMVAGNNNVRIIDTSTAYRVHQDWAYGFAEMDRDQGEKVRSARFVANPGCYPTGAIGLIRPLRASGILPDGYPVSVNAVSGYTGGGKQMIAQMEDQSRDDAISANNFLYGLTLKHKHVPEMTIHGQLDRAPLFAPSVGRFPQGMIVQVPLFAADLAEGTTIETIHAALTAHYAGQDIVSVVPLAESKGISRIDAEELAGKDTMKLFVFGTPGGEHINLVALLDNLGKGASGAAVQNMELMLSA

SEQ ID NO: 47918 - DNA, 1023 bp, Aquifex aeolicus
  CDS (1)..(1023): transl_table=11
atggagcaaacgttaagagtttccgttttcggtgccaccggttataccggtatagaactccttcgctcccttctcacacacccccactttgaagtaaaaaaccttatctctcagtcttacaaaggcaaaaaagtaagggaggtacttcccttcttttcaaacacctacatatccgagatagagttccttgaagaacctgttgaagactacgaacttgcctttttatgccttcctcacgaagtctcctacgagatagttcccaaactgctctcccagggcaaaaaggttgtggacctatccggtgcttacaggataaaaagtcccaaagcttacgaggaattttacggatttaaacacgagagggaagatatccttcagagggctgtttacggacttccagaagtttttagagaggagataaaaaatagcgatctcgtggcaaaccccgggtgttatccaacggctacacttctggcaatataccccttcctcaaggaaagggtgggaatagagagtgtaattgttcacgccctttcgggtgtgagcggagcgggaaggaagccaaaacaacaatttcacttccccgaaatgacggaaaacttcttcaattacgcggtagaaaagcacaggcacactcccgagatggaagacgtaataaggagagtttacggaagagaagtaaaggtaaggtttactcccaccgtagttcctacctcaaggggaatgatatccacggtttacctgaaatcagaaaaattaaacgtaaaggagcttttcaaggaagtttacgaagacgagattttcgtaaaggttgtggacgaaccacctcaaaccaagtgggttctgggaaccaattactgttttatttatccccattacgacgaaaggacaggctattacgttattatttctgcaattgacaacttgggtaaaggagcttctctacaggcggttcaaaacgcaaatttaatgttcgggcttgcggaagacgacgggctccttcaacttcccgttttcccctga

SEQ ID NO: 47919 - protein, 340 aa, Aquifex aeolicus
MEQTLRVSVFGATGYTGIELLRSLLTHPHFEVKNLISQSYKGKKVREVLPFFSNTYISEIEFLEEPVEDYELAFLCLPHEVSYEIVPKLLSQGKKVVDLSGAYRIKSPKAYEEFYGFKHEREDILQRAVYGLPEVFREEIKNSDLVANPGCYPTATLLAIYPFLKERVGIESVIVHALSGVSGAGRKPKQQFHFPEMTENFFNYAVEKHRHTPEMEDVIRRVYGREVKVRFTPTVVPTSRGMISTVYLKSEKLNVKELFKEVYEDEIFVKVVDEPPQTKWVLGTNYCFIYPHYDERTGYYVIISAIDNLGKGASLQAVQNANLMFGLAEDDGLLQLPVFP

SEQ ID NO: 47920 - DNA, 999 bp, Archaeoglobus fulgidus
  CDS (1)..(999): transl_table=11
atgaaggttggaataattggagcgagcggatacacgggctccgaactcctcaggattctcgctaaccaccccgaggcggaggtgatagcagcatcatccagaaggtatgaggggcagaagatatggaaggttcatcgctttctgaagggattttacgaccttgagttctgcagccctgagctgagcaatttcggtgattgcgatttggtttttacagccgtccctcacggagaggcgatgaagtacgtcccccagcttcttgacagcgggataaaggttgtggacatctccgcagactacaggctggataaggagacctacgaaagagtctatggaaaaaagcatgagggttatgtagaagcggtgtatggtttgacggagctgcatagagaggaaatcaaaaaggcaaatcttgtggcaaatcccggctgctaccccactggcacaatcctcgcagcatcacccctcgcaaagcttgagctgattgagagggttgtttttgactgtaagagcgggataacgggagctggagagtctccctccgccttcacgcactaccccaacctgcacgagtcaatagtgccctacaaaatcacagagcaccgccactactacgagatggttcaggaattgggcaggtttcagagcgacatcaaaatctccttcaccccccaagtctatcccggctcaaggggtattttgaccaacgcccacgtctttctgaggggagagcttacaagggaggagctttacagaatctacgaggaattctacgaagacagcttctttgtcagaattcaggagagtgtctccctcagtcaggtgagggggagcaacttctgcgacatctccatccatcccggagaagacagggttgtagttgtttccgcaatcgacaacctcgtgaagggggcttcggggcaggcggttcagaacatgaacctgatgatggggttcgacgaaacccttggactcagaactccaccactcttcccatga

SEQ ID NO: 47921 - protein, 332 aa, Archaeoglobus fulgidus
MKVGIIGASGYTGSELLRILANHPEAEVIAASSRRYEGQKIWKVHRFLKGFYDLEFCSPELSNFGDCDLVFTAVPHGEAMKYVPQLLDSGIKVVDISADYRLDKETYERVYGKKHEGYVEAVYGLTELHREEIKKANLVANPGCYPTGTILAASPLAKLELIERVVFDCKSGITGAGESPSAFTHYPNLHESIVPYKITEHRHYYEMVQELGRFQSDIKISFTPQVYPGSRGILTNAHVFLRGELTREELYRIYEEFYEDSFFVRIQESVSLSQVRGSNFCDISIHPGEDRVVVVSAIDNLVKGASGQAVQNMNLMMGFDETLGLRTPPLFP

SEQ ID NO: 47922 - DNA, 1029 bp, Azoarcus sp
  CDS (1)..(1029): transl_table=11
atgatcaagattggtgtggtcggtggaacgggatataccggagtggaactgttgaggctgcttgcccgccaccccgaggcgaacctggttgcgataacctcgcgcggcgacgccggtatgcccgtttgcgacatgtttccgagtctgcgcggtcgtgtcgatctgcgcttcgtgactccgcaggacgcggcgctcgaccgctgcgatgtagtcttctttgccacgcccaacgggatcgcaatgcagcaggcaagggaactcgtcgatgccggtgtgcggctgatcgatctggcggcggatttccgcatccgggatgttggagaatgggagaagtggtacgggatgaaacacgcttcgccggagctggtggccgaagccgtctacggcttgcccgagcggaaccgcgaacgcattcgttcggcccgcatactggctaatccaggttgctacccgaccgcggtccaactgggctttctgccgttggtcgaggccggagtggtggatctgtcgcatttgatcgcggatgtgaaatccggagtctcgggggcgggacgcaaggcggaagtccatacgttgtttgccgaggcggccgacaacttcaaagcttacgcagtggcggggcaccgccatcttcccgagattcgtcaaggactcgaggcgatggccggacagggtgttggcctcacttttgttccacatttgaccccgatcatccgtggcatccatgcgacgctttacgccaggctttcgacggatgtgaatgtgcagaagctgtttgaagaacggtatcagaacgagctctttgtcgatgttctacccgcaggcagtcatccggaaacccgctcggtgagggcaagcaacctttgccgtgtggccgtccaccggccgcaaggcagcgacgtcgtcgtggtcctgtcggtcatcgataatctcgtcaagggtgccgccggccaagccgtccagtgcatgaacatcatgtttgaactggatgagtcgctcgggctcgatatccttccggtgtccccatag

SEQ ID NO: 47923 - protein, 342 aa, Azoarcus sp
MIKIGVVGGTGYTGVELLRLLARHPEANLVAITSRGDAGMPVCDMFPSLRGRVDLRFVTPQDAALDRCDVVFFATPNGIAMQQARELVDAGVRLIDLAADFRIRDVGEWEKWYGMKHASPELVAEAVYGLPERNRERIRSARILANPGCYPTAVQLGFLPLVEAGVVDLSHLIADVKSGVSGAGRKAEVHTLFAEAADNFKAYAVAGHRHLPEIRQGLEAMAGQGVGLTFVPHLTPIIRGIHATLYARLSTDVNVQKLFEERYQNELFVDVLPAGSHPETRSVRASNLCRVAVHRPQGSDVVVVLSVIDNLVKGAAGQAVQCMNIMFELDESLGLDILPVSP

SEQ ID NO: 47924 - DNA, 1035 bp, Bacillus amyloliquefaciens
  CDS (1)..(1035): transl_table=11
ttgaagataggatttgtaggtgctacaggatatggaggcaccgaacttgtcaggattctttcgcatcatcctcatgcagaggaatgcatactttatcagaccagcggagaagggaatgtctatagcgagggttatcctcatcttaccggcttagcggatctgaagccgattgatatgaatacgatcaaacacgaaatagatatcatgtttctcgctgcgccgcccggagtatcaagtgaattgactccaaagctggcagacgcgtgggttacggttattgatctgtcaggtgatctgaggataaaagaaccggctgaatatgaaaaatggtataaacggacagcggcaccgaaggcggtgattcaagaggcggtatacggtctggcagaactgaatcaactggcaattcaacaggcgaaactcattgccaatccaggctgttttccaacagctgttttgcttggcctcgcgccattggctaaaaagaaactgctcgatgaatctttcgttatcgttgacgcgaagaccggtgtttccggagcgggaagaaaagcatccatgggaactcatttttctgagctgaacgacaattttaaaatttataaagtcaatgaacatcagcacacgccggaaattgagcaggcgctgaatgaatggcagccaggtctcgggcccattacattttcggctcacttggttccgatgacaaggggcatcatggcgacgatgtataccagattaacctgtgacctaaccgcagatgacctgcatgatttatattcggaattttaccaagattcatattttgtgagagtgaggccaaaaggtcagtacccgcaaacgaaagaagtgtacggcagcaatttctgtgatatcggcgtgaccctcgatgagagaacgaacagagtcacgatcgtctcggtaatcgataatttaatgaagggtgccgccggtcaggcagtgcaaaactttaatttgatgaatggctgggatgaagaaactggactcaccatcatcacgccaatttatgcatag

SEQ ID NO: 47925 - protein, 344 aa, Bacillus amyloliquefaciens
MKIGFVGATGYGGTELVRILSHHPHAEECILYQTSGEGNVYSEGYPHLTGLADLKPIDMNTIKHEIDIMFLAAPPGVSSELTPKLADAWVTVIDLSGDLRIKEPAEYEKWYKRTAAPKAVIQEAVYGLAELNQLAIQQAKLIANPGCFPTAVLLGLAPLAKKKLLDESFVIVDAKTGVSGAGRKASMGTHFSELNDNFKIYKVNEHQHTPEIEQALNEWQPGLGPITFSAHLVPMTRGIMATMYTRLTCDLTADDLHDLYSEFYQDSYFVRVRPKGQYPQTKEVYGSNFCDIGVTLDERTNRVTIVSVIDNLMKGAAGQAVQNFNLMNGWDEETGLTIITPIYA

SEQ ID NO: 47926 - DNA, 1038 bp, Bacillus anthracis
  CDS (1)..(1038): transl_table=11
atgaaggtcgcgattattggagcaactgggtatggaggtattgagttaattcggttattagaacaacatccatatttttcgatagcatctctccattctttttcacaagttggcgagtgtataacaaatgtatatccgcattttcaaaatgttcttgttcatacgttacaagaaattgatgtggaggaaatagagaaggaagcagaaattgtatttttagcaaccccagcaggagtatcagcagagttaactcccaaattattagcagtaggcttaaaagtaattgacctatctggagactttcgtatgaaagatcctttcatatatgaacagtggtataaaagggcagctgcaaaagaaggagtccttagggaagctgtatatgggttaagtgaatggaaaaggtccgaaattcaaaaggcaaatttaattgcaaacccgggatgttttgctacagctgcattattagcgatattaccgttagttcgtagcggcataattgaggaagactcaattattattgatgcgaaatcaggagtatctggagcaggcaaaacgccaacaacgatgactcactttcctgagttatatgataacttgcgtatttataaagtaaatgagcatcaacacattcctgagattgagcaaatgctcgcggagtggaatagagaaacgaagccaatcacgtttagtacacatttaataccgatatcacgtgggattatggttacactgtatgcgaaagtaaagcgagaaatggaaatagaacaacttcaacaattatatgaagaagcgtatgaacaatcggcttttattcgaattcgcatgcaaggagagtttccaagtccgaaagaagtgagaggctcaaattattgtgatatggggatagcttacgatgaaagaacaggaagagtgacaattgtttctgttatagacaatatgatgaaaggtgcggctggtcaagcgattcaaaatgcaaatatagtagcgggactagaagaaacgacaggtttacaacatatgccgctttatctataa

SEQ ID NO: 47927 - protein, 345 aa, Bacillus anthracis
MKVAIIGATGYGGIELIRLLEQHPYFSIASLHSFSQVGECITNVYPHFQNVLVHTLQEIDVEEIEKEAEIVFLATPAGVSAELTPKLLAVGLKVIDLSGDFRMKDPFIYEQWYKRAAAKEGVLREAVYGLSEWKRSEIQKANLIANPGCFATAALLAILPLVRSGIIEEDSIIIDAKSGVSGAGKTPTTMTHFPELYDNLRIYKVNEHQHIPEIEQMLAEWNRETKPITFSTHLIPISRGIMVTLYAKVKREMEIEQLQQLYEEAYEQSAFIRIRMQGEFPSPKEVRGSNYCDMGIAYDERTGRVTIVSVIDNMMKGAAGQAIQNANIVAGLEETTGLQHMPLYL

SEQ ID NO: 47928 - DNA, 1038 bp, Bacillus cereus
  CDS (1)..(1038): transl_table=11
atgaaagtcgcgattattggagcaactgggtatggaggtattgagttaattcggttattagaacaacatccatatttttcgatagcatctctccattctttttcacaagttggcgagtgtataacaaatgtatatccgcattttcaaaatgttcttgttcatacgttacaagaaattgatgcggaggaaatagtgaaagaagcagaaattgtatttttggcaaccccggcaggagtatcagcagagttaactccaaaattattagcagtaggtttaaaagtaattgacctatctggagactttcgtatgaaagatcctttcatatatgaacagtggtacaaaagggcagctgcaaaagaagaaattcttagtaaagctgtatatgggctaagtgaatggaaaaggtccgaggttcaaaatgcaaatttaattgcaaatccgggatgttttgctacagctgcattattagcgacattgccattagttcgtagcggcataattgaagaagattccattattattgatgcgaaatcaggagtatctggagcaggaaaaacaccaacaacgatgactcactttcctgagttatacgataacttgcgtatttataaagtaaatgagcatcaacacgttcctgagattgagcaaatgcttgcggagtggaatagggaaacgaagccaatcacgtttagtacacatttaataccgatatcacgtggaattatggttacactttatgcgaaagtaaagcgagaaatggaaatagaacaacttcaaaaattatatgaagaaacgtatgaacaatcggcttttgttcgaattcgtacgcaaggagagtttccaagtccgaaagaagtgaggggctcaaattattgtgatatggggatagcttacgatgaaagaacaggaagagtgacagtcgtttctgttatagacaatatgatgaaaggtgcggctgggcaagcaattcaaaatgcaaacataatagcgggactagaagaaacaacaggtttacaacatatgccgctttatctataa

SEQ ID NO: 47929 - protein, 345 aa, Bacillus cereus
MKVAIIGATGYGGIELIRLLEQHPYFSIASLHSFSQVGECITNVYPHFQNVLVHTLQEIDAEEIVKEAEIVFLATPAGVSAELTPKLLAVGLKVIDLSGDFRMKDPFIYEQWYKRAAAKEEILSKAVYGLSEWKRSEVQNANLIANPGCFATAALLATLPLVRSGIIEEDSIIIDAKSGVSGAGKTPTTMTHFPELYDNLRIYKVNEHQHVPEIEQMLAEWNRETKPITFSTHLIPISRGIMVTLYAKVKREMEIEQLQKLYEETYEQSAFVRIRTQGEFPSPKEVRGSNYCDMGIAYDERTGRVTVVSVIDNMMKGAAGQAIQNANIIAGLEETTGLQHMPLYL

SEQ ID NO: 47930 - DNA, 1038 bp, Bacillus halodurans
  CDS (1)..(1038): transl_table=11
gtgaaggttggtattgtcggtgcaacaggctacggaggactagaactcattcgtctgttatcgcagcatccgaacgttgaggaaatcatctgctattcatcatcacaagaagggttaccgttagatgacatgtatccgcacctttctggaaacgtgcgctggacgttaaaggcaatcgatccagaagcgatacgcgcggacgtggataccgtgtttttagcgacaccacctggagtatcgggagagttgacacctgatcttgtgaaattaggcctgaaggtgatcgatttatctggtgatttgcgaataaatgaaccagatgtctatgaagcttggtataagcgacaagcggctccagtgggaacgatccgaggcgctgtatacggattaaccgaatggcaacgtgacgaaatagcagcggcccaaatcattgccaatccaggttgctatccaacggctgtcctgctcgggttagcgccattagtacaacagaaatggattgacccgaaacgaatcattattgatgcgaaatcaggaacatcaggggctggacgaaacccttcgcagattacccattttagtgagatgaacgaaaactttaaaatctatcaagtgaaccagcacaaacatacaccggagattgagcaacaattgcgcaactgggatgagtcggtcggcaatgttaccttctctacacatctcgtcccaatggttcgaggaattatggcgaccatttatgctgaggctaatcaagcaatctctgaaaaggaattgcgcgaacattttgcgtacgtgtatgagacgtcaccgttcgttcatgtgtactcagaggggcgttacccagcaacgaaagaagtgtttgggagcaatcgttgtcacatcggcgtgacttatgatgagcggacgaatcgaatcacggtcgtttcggtgattgataatttggtgaaaggtgctgcagggcaagcgatacaaaactacaacgtaatgaacggatatgaggaaacattgggcttggaaggctctcccctatacccgtga

SEQ ID NO: 47931 - protein, 345 aa, Bacillus halodurans
MKVGIVGATGYGGLELIRLLSQHPNVEEIICYSSSQEGLPLDDMYPHLSGNVRWTLKAIDPEAIRADVDTVFLATPPGVSGELTPDLVKLGLKVIDLSGDLRINEPDVYEAWYKRQAAPVGTIRGAVYGLTEWQRDEIAAAQIIANPGCYPTAVLLGLAPLVQQKWIDPKRIIIDAKSGTSGAGRNPSQITHFSEMNENFKIYQVNQHKHTPEIEQQLRNWDESVGNVTFSTHLVPMVRGIMATIYAEANQAISEKELREHFAYVYETSPFVHVYSEGRYPATKEVFGSNRCHIGVTYDERTNRITVVSVIDNLVKGAAGQAIQNYNVMNGYEETLGLEGSPLYP

SEQ ID NO: 47932 - DNA, 1038 bp, Bacillus thuringiensis subsp
  CDS (1)..(1038): transl_table=11
atgaaggtcgcgattattggagcaactgggtatggaggtattgagttaattcggttattagaacaacatccatatttttcgatagcatctctccattctttttcacaagttggcgagtgtataacaaatgtatatccgcattttcaaaatgttcttgttcatacgttacaagaaattgatgtggaggaaatagagaaggaagcagaaattgtatttttagcaaccccagcaggagtatcagcagaattaactccaaaattattagcagtaggtttaaaagtaattgatttatctggagactttcgtatgaaagatcctttcatatatgaaaagtggtataaaagggtagctgcaaaagaaggagttcttagggaagctgtatatggattaagtgaatggaaaaggtacgaaattcaaaaggcaaatttaattgcaaacccgggatgttttgctacagccgcattattagcggtgttgcctttagttcgtagcggcataattgaagaagattcaattattattgatgcgaaatcaggagtatctggagcaggcaaaacgccaacaacgatgactcactttcctgagttatacgacaacttgcgtatttataaagtaaatgagcatcaacacgttcctgagattgagcaaatgctcacggagtggaatagagaaacgaagccaatcacgtttagtacacatttaataccgatatcacgtgggattatggttacactgtatgcgaaagtaaagcgagaaatggaaatagaacaacttcaacaattatatgaaaaagcgtatgaacaatcggcttttgttcgaattcgcatgcaaggagagtttccaagtccgaaagaagtgagaggctcaaattattgtgatatggggatagcttacgatgaaagaacgggaagagtgacagtcgtttctgttatagacaatatgatgaaaggtgcggctgggcaagcgattcaaaatgcaaatatagtagcgggactagaagaaacaacaggtttacaacatatgccgctttatttataa

SEQ ID NO: 47933 - protein, 345 aa, Bacillus thuringiensis subsp
MKVAIIGATGYGGIELIRLLEQHPYFSIASLHSFSQVGECITNVYPHFQNVLVHTLQEIDVEEIEKEAEIVFLATPAGVSAELTPKLLAVGLKVIDLSGDFRMKDPFIYEKWYKRVAAKEGVLREAVYGLSEWKRYEIQKANLIANPGCFATAALLAVLPLVRSGIIEEDSIIIDAKSGVSGAGKTPTTMTHFPELYDNLRIYKVNEHQHVPEIEQMLTEWNRETKPITFSTHLIPISRGIMVTLYAKVKREMEIEQLQQLYEKAYEQSAFVRIRMQGEFPSPKEVRGSNYCDMGIAYDERTGRVTVVSVIDNMMKGAAGQAIQNANIVAGLEETTGLQHMPLYL

SEQ ID NO: 47934 - DNA, 1038 bp, Bacillus licheniformis
  CDS (1)..(1038): transl_table=11
ttgaaaataggtattataggtgctactggctatggaggggcagaaatcatgaggattatgaggactcacccttatgcagatgaatgcatattgtattcatcgagtgatgagggagcccgctatgacgccgcatacccgcaccttgtgaaactgacagatcaacacctgcaaccgatcgaggttaagaggattgcgaatgaaatcgattttttatttatggcagcgcctccggggatatccagccggctgacgccacagtttgatgcatatgacatacccatcattgatctgtccggcgatctcaggatacagaacccaagcgtctatgaaaagtggtataaaagggaagccgcgcctgaacacgtgcttcaaaaagcggtatacggactgtctgagctgaatcgggaagacattaaaacggcgcagtatatagccaatccaggatgttttccgacagcggttcttctcggcttggcgccgctcgtcaaaagcggcagcatcaacgaatcttttgtcatcatcgatgcaaaaacaggggtatcgggggcaggcagaaagccgtcgatgggcactcatttttcagaggtcaatgacaattttaaaatatacaaggtaaacgaacaccagcacacgcctgaaatcgagcagactgtcaaacagtggaactccgcatttaaaccgatcacattcagcacgcatttagttccaatgacaagaggcattatggcgaccatctacacagagctgaaagacagcatggatgccgaacagctgcagcttattttttctaaattttataaagattcatactttgtcagagtgagagaaacgggttcgttccctgccacaaaagaggtgtacggcagcaatttttgcgatatcggcgttaccgtcgatgaacggacgaacagagtgacaatcgtgtcagtgatcgataacttgatgaagggagccgcgggtcaagcggttcaaaacttcaacattatgaacggcttgagcgaaaccgccgggcttgaatttacgccaatttatccataa

SEQ ID NO: 47935 - protein, 345 aa, Bacillus licheniformis
MKIGIIGATGYGGAEIMRIMRTHPYADECILYSSSDEGARYDAAYPHLVKLTDQHLQPIEVKRIANEIDFLFMAAPPGISSRLTPQFDAYDIPIIDLSGDLRIQNPSVYEKWYKREAAPEHVLQKAVYGLSELNREDIKTAQYIANPGCFPTAVLLGLAPLVKSGSINESFVIIDAKTGVSGAGRKPSMGTHFSEVNDNFKIYKVNEHQHTPEIEQTVKQWNSAFKPITFSTHLVPMTRGIMATIYTELKDSMDAEQLQLIFSKFYKDSYFVRVRETGSFPATKEVYGSNFCDIGVTVDERTNRVTIVSVIDNLMKGAAGQAVQNFNIMNGLSETAGLEFTPIYP

SEQ ID NO: 47936 - DNA, 1035 bp, Bacillus clausii
  CDS (1)..(1035): transl_table=11
atggaagttggcattataggcgcgacaggttatagcggtcttgaattgattcgtctgttgaaaaaccatcctcaagtaacaaatattatgctatattcatcttcgcaaagtggggaaacgatcaaccgtctgtatcctcatttacaaaatgaacaatggaagccgttaaaagaaatcgacttaaacaagatttccgctgaaatcgatgtgatgtttttagcgactcctccaggtgtatccgcagagtggagtggtccgttgcttgaggccgggctgtctgtgattgatttaagtggcgatttgcgtttgaccgaccggggcgtttatgagaaatggtataagcgcccatctgcaaaggaagggcttatagagcaggccatttacggtttaagcgagtggaacaaatcaaccattaaaactgcgaaattgattgccaatcctggttgttttccaacggcggctcttttagcactcatcccgcttattcaagctggtgcaattgagcgtgattcgattgttatcgatgcaaagtcagggacgtctggagccggaaaatcgcctacttcgatgacgcattttagtgaaacaaatgagaattttaaaatctatcaagtcgcttcgcataaacatacgccagagattgagcagcaattggcaaaatggggagcgcagccaccgctgtcttttcaacctcatctcgccccaatggtaagggggattatggcgaccatttacgccaaggcggcaaaacccctcagcaatgagtggttaaccgactgctataacagtgcttatgaaaatgctccttttgtacgaataaaagaaaatggaacgtttccggcaacaaaacatgtttttggcagcaattattgcgatattggcttttgttatgacgagaggacgggacgtgtcattgttgcttctgtcattgataatctcatgaaaggagccgctggccaggcggttcaaaatttcaatctaatgcacggatttgacgaaacagcagggcttgaggccgtgccaatgtatccataa

SEQ ID NO: 47937 - protein, 344 aa, Bacillus clausii
MEVGIIGATGYSGLELIRLLKNHPQVTNIMLYSSSQSGETINRLYPHLQNEQWKPLKEIDLNKISAEIDVMFLATPPGVSAEWSGPLLEAGLSVIDLSGDLRLTDRGVYEKWYKRPSAKEGLIEQAIYGLSEWNKSTIKTAKLIANPGCFPTAALLALIPLIQAGAIERDSIVIDAKSGTSGAGKSPTSMTHFSETNENFKIYQVASHKHTPEIEQQLAKWGAQPPLSFQPHLAPMVRGIMATIYAKAAKPLSNEWLTDCYNSAYENAPFVRIKENGTFPATKHVFGSNYCDIGFCYDERTGRVIVASVIDNLMKGAAGQAVQNFNLMHGFDETAGLEAVPMYP

SEQ ID NO: 47938 - DNA, 969 bp, Bacteroides thetaiotaomicron
  CDS (1)..(969): transl_table=11
atgattaaagcaggaatcattggtggcgcaggatatacagcaggcgaattaatccgtctgctgctcaaccatccggaaactgaaatcgtattcatcaacagcagcagtaatgccggaaaccgaatcaccgacgtacacgaaggactctacggagaaaccgacctgagatttaccgaccagttacctctggacgcaatagatgtactattcttctgtaccgcccacggtgacacgaagaaattcatggaaagccacaacgtgccggaagatttgaaaatcatcgacctctcgatggattatcgcatcaagagtgacgatcatgacttcatctacggtctgccggaactgaaccgtcgtgctacctgtacggcgaagcacgtagccaaccccggttgttttgctacctgcatccagttaggtttgcttccgctagccaagaatctgatgttgacaggcgatgtttcggtcaatgccatcaccggaagtaccggtgccggcgtgaagcccggtgctaccagtcatttcagttggcgtaacaataacatcagtatatacaaggccttcgatcatcagcacgtaccggaaatcaagcaatcactgaagcagttgcagaacagcttcgattcagagatcgactttattccttatcggggagatttcccgcgcggcatctttgccactcttgtcgtaaaaacgaaagttgcactcgaagaaatcgttcgcatgtatgaggaatattatgcaaaagactccttcgtgcatattgtagataagaatatagacttgaaacaagtcgtaaataccaataaatgtctgatacatctggagaaacatggtgacaaattactgattatctcctgtatcgacaacttgctgaagggtgccagcggacaagcagttcataacatgaacctgatgttcaacctggaagaaaccgtaggattacggctgaaaccttccgctttctaa

SEQ ID NO: 47939 - protein, 322 aa, Bacteroides thetaiotaomicron
MIKAGIIGGAGYTAGELIRLLLNHPETEIVFINSSSNAGNRITDVHEGLYGETDLRFTDQLPLDAIDVLFFCTAHGDTKKFMESHNVPEDLKIIDLSMDYRIKSDDHDFIYGLPELNRRATCTAKHVANPGCFATCIQLGLLPLAKNLMLTGDVSVNAITGSTGAGVKPGATSHFSWRNNNISIYKAFDHQHVPEIKQSLKQLQNSFDSEIDFIPYRGDFPRGIFATLVVKTKVALEEIVRMYEEYYAKDSFVHIVDKNIDLKQVVNTNKCLIHLEKHGDKLLIISCIDNLLKGASGQAVHNMNLMFNLEETVGLRLKPSAF

SEQ ID NO: 47940 - DNA, 1095 bp, Bifidobacterium longum
  CDS (1)..(1095): transl_table=11
atggcgaaatatacagtggccgtggccggtgccacgggctatgccggcggtgaagcgctgcgcattctggccgcgcaccccgacttcgacatcacctgcgtggcaggccattcctcagtgggggagtcgatggccaagcacatgccgcatattccccaactggccaatctggtcgttgaagataccgcgcccgaagtgctgaacgggcatgacgttatcatcctcgcactgccgcacggtgcttcgggcaagctcgcctcgcagctcgatccgaatgccgtggttgtggatttgggcgccgaccatcgcctcgaagaacaggccgcttgggatgagttctacggcggcgatttctatgagcattggacctacggcatgcccgagctcatcaccggcaaagctgcggacggctcctacacccgccagcgtgcggcgcttcctggcaccaagcgcatcgcaggtcctggctgcaacgtcaccgccaccacgctggccctccagcccggcatcgccgaaggactggttgaatcgcaggatatcgtggccgatctggtcgtcggatactcgggtgccggcaagaatctcaagcgcaccaacctgcttgccgccgaggccctgcaatccgccctgccgtattcggtgggcggcaagcaccgccacattcccgaaatcctgcagaacttcgcccacgcggccggcaagagcgcggccgaagccagcgaattcacgctcggcttcacaccgattctcgcccccatgtcccgaggtatcctcgccaccgtgtccgcccgcatgacggacaaggccaagacactgagcgatgaggagattcgcgccgtatggtccaaggcctatgaaggtcaggacttcatggtgctgctgcccgagggcacgctgcccgccaccggcaacatcatcggatccaacgcagcccacctgcaggtcgtcaccgaccgcaaggccggccgcatctacgcttttgccgccatcgacaacctcaaccgtggtaccgccggacaagcggtccaatcactgaacatcgcactaggcctgccggaagacgcgggcctgaccaagatcggagtagcaccgtga

SEQ ID NO: 47941 - protein, 364 aa, Bifidobacterium longum
MAKYTVAVAGATGYAGGEALRILAAHPDFDITCVAGHSSVGESMAKHMPHIPQLANLVVEDTAPEVLNGHDVIILALPHGASGKLASQLDPNAVVVDLGADHRLEEQAAWDEFYGGDFYEHWTYGMPELITGKAADGSYTRQRAALPGTKRIAGPGCNVTATTLALQPGIAEGLVESQDIVADLVVGYSGAGKNLKRTNLLAAEALQSALPYSVGGKHRHIPEILQNFAHAAGKSAAEASEFTLGFTPILAPMSRGILATVSARMTDKAKTLSDEEIRAVWSKAYEGQDFMVLLPEGTLPATGNIIGSNAAHLQVVTDRKAGRIYAFAAIDNLNRGTAGQAVQSLNIALGLPEDAGLTKIGVAP

SEQ ID NO: 47942 - DNA, 1065 bp, Bordetella bronchiseptica
  CDS (1)..(1065): transl_table=11
atggcccaagcatcgaattcgcgcatcaaggttggcatcgtcggcggcaccgggtataccggcgtcgagctgctgcgcctgctgtcgcagcatccccacgtagcgttgaccgccatcacgtcccgcaaggaagacgggctgccggtggccgacatgtatcccaacctgcgcggccgcgtgaagctggccttctcggcgcccgagaaagcctcgctgaccgattgcgacgtggtgttcttcgcaaccccgcatggcgtggccatggcgcaggcggccgaactgctggccgccggcacccgcgtcatcgatcttgctgccgatttccgcctgcaggacacggccgtgttcgagcgctggtacaagattccgcatacctgccccgacatcctggccgactccgtctatggcctggtcgagctcaaccgcgaggccatctccaaggcgcgggtgatcggcaacccgggctgctatcccaccacggtgctgctgggcctggctccgttgatcgagggcggcaagcaactggtcgacgtccagaccctgatcgccgactgcaagtcgggcgtgtcgggcgccggccgcaaggccgaggtgggttcgctgttctccgaggcgagcgacaacttcaaggcctatggcgtggccggccaccgccatcagccggaaatcgtcgcccagctcgagaagctggccggcggcaaggtggggctgacgttcgtgccgcacctggtgcccatgatccgcggcatgttctccacgctgtacgcccgcatcctgccgcaggctcgcgacaccgatttccaggcgctgttcgaggcccgctatgccgacgagccgttcgtcgatgtcatgccggccggcagcctgccggaaacccgttcggtgcgcgcctccaacaacctgcgcatctcggtgcaacggccgggcggcggcgaccagctggtcatcctcgtggtccaggacaacctggtcaagggcgcgtccggccaggccgtgcagaacatgaacctcatgttcggcctgcccgaatccgccggcctggaccaggtcgccatcctgccgtaa

SEQ ID NO: 47943 - protein, 354 aa, Bordetella bronchiseptica
MAQASNSRIKVGIVGGTGYTGVELLRLLSQHPHVALTAITSRKEDGLPVADMYPNLRGRVKLAFSAPEKASLTDCDVVFFATPHGVAMAQAAELLAAGTRVIDLAADFRLQDTAVFERWYKIPHTCPDILADSVYGLVELNREAISKARVIGNPGCYPTTVLLGLAPLIEGGKQLVDVQTLIADCKSGVSGAGRKAEVGSLFSEASDNFKAYGVAGHRHQPEIVAQLEKLAGGKVGLTFVPHLVPMIRGMFSTLYARILPQARDTDFQALFEARYADEPFVDVMPAGSLPETRSVRASNNLRISVQRPGGGDQLVILVVQDNLVKGASGQAVQNMNLMFGLPESAGLDQVAILP

SEQ ID NO: 47944 - DNA, 933 bp, Brucella melitensis
  CDS (1)..(933): transl_table=11
atgaaaccgaaaatcttcatcgatggcgagcacggcacaaccggcctgcaaatccgcacccgtctggccgagcgcgacgatcttgaagtgatctccatcccggaagccgagcggcgcaacaaggatttgcgcgccgactatctgcgcgctgccgatattgcgatcctgtgcctgccggatgatgcttcaaaggaagcggtttctctgctcgaaggccataattccacccgcatcatcgatacgtctaccacccatcgcgtgcacccggactgggcctatggctttgccgaactggcaaagggccagcgcgagcggatcgccgaagcgcgtctcgttgccaatcccggctgttatccgaccggcgcgattgcgcttgtccgtccgctgcgcgatgcggggctgctgcccgccgattatccggtaagcgtcaatgcggtttccggctatacgggtggcggcaagcagctcatcgcccagatggaagacagaaatcacccggattatctggcggcaaacaacttcctctatggccttccgctcaagcacaagcatgtgcctgaattgcaattgcatggccgtctggaccgccgcccgatcttttcgccaagcgtcgggcgcttcccgcagggcatgatcgtacaggttccgctgttcctcagcgaacttgagggatcgccgtcgcttgccaaggttcatgccgtcctgacggagcattatgccggtcaggatattgtcgaggtcgtgccgcttgaggaaagcgcaaaacttccacgtgtcgatgcggaagagcttgctggcaaggacggcatgaagcttttcgtctttggcacagaagatcacggccaggtcaatctggtggcgcttctcgacaatctcggcaagggcgcttcaggtgcggccgtccagaacatgaacctcatgctcggcaagtaa

SEQ ID NO: 47945 - protein, 310 aa, Brucella melitensis
MKPKIFIDGEHGTTGLQIRTRLAERDDLEVISIPEAERRNKDLRADYLRAADIAILCLPDDASKEAVSLLEGHNSTRIIDTSTTHRVHPDWAYGFAELAKGQRERIAEARLVANPGCYPTGAIALVRPLRDAGLLPADYPVSVNAVSGYTGGGKQLIAQMEDRNHPDYLAANNFLYGLPLKHKHVPELQLHGRLDRRPIFSPSVGRFPQGMIVQVPLFLSELEGSPSLAKVHAVLTEHYAGQDIVEVVPLEESAKLPRVDAEELAGKDGMKLFVFGTEDHGQVNLVALLDNLGKGASGAAVQNMNLMLGK

SEQ ID NO: 47946 - DNA, 933 bp, Brucella suis
  CDS (1)..(933): transl_table=11
atgaaaccgaaaatcttcatcgatggcgagcacggcacaaccggcctgcaaatccgcacccgtctggccgagcgcgacgatcttgaagtgatctccatcccggaagccgagcggcgcaacaaggatttgcgcgccgactatctgcgcgctgccgatattgcgatcctgtgcctgccggatgatgcttcaaaggaagcggtttctctgctcgaaggccataattccacccgcatcatcgatacgtctaccgcccatcgcgtgcacccggactgggcctatggctttgccgaactggcaaagggccagcgcgagcggatcgccgaagcgcgtctcgttgccaatcccggctgttatccgaccggcgcgattgcgcttgtccgtccgctgcgcgatgcggggctgctgcccgccgattatccggtaagcgtcaatgcggtttccggctatacgggtggcggcaagcagctcatcgcccagatggaagacagaaatcacccggattatctggcggcaaacaacttcctctatggccttccgctcaagcacaagcatgtgcctgaattgcaattgcatggccgtctggaccgccgcccgatcttttcgccaagcgtcgggcgcttcccgcagggcatgatcgtacaggttccgctgttcctcagcgaacttgagggatcgccgtcgcttgccaaggttcatgccgtcctgacggagcattatgccggtcaggatattgtcgaggtcgtgccgcttgaggaaagcgcaaaacttccacgtgtcgatgcggaagagcttgctggcaaggacggcatgaagcttttcgtctttggcacagaagatcacggccaggtcaatctggtggcgcttctcgacaatctcggcaagggcgcttcaggtgcggccgtccagaacatgaacctcatgctcggcaagtaa

SEQ ID NO: 47947 - protein, 310 aa, Brucella suis
MKPKIFIDGEHGTTGLQIRTRLAERDDLEVISIPEAERRNKDLRADYLRAADIAILCLPDDASKEAVSLLEGHNSTRIIDTSTAHRVHPDWAYGFAELAKGQRERIAEARLVANPGCYPTGAIALVRPLRDAGLLPADYPVSVNAVSGYTGGGKQLIAQMEDRNHPDYLAANNFLYGLPLKHKHVPELQLHGRLDRRPIFSPSVGRFPQGMIVQVPLFLSELEGSPSLAKVHAVLTEHYAGQDIVEVVPLEESAKLPRVDAEELAGKDGMKLFVFGTEDHGQVNLVALLDNLGKGASGAAVQNMNLMLGK

SEQ ID NO: 47948 - DNA, 1005 bp, Buchnera aphidicola subsp
  CDS (1)..(1005): transl_table=11
atgttaaatgtagtaattgttggtgctagtggatatgctggcgcagaattggttaactatatgcaccgtcataggtttgctaatataaaaaaaatatttgtatcaaaaaatagtttaaatatagataaattgttttcggatgttcatcaacaatttaaaaatattgtggatctcagatttgatacaatacgtaattgtactttaattaaaaaaaatattgatgctgtttttttagctacagatcatcgtgttagtcattctcttgttcctttttttttatcgtctaattgtattgtttttgatttgtctgcttcttacagaatgaacaataaaaaagtgtatttggattattatggctttgttcatgaatatgaagaacttttaaaaaattcagtttatggattagcagaatgggaacaagaaaaaattaaaaaagcaaatctgattgcattacctgggtgttatgcaacttgcattcaattagcgctcaaacctcttataaaagaaaatgttctttgcgataaaaatataccaattattaacgctattagtggtgttagtggtgccggtagaaaagcttctttaaataatagtttttgcgaagtaagtttacaaccatataatattttcactcatcgtcatacgcctgaaattatagaaaaattaggtgttccagtaatttttatcccacatttaggccctttttctcgaggtataattgcaactattacatgcaaattaaaacctaatgttaaatcaattgatatacacaatattttcaataaattctataaaaataaaccgttaattcgtatatataaaaaatatttacctagtattaaatcagttgaaaaacaaccattttgtgatattggatttgtaattaaggacgactatatagtaattgtggcagcagaagataatttgttaaagggtgctgctgctcaagcagtacaatgttttaatgttcgttttggtttttctgaaacggaatcaattatttaa

SEQ ID NO: 47949 - protein, 334 aa, Buchnera aphidicola subsp
MLNVVIVGASGYAGAELVNYMHRHRFANIKKIFVSKNSLNIDKLFSDVHQQFKNIVDLRFDTIRNCTLIKKNIDAVFLATDHRVSHSLVPFFLSSNCIVFDLSASYRMNNKKVYLDYYGFVHEYEELLKNSVYGLAEWEQEKIKKANLIALPGCYATCIQLALKPLIKENVLCDKNIPIINAISGVSGAGRKASLNNSFCEVSLQPYNIFTHRHTPEIIEKLGVPVIFIPHLGPFSRGIIATITCKLKPNVKSIDIHNIFNKFYKNKPLIRIYKKYLPSIKSVEKQPFCDIGFVIKDDYIVIVAAEDNLLKGAAAQAVQCFNVRFGFSETESII

SEQ ID NO: 47950 - DNA, 1005 bp, Buchnera aphidicola subsp
  CDS (1)..(1005): transl_table=11
atgttgaatgtgttaattgttggtgctagtggatattctggtgcggaattagttaattatattaaccgtcatatgttttctaaaattaaaaaaatttttgtttcagaaaatagttctcatataggtaaattattttcagaattacatcaagaatttaaaaatattatagatttaccatttgaagcaatcaactatgatactttaattgaaaaagatattgatgctgtttttttagctactgatcatcacgttagttactctcttgtgcccttttttttatctcttaattgtgttgtttttgatttatctggtgcttatagagttaaaaacactgatacttatttaaagtattatggtttttctcatcaacatcaagatatcttaaaacgatctgtatatggattggctgaatggaataagcaagaaattaaaaaagctgaattaattgctgttccaggatgttacgcaacgtgtatacaattggcattaaaacctcttataaaagaaaattttttaaatgatgaatttattccaattattaatgctataagtggtgttagcggagctggtagaaaagctaatattactaatagtttttgtgaagttagtttgcatccatataatgtttttactcatcgtcatactcctgaaattatagagcatttaggtatcccagtgatttttattcctcatttaggttccttttcacgtggaattcttgctagtattacatgtaagttaaaatgtaattttacattccaggatatttataatttatataatacagtttataaagaaaaaccattaattcgagtatatgaaaaaaattttcctagtattaaagctgtggtaaaattacctttttgtgatattggatttatcatccaagataaatatatcgttattatagctgctgaagataatttattgaaaggtgcagctgcacaagctatacaatgttttaatattcgttttggattttctgaaattgaatcaattatttaa

SEQ ID NO: 47951 - protein, 334 aa, Buchnera aphidicola subsp
MLNVLIVGASGYSGAELVNYINRHMFSKIKKIFVSENSSHIGKLFSELHQEFKNIIDLPFEAINYDTLIEKDIDAVFLATDHHVSYSLVPFFLSLNCVVFDLSGAYRVKNTDTYLKYYGFSHQHQDILKRSVYGLAEWNKQEIKKAELIAVPGCYATCIQLALKPLIKENFLNDEFIPIINAISGVSGAGRKANITNSFCEVSLHPYNVFTHRHTPEIIEHLGIPVIFIPHLGSFSRGILASITCKLKCNFTFQDIYNLYNTVYKEKPLIRVYEKNFPSIKAVVKLPFCDIGFIIQDKYIVIIAAEDNLLKGAAAQAIQCFNIRFGFSEIESII

SEQ ID NO: 47952 - DNA, 1029 bp, Campylobacter jejuni
  CDS (1)..(1029): transl_table=11
atgaaaataaaagttgggattttaggagcgagtggttatgcgggaaatgaacttgttcgcattttgcttaatcatcccaaggttgaaatttcttatttgggttcgagttctagcgtggggcaaaattatcaagatctttatcctaacacccctttaaatttatgttttgaaaataaaaatttagatgaacttgaacttgatcttttgtttttggctactccgcataaatttagtgctaaacttttaaatgagaatttattaaaaaagatgaaaatcattgatttaagtgcggattttcgtcttaaaaatcctaaagattatgagctttggtataaattcactcatcctaatcaagagcttttgcaaaatgcggtttatggactttgtgagctttataaagaagagataaaaaaagcaagtttagtggcaaatccaggttgttataccacttgttctatcttaagtctttatccgctttttaaagaaaagatcattgattttagctcagttattattgatgcaaaaagtggagtaagtggagcaggaagaagtgcaaaggtggaaaatcttttttgtgaagttaatgaaaatatcaaagcttataatttagctttgcatcgccatactcctgaaattgaagagcatttaagctatgcggccaaagagaaaatcactctacaatttacccctcatcttgtgcctatgcaaagaggaattttaatcagtgcttatgcaaatttaaaagaggacttgcaagaacaagatatacgcgatatttatacaaaatactatcaaaacaataaattcataaggcttttaccgccgcagtcgcttccgcagactcggtgggttaaatcaagcaattttgcggatataaattttagtgtagatcaacgcacaaagcgtgttattgtgcttggtgctattgataatttaatcaaaggtgcagcaggacaagctgttcaaaatatgaatttaatgtttgattttgatgaagatgaaggacttaaattctttgcaaatttgtaa

SEQ ID NO: 47953 - protein, 342 aa, Campylobacter jejuni
MKIKVGILGASGYAGNELVRILLNHPKVEISYLGSSSSVGQNYQDLYPNTPLNLCFENKNLDELELDLLFLATPHKFSAKLLNENLLKKMKIIDLSADFRLKNPKDYELWYKFTHPNQELLQNAVYGLCELYKEEIKKASLVANPGCYTTCSILSLYPLFKEKIIDFSSVIIDAKSGVSGAGRSAKVENLFCEVNENIKAYNLALHRHTPEIEEHLSYAAKEKITLQFTPHLVPMQRGILISAYANLKEDLQEQDIRDIYTKYYQNNKFIRLLPPQSLPQTRWVKSSNFADINFSVDQRTKRVIVLGAIDNLIKGAAGQAVQNMNLMFDFDEDEGLKFFANL

SEQ ID NO: 47954 - DNA, 1029 bp, Campylobacter jejuni
  CDS (1)..(1029): transl_table=11
atgaaaataaaagttgggattttaggagcgagtggttatgcgggaaatgaacttgttcgcattttgcttaatcatcccaaggttgaaatttcttatttgggttcgagttctagcgtggggcaaaattatcaagatctttatcctaacacccctttaaatttatgttttgaaaataaaaatttagatgaacttgaacttgatcttttgtttttggctactccgcatgaatttagtgctaaacttttaaatgagaatttattaaaaaagatgaaaatcattgatttaagtgcggattttcgtcttaaaaatcctaaagattatgagctttggtataaattcactcatcctaatcaagagcttttgcaaaatgcggtttatggactttgtgagctttataaagaagagataaaaaaagcaagtttagtggcaaatccaggttgttataccacttgttctatcttaagtctttatccgctttttaaagaaaagatcattgattttagctcagttattattgatgcaaaaagtggggtaagtggagcaggaagaagtgcaaaggtggaaaatcttttttgtgaagttaatgaaaatatcaaagcttataatttagctttgcatcgccatactcctgaaattgaagagcatttaagctatgcagccaaaaagaaaatcactctacaatttacccctcatcttgtgtctatgcaaagaggaattttaatcagtgcttatgcaaatttaaaagaggatttgcaagaacaagatatacgcgatatttatacaaaatactatcaaaacaataaattcataaggcttttaccgccgcagtcgcttccgcagactcggtgggttaaatcaagcaattttgcggatataaattttagtgtagatcaacgcacaaagcgtgttattgtgcttggtgctattgataatttaatcaaaggtgcagcaggacaagctgttcaaaatatgaatttaatgtttgattttgatgaagatgaaggacttaaattctttgcaaatttgtaa

SEQ ID NO: 47955 - protein, 342 aa, Campylobacter jejuni
MKIKVGILGASGYAGNELVRILLNHPKVEISYLGSSSSVGQNYQDLYPNTPLNLCFENKNLDELELDLLFLATPHEFSAKLLNENLLKKMKIIDLSADFRLKNPKDYELWYKFTHPNQELLQNAVYGLCELYKEEIKKASLVANPGCYTTCSILSLYPLFKEKIIDFSSVIIDAKSGVSGAGRSAKVENLFCEVNENIKAYNLALHRHTPEIEEHLSYAAKKKITLQFTPHLVSMQRGILISAYANLKEDLQEQDIRDIYTKYYQNNKFIRLLPPQSLPQTRWVKSSNFADINFSVDQRTKRVIVLGAIDNLIKGAAGQAVQNMNLMFDFDEDEGLKFFANL

SEQ ID NO: 47956 - DNA, 954 bp, Caulobacter crescentus
  CDS (1)..(954): transl_table=11
atggcgaacgctcccaaggtcttcatcgacggcgaagccggcaccaccggcctgcagattcgtgagcgtctggtcggtcgcaccgatctgcagctgatctcgatcgatccggacaagcgcaaggacgccgacgcacgcgccgagatgctgaacagcgccgacgcggtgatcctgtgcctgcccgatgacgcggccaaggaagccgtctctctggtcagcaatccgaacacggtgatcatcgacgcctcgaccgcctatcgcacggccgagggctgggcctacggctttgcggagctcgacagcgagcagcgcggcaagatcgcggcctccaagcggatctccaatcccggctgctatccgaccggcgcaatcgccctgacgcggccactggtcagcgccggcatcctgccggccgagctgccggtctcgtacaacgccgtctcgggctataccggcggcggcaaggcgatgatcgcccagttcgaggatgagagcgccgccgaccacacccgggcgccgtacttcatctacggcctctcgctgagccacaagcacgtgccggaaatgcagaagcacggcggtctgctgacccgtccgatcttcacgcccgccgtcggccgctacgcccagggcatgatcgtcgagatgccgctgcatctctcgaccctgaatggcgcgccgtcgctggccgacatccatgcggcgctggtcaagcactacaagggcgaggcgttcgtcgaggtcgcgtcgctggacgaggccaaggcgctgacgaccctggaccccgagggcctgaacggcacgaaccgcctcaagctcttcgtgttcggctcggacgccggaggccaggcgcgtctggtggcgctgctcgacaacctcggcaagggcgcgtccggcgcggcggtgcagaacctgaacatcgcgctcgggctggatgaggccgcaggcctgtag

SEQ ID NO: 47957 - protein, 317 aa, Caulobacter crescentus
MANAPKVFIDGEAGTTGLQIRERLVGRTDLQLISIDPDKRKDADARAEMLNSADAVILCLPDDAAKEAVSLVSNPNTVIIDASTAYRTAEGWAYGFAELDSEQRGKIAASKRISNPGCYPTGAIALTRPLVSAGILPAELPVSYNAVSGYTGGGKAMIAQFEDESAADHTRAPYFIYGLSLSHKHVPEMQKHGGLLTRPIFTPAVGRYAQGMIVEMPLHLSTLNGAPSLADIHAALVKHYKGEAFVEVASLDEAKALTTLDPEGLNGTNRLKLFVFGSDAGGQARLVALLDNLGKGASGAAVQNLNIALGLDEAAGL

SEQ ID NO: 47958 - DNA, 1026 bp, Chlorobium tepidum
  CDS (1)..(1026): transl_table=11
atgaatcatatcccgatgcagaataagaaggttacggtttcggtcatcggcgcttcaggatattcaggagccgagctggtgaagctgctcatgaagcatccgggaatcgttatcgaagagctttacgcccacacccaggcgggcaagcgctttacggagctgtatccgtcgataccctgcgacaagacgttccagacctatgccggacagaccaatagtgatgtttacttgctcgctctcccgcatggcgaggcgttacagctggtgccgggcatcgtggctgccggaaaaaaggtgatcgacctgtcgggcgacttcagactgaaaaacaccgccgagcacaagcgcttttatggcggcgacaagtcggcggaggacgtgctccagtacggaatgccagagctgttccgcgacgaaatcgctggatcgacagcaatcagcaatccgggttgctacgccacgagcatcatcctcggccttgcgcccctcttccttggcggcatggcggggctcgacgtcgagtcggtgaacgtgacagcggtttccggcatttcgggcgcgggtcgaagcgcgaagctcgaactctcgttctcggagatgagcggaaacatgcgagcctacaaggtgggcaagcaccagcacacgcccgagatcatgcagacactcggcacctccgtgaccgatccgtcgttccgcttcgtcttcacaccgatgatcgcgccttatgtccgaggcatctactcggtgctgaacgtgcgcctcgcctcgccggtagccatggagccggtccgcgagctgtatgcgggattctacgccaacgctccgttcgtcaggttgcgcgacggcgtaaccgaggtgagccacgtcgcctacaccaacttctgcgacatcagtctcgctttcgaaagcgacggttcgctggtgatcatcacagccatcgacaacctcgtgaagggcgcggcgggtcaggcggtgcagaacatgaacctgatgctcggcttcggcgaaacaactgctttgctttaa

SEQ ID NO: 47959 - protein, 341 aa, Chlorobium tepidum
MNHIPMQNKKVTVSVIGASGYSGAELVKLLMKHPGIVIEELYAHTQAGKRFTELYPSIPCDKTFQTYAGQTNSDVYLLALPHGEALQLVPGIVAAGKKVIDLSGDFRLKNTAEHKRFYGGDKSAEDVLQYGMPELFRDEIAGSTAISNPGCYATSIILGLAPLFLGGMAGLDVESVNVTAVSGISGAGRSAKLELSFSEMSGNMRAYKVGKHQHTPEIMQTLGTSVTDPSFRFVFTPMIAPYVRGIYSVLNVRLASPVAMEPVRELYAGFYANAPFVRLRDGVTEVSHVAYTNFCDISLAFESDGSLVIITAIDNLVKGAAGQAVQNMNLMLGFGETTALL

SEQ ID NO: 47960 - DNA, 1029 bp, Chromobacterium violaceum
  CDS (1)..(1029): transl_table=11
atggtcaaagttgggatcgttgggggcaccggctacaccggtgttgagttgctgcgtttgctggccaagcacccgcaggcgtgcgtgacggcggtgacctcgcgcaaggatgcgggcattcgcgtcgacgagatgtttcccagcctgcgcggccgcatcgatctcgccttcaccacgccggacgaggcgcgtctggccgagtgcgacgtggtgttcttcgccacgcccaacggcatcgccatgcaggatgccgccgcgctgctggacgccggcgtgcgggtgatcgacctggcggccgatttccgcatcaaggacgtgttcgagtgggagaagtggtacggcatgcagcatgcctcgccgcacctggtggccgacgccgtctacggtctgcccgaggtgaaccgcgaggcgatccgcagcgcccgcctggtggccaatcccggctgctatcccaccgcggtgcaactgggcttcctgcccttgatcgaagccggcgtcatcgatacggccagcctgatcgccgactgcaagtccggcgtgtccggcgccgggcgcaagggcgagatcggcgccctgctggccgaggccggcgattccttcaaggcttatggcgtggccggccatcgccacctgcctgaaatccgccagggtctggcccgcgccagcggcaagccggtgggtctgaccttcgtgccgcatctgacgccgatgatacgcggcatccacgccacgctgtacgccaggctgaccaaggacgtcgatctgcagcggctgttcgagagccgttacgccgatgagtcgtttgtcgatgtgctgccggccggcagccatcccgagacgcgctcggtgcgcggcgccaatctgtgccgcatcgccgtccacaggccgcagggcggcgacacggtggtggtattgtcggtgatcgacaacctggtcaaaggcgcggcgggccaggcggtgcagaacctgaatctgatgttcggtctgccggaaaacgagggtctggatgtggtgccgctgctgccttga

SEQ ID NO: 47961 - protein, 342 aa, Chromobacterium violaceum
MVKVGIVGGTGYTGVELLRLLAKHPQACVTAVTSRKDAGIRVDEMFPSLRGRIDLAFTTPDEARLAECDVVFFATPNGIAMQDAAALLDAGVRVIDLAADFRIKDVFEWEKWYGMQHASPHLVADAVYGLPEVNREAIRSARLVANPGCYPTAVQLGFLPLIEAGVIDTASLIADCKSGVSGAGRKGEIGALLAEAGDSFKAYGVAGHRHLPEIRQGLARASGKPVGLTFVPHLTPMIRGIHATLYARLTKDVDLQRLFESRYADESFVDVLPAGSHPETRSVRGANLCRIAVHRPQGGDTVVVLSVIDNLVKGAAGQAVQNLNLMFGLPENEGLDVVPLLP

SEQ ID NO: 47962 - DNA, 1038 bp, Clostridium acetobutylicum
  CDS (1)..(1038): transl_table=11
atgatacaagctggcataataggtgctacagggtatgcaggagaagttttaacatggttactaaataatcacccaaatgtaaatttagtttttttagcatctcacagccatggtaattcatcctttaattctacctatggtaattttacaaatgtaattgaaaatttatgcatagatgataatgaagttgaagataatttggataatatagatatcctttttactgctctaccttctggaaaaactttttctattgtaaaaaaggccgtagaagaaaaggttaaagtcatagacttaggagcagactacagactaaagtctgccgaggtttataaagaatggtataacattaaccatgagtgtaaaaaacttcttaaagatgccgtatacggtctttctgaaatatacagagaaaaaattaagacttcaaatttaatagcaaatccaggatgttatccaacagcatcctcccttgcacttattcctcttttaaagaataatcttatagatacaagttccataataatagatgctaaatcaggagtatctggtgcaggtagaaaggcttccactaataatttattcatagaatgtaacgatagtattaaagcttatggtgtcgcttcacatagacatacacctgaaatagagcaaactcttactaatgaagctaaagaaaaaataactctaacctttactcctcatttagtacctatgaatagaggcattctttctgtttgctacagcaacttaaagaaagaaatagaattaaatgaagtatatgatatctataaaaaattttataagaatgaaccatttataagaattatagatacattacctgaaacaagatgggttaaaggctctaactactgcgatattgcaataagaatagataaaagaacaaacaaaataatagttttatcagctatcgataatttaatgaagggagctgcaagtcaagccgttcaaaacatgaacataatgtacggtttagctgaaaaaactggaatagatttaacccctatgtttccttaa

SEQ ID NO: 47963 - protein, 345 aa, Clostridium acetobutylicum
MIQAGIIGATGYAGEVLTWLLNNHPNVNLVFLASHSHGNSSFNSTYGNFTNVIENLCIDDNEVEDNLDNIDILFTALPSGKTFSIVKKAVEEKVKVIDLGADYRLKSAEVYKEWYNINHECKKLLKDAVYGLSEIYREKIKTSNLIANPGCYPTASSLALIPLLKNNLIDTSSIIIDAKSGVSGAGRKASTNNLFIECNDSIKAYGVASHRHTPEIEQTLTNEAKEKITLTFTPHLVPMNRGILSVCYSNLKKEIELNEVYDIYKKFYKNEPFIRIIDTLPETRWVKGSNYCDIAIRIDKRTNKIIVLSAIDNLMKGAASQAVQNMNIMYGLAEKTGIDLTPMFP

SEQ ID NO: 47964 - DNA, 1044 bp, Corynebacterium diphtheriae
  CDS (1)..(1044): transl_table=11
atgaatataaaggtagctatcgttggggcgagtggatatgccggaggagaaatccttcggcttttactgcaacatccgttgtatttatcgggtcagctgagcattggagcgctgatgggctcttcaactgttggccagacagttagcgaactcatgccgcatcttcccgaattgtcggatcgtgttgtcgagccgactgatgttgagacactaaaaagtcatgatgtcgtatttttagcgttgccacatgggttttctgcggaaattgctcagcagcttcctgctgaaattacggtgattgactgtgctgcagattttcgacttaaagatcaaaaagactgggatgcgtactatgggggaaaacatgcaggttcatggccgtatggcatcccagaaatgcctgggcatagggatttgattgcatcatcaaagcgtattgcggtgccgggatgttttccgacaggtgcaacgcttgcacttttgccggcaattgccgctcacattattgaacctgacgtttctgttgtctcaattaccggagtgtctggagctggtaaaaaggcatcagttgccatgctgggcgcagagacaatgggttcgttgaaggcctataacgtggccggaaagcatcgacatacccctgagatatcacaaaatcttagtgaatatgcagaccaaaaaattgtcgttagctttactcctgttttggctccgcttcctcgtggaattcttactaccgcaacggcaaagttaactagcgggattacgcttgatgaaattcgggagatctacctcaatgcgtatgagaatgagccctttgttcatatattgccgtcgggccagcagccgcagacccaggcagtcgtaggttccaatatgtgtcacattcaagttgatgcggacgataattcgaaaaaactagtcgttacctctgcgattgacaatctaacaaagggtacagctggggctgcagttcaatgtatgaatttatccctcggggtttccgaaacttcaggtctaccttgtggtggtgttgcgccatag

SEQ ID NO: 47965 - protein, 347 aa, Corynebacterium diphtheriae
MNIKVAIVGASGYAGGEILRLLLQHPLYLSGQLSIGALMGSSTVGQTVSELMPHLPELSDRVVEPTDVETLKSHDVVFLALPHGFSAEIAQQLPAEITVIDCAADFRLKDQKDWDAYYGGKHAGSWPYGIPEMPGHRDLIASSKRIAVPGCFPTGATLALLPAIAAHIIEPDVSVVSITGVSGAGKKASVAMLGAETMGSLKAYNVAGKHRHTPEISQNLSEYADQKIVVSFTPVLAPLPRGILTTATAKLTSGITLDEIREIYLNAYENEPFVHILPSGQQPQTQAVVGSNMCHIQVDADDNSKKLVVTSAIDNLTKGTAGAAVQCMNLSLGVSETSGLPCGGVAP

SEQ ID NO: 47966 - DNA, 1053 bp, Corynebacterium efficiens
  CDS (1)..(1053): transl_table=11
ttggtgcctatgacgatcaaggttgcagtagcaggagccagtggatacgcaggcggcgagattctccgcctcctcctgggccacccggcctatgcatcaggggagctggagatcggcgccctgaccgccgcctccacggtgggcagcacggtggccgagctgatgccccacctgccgcagctggcggaccgggtcatcgaggacaccaccaaggaggtgctcgccggtcatgacgtggtcttcctcggtctgccccacggtttctccgcggagatcgccaaccagctcggccccgaggtcaccgtcatcgactgcgccgcggacttccgtctcaccaacgccgatgactggtcgaagttctacggctccgagcacgccggatcctggccctacggcatccccgagatgcccggccaccgcgaacagctcaagggggccacgcgggtggccgtcccgggatgtttccccaccggcgccaccctcgcgctcctgccggcggtgcaggccgacctcatcgaaccggatatctcggtggtctccatcaccggtgtctccggtgccggcaagaaggcatccgtgccgctgctcggctcggagaccatgggctccctcaaggcctacaacacctccggcaagcaccgccacaccccggagctgacccagaacctgaaggaagtcaccgacaaggatgtcaccatcagctttaccccggtgctggcaccgctgccccgcggcatcctcaccaccgccaccgcaccgctgatcgacggtgtcacccaggagcaggcacggaaggtctatgaggacttctatgtcgatgagcccttcgtgctcgtcctgccggagggtgtccagccccagacccagaacgtggtcgggtccaacatgtgccacgtccagatcgaggtggacaccgtggcccgcaaggtgctggtcacctcggccatcgacaatctcaccaagggcaccggtggtgcggccgtgcagtgcatgaacctcgccctcggcttcgaggagaccgccggtctcccacgcaccggcgtcgcaccctaa

SEQ ID NO: 47967 - protein, 350 aa, Corynebacterium efficiens
MVPMTIKVAVAGASGYAGGEILRLLLGHPAYASGELEIGALTAASTVGSTVAELMPHLPQLADRVIEDTTKEVLAGHDVVFLGLPHGFSAEIANQLGPEVTVIDCAADFRLTNADDWSKFYGSEHAGSWPYGIPEMPGHREQLKGATRVAVPGCFPTGATLALLPAVQADLIEPDISVVSITGVSGAGKKASVPLLGSETMGSLKAYNTSGKHRHTPELTQNLKEVTDKDVTISFTPVLAPLPRGILTTATAPLIDGVTQEQARKVYEDFYVDEPFVLVLPEGVQPQTQNVVGSNMCHVQIEVDTVARKVLVTSAIDNLTKGTGGAAVQCMNLALGFEETAGLPRTGVAP

SEQ ID NO: 47968 - DNA, 1005 bp, Escherichia coli O157
  CDS (1)..(1005): transl_table=11
atgttgaatacgctgattgtgggtgccagcggctacgctggcgcagagctagtgacctgtgtaaatcgccatccgcatatgaacataaccgctttgactgtttcagcgcaaagcaatgatgcgggaaagttaatctccgatttgcatccgcagctaaaaggcatcgttgatctgccgttgcagccgatgtcggatatcagcgagtttagccctggggtggacgtggtgtttctcgccaccgcccatgaagttagccacgatttagcgccgcagtttcttgacgcgggctgcgtggtgttcgacctttccggcgcgtttcgtgttaacgacgccaccttctatgaaaaatattacggctttacccatcaatacccggaactgctggaacaggcagcctacggtctggcggagtggtgcggtaataaattaaaagaagcgaatttgattgcggtgccaggctgttatccgacggcagcacagttggcgctgaaaccgttgattgatgccgatcttcttgacctcaatcagtggccggtgatcaacgccaccagcggcgtgagcggtgcaggacgtaaggcagcgatttcaaatagtttttgtgaagttagcctgcaaccgtatggcgtctttacccatcgccatcaaccagagatcgccacacacctcggtgctgacgttatcttcaccccgcatctgggcaatttcccgcgcggcattctcgaaaccattacctgccgcctgaaaccgggtgtgacccaggcgcaagtggcgcaagcgttacagcaggcgtatgcccataaaccgctggtgcggctgtatgacaaaggcgttccggcgctgaaaaatgttgttgggctaccattttgcgatatcgggtttgccgttcagggcgaacatctgattattgtggcgaccgaagacaacttactgaaaggcgcggcggcacaagcggtacagtgcgccaatattcgtttcggctatgcggaaacgcagtctcttatttaa

SEQ ID NO: 47969 - protein, 334 aa, Escherichia coli O157
MLNTLIVGASGYAGAELVTCVNRHPHMNITALTVSAQSNDAGKLISDLHPQLKGIVDLPLQPMSDISEFSPGVDVVFLATAHEVSHDLAPQFLDAGCVVFDLSGAFRVNDATFYEKYYGFTHQYPELLEQAAYGLAEWCGNKLKEANLIAVPGCYPTAAQLALKPLIDADLLDLNQWPVINATSGVSGAGRKAAISNSFCEVSLQPYGVFTHRHQPEIATHLGADVIFTPHLGNFPRGILETITCRLKPGVTQAQVAQALQQAYAHKPLVRLYDKGVPALKNVVGLPFCDIGFAVQGEHLIIVATEDNLLKGAAAQAVQCANIRFGYAETQSLI

SEQ ID NO: 47970 - DNA, 1005 bp, Escherichia coli O6
  CDS (1)..(1005): transl_table=11
atgttgaatacgctgattgtgggtgccagcggctacgctggcgcagagctagtgacctatgtaaatcgccatccgcatatgaacataaccgctttgactgtttcagcgcaaagcaatgatgcgggaaagttaatctccgatttgcatccgcagctaaaaggcatcgttgatctgccgttgcagccgatgtcggatatcagcgagtttagcccaggggtggacgtggtgtttctcgccaccgcccatgaagtcagccacgatttagcgccgcaatttcttgaagcaggctgtgtggtgttcgacctttccggcgcgtttcgtgttaacgatgtcgccttctatgaaaaatattacggctttacccatcaatacccggaactgctggaacaggcagcctacggtctggcggagtggtgcggtaataaattaaaagaagcgaacttgattgccgtgccaggctgttatccgacggcagcacagctggcgctgaaaccgttgattgatgccgatcttcttgacctcaatcagtggccggtgatcaacgccaccagcggcgtgagcggtgcaggacgtaaggcagcgatttcaaatagtttttgtgaagttagcctgcaaccgtatggcgtctttacccatcgccatcaaccagagatcgccacacacctcggtgctgacgttatcttcaccccgcatctgggcaatttcccgcgcggcattctcgaaaccattacctgccgcctgaaaccgggtgtgagccaggtgcaagtggcgcaagcgttacagcaggcgtatgcccataaaccactggtgcggctgtatgacaaaggcgttccggcgctgaaaaatgtcgttggactgccattctgcgatatcggttttgccgttcagggcgagcatctgattattgtggcgaccgaagacaacttactgaaaggcgcggcggcacaagcggtgcagtgcgccaatattcgtttcggctatgcggaaacgcagtctcttatttaa

SEQ ID NO: 47971 - protein, 334 aa, Escherichia coli O6
MLNTLIVGASGYAGAELVTYVNRHPHMNITALTVSAQSNDAGKLISDLHPQLKGIVDLPLQPMSDISEFSPGVDVVFLATAHEVSHDLAPQFLEAGCVVFDLSGAFRVNDVAFYEKYYGFTHQYPELLEQAAYGLAEWCGNKLKEANLIAVPGCYPTAAQLALKPLIDADLLDLNQWPVINATSGVSGAGRKAAISNSFCEVSLQPYGVFTHRHQPEIATHLGADVIFTPHLGNFPRGILETITCRLKPGVSQVQVAQALQQAYAHKPLVRLYDKGVPALKNVVGLPFCDIGFAVQGEHLIIVATEDNLLKGAAAQAVQCANIRFGYAETQSLI

SEQ ID NO: 47972 - DNA, 1005 bp, Escherichia coli
  CDS (1)..(1005): transl_table=11
atgttgaatacgctgattgtgggtgccagcggctacgctggcgcagagctagtgacctatgtaaatcgccatccgcatatgaacataaccgctttgactgtttcagcgcaaagcaatgatgcgggaaagttaatctccgatttgcatccgcagctaaaaggcatcgttgatctgccgttgcagccgatgtcggatatcagcgagtttagcccaggggtggacgtagtgtttctcgccaccgcccatgaagttagccacgatttagcgccgcagtttcttgaagcgggctgcgtggtgttcgacctttccggcgcgtttcgtgttaacgacgccaccttctatgaaaaatattacggctttacccatcaatacccggaactgttggaacaggcagcctacggtctggcggagtggtgcggtaataaattaaaagaagcgaatttgattgcggtgccgggctgttatccgacggcggcacagctggcgctgaaaccgttgattgatgccgatcttcttgacctcaatcagtggccggtgatcaacgccaccagcggcgtgagcggtgcagggcgtaaagcggccatttcaaacagcttttgtgaagttagcctgcaaccgtatggcgtctttactcatcgccatcaaccagagatcgccacacacctcggtgctgacgttatcttcaccccacatctgggcaatttcccgcgcggcattctcgaaaccattacctgccgcctgaaatcgggtgtgacccaggcgcaagtcgcgcaagtgttacagcaggcgtatgcccataaaccgctggtgcggctgtatgacaaaggcgttccggcgctgaaaaatgtcgttgggctgccattttgcgatatcgggtttgccgttcagggcgagcatctgattattgtggcgaccgaagacaacttactgaaaggcgcggcggcacaagcggtacagtgcgccaatattcgtttcggctatgcggaaacgcagtctcttatttaa

SEQ ID NO: 47973 - protein, 334 aa, Escherichia coli
MLNTLIVGASGYAGAELVTYVNRHPHMNITALTVSAQSNDAGKLISDLHPQLKGIVDLPLQPMSDISEFSPGVDVVFLATAHEVSHDLAPQFLEAGCVVFDLSGAFRVNDATFYEKYYGFTHQYPELLEQAAYGLAEWCGNKLKEANLIAVPGCYPTAAQLALKPLIDADLLDLNQWPVINATSGVSGAGRKAAISNSFCEVSLQPYGVFTHRHQPEIATHLGADVIFTPHLGNFPRGILETITCRLKSGVTQAQVAQVLQQAYAHKPLVRLYDKGVPALKNVVGLPFCDIGFAVQGEHLIIVATEDNLLKGAAAQAVQCANIRFGYAETQSLI

SEQ ID NO: 47974 - DNA, 1005 bp, Erwinia carotovora subsp
  CDS (1)..(1005): transl_table=11
atgctgaatacgctgattgttggtgcaagtggttataccggcgctgagcttgcgctctacctgaaccgtcacccacagatgaacataaccgctttgatggtttctgcgcaaagtgtcgatgcaggaaaattgatttctgatttacatccgcagctcaaaggcatcattgatataccggtaaaaccgctgactgatgctgaagaagcggcgaagggcgtggatgttgtttttctggcgactgaccacaaagtcagccacgatttggccccgatttttctggcggcaggctgcactgtttttgatttgtccggcgcgtttcgcgtacaggatgccgaattttatcgtcgctattatggcttcgaacatcagcacaccgactggctggcaaaagcggtttacgggctggcggaatggcgcgctgaaagcgtaaaacaggcacagctgattgcagtaccgggctgttatccgacggctgcgcagctggcgctgaagccgctgcttgatgctcaactgctgaattcagcccagtggccggtgattaatgccgtgagcggagtgagcggcgcggggcgtaaagcatcactgaccagcagcttctgtgaagtcagcctgcaaccgtatggtattttcaaccaccgccatgagcctgaaatttcaacacatctcggtacgccagtgattttcacgccgcatttgggcaacttcgcccgtggcattctggaaaccatcacttgtcgcctgcagccgggcgtcacccagcaggatgtcgctgaagcctatcacaacgcttatcacgataagccgctggttcgtctgtatgataagggcgttccggcgctgaaatctgttgttggcctgccgttctgcgatatcggtttcgccgttgacggtgagcacctcatcgtggtggcaaccgaagataacctgctgaaaggcgcggcggcacaggctgtgcaatgcatgaacattcgttttggtttccctgaaacccaatcgttaatttaa

SEQ ID NO: 47975 - protein, 334 aa, Erwinia carotovora subsp
MLNTLIVGASGYTGAELALYLNRHPQMNITALMVSAQSVDAGKLISDLHPQLKGIIDIPVKPLTDAEEAAKGVDVVFLATDHKVSHDLAPIFLAAGCTVFDLSGAFRVQDAEFYRRYYGFEHQHTDWLAKAVYGLAEWRAESVKQAQLIAVPGCYPTAAQLALKPLLDAQLLNSAQWPVINAVSGVSGAGRKASLTSSFCEVSLQPYGIFNHRHEPEISTHLGTPVIFTPHLGNFARGILETITCRLQPGVTQQDVAEAYHNAYHDKPLVRLYDKGVPALKSVVGLPFCDIGFAVDGEHLIVVATEDNLLKGAAAQAVQCMNIRFGFPETQSLI

SEQ ID NO: 47976 - DNA, 1035 bp, Geobacillus kaustophilus
  CDS (1)..(1035): transl_table=11
atgaacgtagccattatcggggcgacggggtacagcggcgcggagttgttccgcttgttgcacgggcatccgcatgtgagccgctgcgacgttttctcgtcgtcgcaggacggggttcatgtatcggaaagtttcccgcacgtcggttcggtcgatggtgcggtgttgcataaacttgaaatcgaggcgctttcccgttacgatgcggtctttttcgccacgccgcccggggtgtccggggagtgggcgccggcgctcgtggatcggggagtgaaagtgatcgatttatccggggatttccgtttgaaagacggagcggtgtacgaacaatggtacggacgcgaggcggcgccagcggaatatttgcaaaaggcggtgtacgggctgaccgagtggaatcgggaggcggtgcgcgaggccgtgctcctatccaacccgggctgttatccgacggcgacgctgcttggcttggcgccgcttgtcaaagaaggattgattcaggaagattcgatcatcgttgacgccaagtccggcgtatcgggcgcggggcggaaagcagggcttgggacgcatttttccgaagtgaacgaaaacgtgaaaatttataaagtgaacgtccatcagcacattccggaaattgagcaaacgctgcaaacgtggaatgaagcgatggagccgattacgttcagcacccatttgattccgatgacacggggcattatggcgacgatctatgcgaaggcgaaacaaccgatttcgccaaacgacttggtagatttatataaaacaagttatgaaggttcgccgtttatccgcgttcgcaaggtcgggcaatttccggcgacgaaagaagtgtacggctcaaattattgcgacatcggcctcgcctacgatgaacggacgggacgggtgacggtcgtgtcggtgatcgacaacttaatgaaaggcgctgccgggcaggcggtgcaaaacttcaatttgatgatggggtgggatgaggccgagggcctccaatccttgccgatctatccgtga

SEQ ID NO: 47977 - protein, 344 aa, Geobacillus kaustophilus
MNVAIIGATGYSGAELFRLLHGHPHVSRCDVFSSSQDGVHVSESFPHVGSVDGAVLHKLEIEALSRYDAVFFATPPGVSGEWAPALVDRGVKVIDLSGDFRLKDGAVYEQWYGREAAPAEYLQKAVYGLTEWNREAVREAVLLSNPGCYPTATLLGLAPLVKEGLIQEDSIIVDAKSGVSGAGRKAGLGTHFSEVNENVKIYKVNVHQHIPEIEQTLQTWNEAMEPITFSTHLIPMTRGIMATIYAKAKQPISPNDLVDLYKTSYEGSPFIRVRKVGQFPATKEVYGSNYCDIGLAYDERTGRVTVVSVIDNLMKGAAGQAVQNFNLMMGWDEAEGLQSLPIYP

SEQ ID NO: 47978 - DNA, 1041 bp, Geobacter sulfurreducens
  CDS (1)..(1041): transl_table=11
atgctgaaagtagccgttgtcggagcaagcggatataccggtgtcgaacttctgcgcatcctccattgtcacccggaggtggcggtcacctgcatcacgtcggagcagagcgccggcaagcccgtgtccgacctgtttccgtccctgcgggggcgctacgcccaggtgctggaaaacctcgaaccgatccgggtggcggagaaagcggacatcatcttcacggcactgccccacaaggcggccatggaagtggttcctaccttcctgaagctcggcaagcgggtgatcgacctgtcggccgactatcgcttcaacgatgccgccacatacgagcaatggtacgagccccacatgaatccgcacctcctgcccaaggcggtctacggcctgcctgaagtgcgccgggctgccgtcaagggtgccaagctcgtggccaatcccggctgttatcccacaagcgtgattctcgggctgcaaccgctcctgaagcataagcttatcgaaacggcgggcatcatctccgattcggcctccggtgtttcgggggcagggcgtggggccaaggtggacaatctctactgcgaggtcaacgaggggttcaaggcctacggcgtcggcggcgtccatcgccatacccccgagatggagcaggagctgtcgttgctggctgatgagcggatcactatcacctttaccccccaccttgctcccatggatcgcgggattctctccaccatctacggcaggctgctcactcccgccactaccgccgagctagccgggctctatgccgagttctacgggggcgagcccttcgtgcgggtccttcccgccggcggtgtgccgtccaccgcccatgtgcgcggctctaacttctgtgacattggagtggtcgtggatcagcgtaccggcagggtcatcgtggtttcagccatcgacaacctggtcaagggcgcctcggggcaggcggtgcagaatatgaacatcatgtgcgggctgcccgaagggctcggcctggaggggctggcgctcgtcccctga

SEQ ID NO: 47979 - protein, 346 aa, Geobacter sulfurreducens
MLKVAVVGASGYTGVELLRILHCHPEVAVTCITSEQSAGKPVSDLFPSLRGRYAQVLENLEPIRVAEKADIIFTALPHKAAMEVVPTFLKLGKRVIDLSADYRFNDAATYEQWYEPHMNPHLLPKAVYGLPEVRRAAVKGAKLVANPGCYPTSVILGLQPLLKHKLIETAGIISDSASGVSGAGRGAKVDNLYCEVNEGFKAYGVGGVHRHTPEMEQELSLLADERITITFTPHLAPMDRGILSTIYGRLLTPATTAELAGLYAEFYGGEPFVRVLPAGGVPSTAHVRGSNFCDIGVVVDQRTGRVIVVSAIDNLVKGASGQAVQNMNIMCGLPEGLGLEGLALVP

SEQ ID NO: 47980 - DNA, 1053 bp, Gloeobacter violaceus
  CDS (1)..(1053): transl_table=11
atggccgaaaaattgcgtgtcgggatcgtgggcgcctccgggtacggtggggtacagctggtgcgcctgctactggatcacccgcgcgttgagatcgcttatttgggggcgaaccagaacgccggcacgccctttggtgaactgtatccgcagttggcgcaccgcatcgatcgcgtgtgcgaggcggtcgaactggatcgaatcgtcgaggcgtgctcggtggtgtttctggccacccccaacggcatcgcccacaccctggcgccggggctgctcgccggtggcttgcgggtgttcgatctctcggcggattaccggtttgtcaatctcgaaacctatcagtcctggtacggcggcgatcgccacgacgcggcggtggcccgcgaggcggtctacggtctgccggaactgtaccgcgagcgcatccgcaccgcccggctggtgggctgcccgggatgttacccgaccgcttcgttgctggctgccgcccccctgctcaagcaagggctgatcgatccgcgcagcttgattatcgacgccaaatccggtgtctccggggccgggcgcgccctcaagaccggttcgctctttgccgaggccgacagcagcgtggcggcctacagcgtcgcgcgccaccgccatatcccggagatcgagcaagtttgctcggatctggccggtatgcgcgtgcaggtgcagttcaccccccatttgatcccgatggcgcgaggaatgctcgtgacgctctatgcccaattgcgcgatccggggctggtgagcgaagacatgctcactatctacgaagcgttctaccgccaggcgccggccgtgcgtgtactgggtagcggcatctatccacagaccaagtgggcaagcggcacgaacacctgctttatcggcctggaagtcgaccagcgcaccgagcgggtagtggtgctctctgccctcgacaatctggtgaagggccagtccgggcaggcgatccaggcgatgaatcttacccagggttgggaggagatgctggggctgcccgccatcgggttttacccctga

SEQ ID NO: 47981 - protein, 350 aa, Gloeobacter violaceus
MAEKLRVGIVGASGYGGVQLVRLLLDHPRVEIAYLGANQNAGTPFGELYPQLAHRIDRVCEAVELDRIVEACSVVFLATPNGIAHTLAPGLLAGGLRVFDLSADYRFVNLETYQSWYGGDRHDAAVAREAVYGLPELYRERIRTARLVGCPGCYPTASLLAAAPLLKQGLIDPRSLIIDAKSGVSGAGRALKTGSLFAEADSSVAAYSVARHRHIPEIEQVCSDLAGMRVQVQFTPHLIPMARGMLVTLYAQLRDPGLVSEDMLTIYEAFYRQAPAVRVLGSGIYPQTKWASGTNTCFIGLEVDQRTERVVVLSALDNLVKGQSGQAIQAMNLTQGWEEMLGLPAIGFYP

SEQ ID NO: 47982 - DNA, 1038 bp, Haloarcula marismortui
  CDS (1)..(1038): transl_table=11
atgacgtacacggcaagcgtcgtcggcggctccggcttcaccggcggggaactgcttcgcctgcttgacggccatcccgagttcgaactggcacaggcgaccagccgctcgaaggagaacaagactatcgggcactcgcacccgaaccttcggcactcggacctacgctttagttcgccggaagacctggagtcggtcgacgtgctgttcgctgcgacgccccacggcgtctcgatggagcagatagacgcgtttcaggaggccgccggcacagtcgtcgacctctcggcggacttccgcctcgagagcgaggcccagtacgacgagtggtacgacgggcacacacgcccgaaactcctcgaacagagcgagtacgcgctgccggaactcaaccgcgacaacctcgaaggcgcggacctcatcgcctccggcggctgtaacgccacggcgacaatcctgggcctactcccgctgttcgaggccgacatcctgagcggcgacgagcaaatcgtcgtcgacgtgaaggtcgggtcaagcgagggcggggccggcggcggcgaggcgtcgagccaccccgagcgctcgggcgtcgtccgtccgtacgcgccgacgggccaccgccacgaggccgagatacagcagttcctcggcatcgacgtgtccttcaccgtccacgcggtggacatgatccgcggcgcgagcgcgacctgtcacgtcttccccgaacagcgcgtctcgaagggcgacctctggggtgcctaccgcggcgaatacgaggacgaacccttcgtcgaactcgtcgccggcggcggtggcgtctaccgctaccccgaacccaagtcagttgcagggacgaaccgcgccgaggtcggcttcgaactcgaccccggcaacaagcgactggtcgtgttctcggccatcgacaacatgatgaaagggtcggcggggcaggccgtccacgcggccaacgtcgccctcggcatcgaagagacggcggggctggagttccaggggctccaccccgtcggcgcaccgtaa

SEQ ID NO: 47983 - protein, 345 aa, Haloarcula marismortui
MTYTASVVGGSGFTGGELLRLLDGHPEFELAQATSRSKENKTIGHSHPNLRHSDLRFSSPEDLESVDVLFAATPHGVSMEQIDAFQEAAGTVVDLSADFRLESEAQYDEWYDGHTRPKLLEQSEYALPELNRDNLEGADLIASGGCNATATILGLLPLFEADILSGDEQIVVDVKVGSSEGGAGGGEASSHPERSGVVRPYAPTGHRHEAEIQQFLGIDVSFTVHAVDMIRGASATCHVFPEQRVSKGDLWGAYRGEYEDEPFVELVAGGGGVYRYPEPKSVAGTNRAEVGFELDPGNKRLVVFSAIDNMMKGSAGQAVHAANVALGIEETAGLEFQGLHPVGAP

SEQ ID NO: 47984 - DNA, 1026 bp, Idiomarina loihiensis
  CDS (1)..(1026): transl_table=11
atgcagtatacagcagcgcagtctcagtcagtcgcaataatcggagccagcggttacgtcggcgtcgaactaacccgcttggtgcaacaacatccggcgcttagtcttttgggttgttatgtttctgagcatagcagtgatgcaggctcgttgttgagtgatttacacccacaatatgcacatttagtgaaactctcgttgcagggcttatccagccaaaaaaaagagctcattaaaagctcggctgacacagtgttcctctgcacggatcatggcgtgagtgtggagcttgcgcccgagtttctggctgctggcttgaaagtcatagacctgtccggtggctttcggttaaacgcaactgaagattatccctcattttacggctttgagcatcagcaggactcgtggctacaacaagcggtttatgggttggcggaatggtacccgcaagaaatagctgccgcacagttagttgctgtgcccggttgttaccctacagcggcgttaatggcattgcttccggtaaaacaggcaggcttactcagctgcaacaaaattattattaatgcggtatccggtgtgaccggtgccgggcggaaggccgcgctgacgagtcatggtgcggaactttctttgcaagcgtatgggctgtttgagcatcggcatactccggaaattgctcaacagttacagcatgaggtgttgttcactccgcatttagcgcagtttccgcgcggcattctggcgactgtatatgccgagcttaacgatgatgttagcgacgccgatttagataaagcctatcaatgttatgcagatcagcctttggttcgttttgaaaaacaagcacgaccagccattaagaatgtggtgcagcaaccctttgtggatattggctggcaccggcagggcaaccagcttattgctttttcggccattgataacttgctaaaaggtgctgccagccaggccattcagtgtgtgaacctgcagcttggcttagcacttgaagaggggctgttatga

SEQ ID NO: 47985 - protein, 341 aa, Idiomarina loihiensis
MQYTAAQSQSVAIIGASGYVGVELTRLVQQHPALSLLGCYVSEHSSDAGSLLSDLHPQYAHLVKLSLQGLSSQKKELIKSSADTVFLCTDHGVSVELAPEFLAAGLKVIDLSGGFRLNATEDYPSFYGFEHQQDSWLQQAVYGLAEWYPQEIAAAQLVAVPGCYPTAALMALLPVKQAGLLSCNKIIINAVSGVTGAGRKAALTSHGAELSLQAYGLFEHRHTPEIAQQLQHEVLFTPHLAQFPRGILATVYAELNDDVSDADLDKAYQCYADQPLVRFEKQARPAIKNVVQQPFVDIGWHRQGNQLIAFSAIDNLLKGAASQAIQCVNLQLGLALEEGLL

SEQ ID NO: 47986 - DNA, 1023 bp, Lactococcus lactis subsp
  CDS (1)..(1023): transl_table=11
atgaaaaaagtagcaattgtcggaattagaggttatagcggcttagaactgttccgaattttctattatcatccagaagtagaagtaacaaaaatatatgcaacaagtcattatggagaaaaattatcagaacactttccgcaacttgaaggcttgactgacttgactatcagtgaatttaatgaagaagaaattatggcagaatgtgatgcagttttctttgcaacctcagcgggtgttagtcaaaaattagctttaacgtttattgataataattttcctgtcattgatttatcaggagattttcgattagctgatttagaaatatacaataaatggtataaaaatacaaatttaaaaaatgaatatttattaagcggtcaatataatctggcagacattggtcaagcaaaagctaactatatagcgaatccaggttgctatgcaacagccacactacttgcactttatccgttagttaaaaataagatgattgatttagactcaatcattgtggatgccaagtcaggactttcgggagccggaaaaggtctgtctgacgcgagtcattttgtgaatgttgtcgataatatgtccatgtataaaatcaatagtcatcaacatattccagaaattgctcaacaattgaagatttggaattcaaattttcaagccttgcaattttcaacttctttaattcctgtgagtcgagggatttttgttagtagctatgcaaaagttgcagctgattttgattttgaaacgataaaaaatgcttatgaacaggtctatgcgacaaaaaactttgtcagaattcgacgacaaatgccccacctctcagatgtgattgggaccaatttttgcgatattggattagcttataatccagtgacaaatgttttgtcagttgtttcggtgattgacaatcttatgaaaggggctgccggacaagcagtacaaaattttaatcagttatttggctacgatgaaagtttaggcttgaaatttatgccaagtctttag

SEQ ID NO: 47987 - protein, 340 aa, Lactococcus lactis subsp
MKKVAIVGIRGYSGLELFRIFYYHPEVEVTKIYATSHYGEKLSEHFPQLEGLTDLTISEFNEEEIMAECDAVFFATSAGVSQKLALTFIDNNFPVIDLSGDFRLADLEIYNKWYKNTNLKNEYLLSGQYNLADIGQAKANYIANPGCYATATLLALYPLVKNKMIDLDSIIVDAKSGLSGAGKGLSDASHFVNVVDNMSMYKINSHQHIPEIAQQLKIWNSNFQALQFSTSLIPVSRGIFVSSYAKVAADFDFETIKNAYEQVYATKNFVRIRRQMPHLSDVIGTNFCDIGLAYNPVTNVLSVVSVIDNLMKGAAGQAVQNFNQLFGYDESLGLKFMPSL

SEQ ID NO: 47988 - DNA, 1044 bp, Leifsonia xyli subsp
  CDS (1)..(1044): transl_table=11
atgactttctcggtcgccgtcgccggcgcttccgggtacgcgggcggggagctgctgcgcatcctcgccgatcaccccgatttcgacatccgcaccgtgaccgcccaccagaacgccggtcagccgctcgccgcccaccagccgcatctgcgctcgctggccggcctcaccctctcggagagcacggcggagaatctggcggggcacgatgtggtcttcctcgctctcccgcacgggaagtcgggagagatcgccacacagctgccggcggacactctcgtggtcgactgcggtgcggaccaccggctggaagacccggacgcctgggcggcgttctacggcggcgagcacttcggctcgtgggcctacggcgtcccggagctgccggtcggcgcggggaggcagcgcgagcgcctcgccggggccaagcggatcgcggcgccggggtgcaatgcgagcgcggtgtcgctggcgctcgcccccggcatccacgctgggctgatcgaggacgccgatatcgtctccgtgctcgccgtcgggccctcgggcgcgggcaaagcgttgaagacgatgtacctcgcgagcgagatcctcggttcggcgaacccgtacgcggtcggcgggacgcaccggcacatcccggagatccagcagagcttgcggaaggcgggcgcgctgtcgccgacgatctcgttcataccggtcctggtgccgatgtcccgcggaatcctggcgacctccaccgcccgcgtgaaaccgggcgtcagcgctgcgcaggtgcaggctgcgtgggaggagacgtacgcgggagagccgttcgtgcaggtgctgccggcggggagcgttccgcgcacctcggatgtgctcggcgccaacacggctttgatcggagtcgcactggatgcggctgccggcagggtcgtcgcggtgctcgcgatcgacaatctgtacaagggaaccgccggggcggccatccagtccgccaacatcgccctcggcctcgccgagaccgccggcctgagcgtgaatggagtcgccccgtga

SEQ ID NO: 47989 - protein, 347 aa, Leifsonia xyli subsp
MTFSVAVAGASGYAGGELLRILADHPDFDIRTVTAHQNAGQPLAAHQPHLRSLAGLTLSESTAENLAGHDVVFLALPHGKSGEIATQLPADTLVVDCGADHRLEDPDAWAAFYGGEHFGSWAYGVPELPVGAGRQRERLAGAKRIAAPGCNASAVSLALAPGIHAGLIEDADIVSVLAVGPSGAGKALKTMYLASEILGSANPYAVGGTHRHIPEIQQSLRKAGALSPTISFIPVLVPMSRGILATSTARVKPGVSAAQVQAAWEETYAGEPFVQVLPAGSVPRTSDVLGANTALIGVALDAAAGRVVAVLAIDNLYKGTAGAAIQSANIALGLAETAGLSVNGVAP

SEQ ID NO: 47990 - DNA, 1017 bp, Leptospira interrogans serogroup Icterohaemorrhagiae serovar
  CDS (1)..(1017): transl_table=11
atggcagagattagtattttaggagctgggggattaaccggaaaggaattacttttacttttctcccgccaaaaagaacatgaagtagttcatataacaagcgataaacttgcaggtaaaacaatttcagaagtttttcccgaagtgtcgtttcccaaaaatctagtttttaaaaaacacgaagatattgttcctctaaaatctttagtcgtacttgcagttcctaatgaagtttctgtggaatctgctcctaagtttttagacgctggacataaggtcatagacctttctggagtttacagacttcataatcaagaaatattagaaaaatattataaactaaaacatactcgttttaattatataaacagggcagtatttggtattcctgaaattttcagagatcaattgaaaaacgcggattttgtttctaatcctggatgtttttctacctctgtgattttacctatatttttactaggtcaacttagaaaaaatcttagacctagaattatagtcgattccaaatcaggggtttctggcgcaggaggaaggacagaagattcaggttattcttatacaagcgtatatgaaaattttagagcatataaaattctttcccaccaacacgaaccggaaatccgggaatatgtttattctaaatctggactttccgatccggaggtaatttttactcctcatttacttcctgtttatagagggattctttccacaatcgtattagaatttgattctgaaccagagcaagatcttatttctattttagaaaactcttctttaaatgaaccttttattcgtattttaaaaactcccgaagagattgaattaaaaaaggtgcaacatacaaattttctagacatttcgcttcgtaaaagaggaaacacgttagtcgttgtttctgcactggataatctagtaaaaggtgccgcgggtcaggctttacaaaacatcaatttaatgactggagccaaagaaaccttggggttacttccctaa

SEQ ID NO: 47991 - protein, 338 aa, Leptospira interrogans serogroup Icterohaemorrhagiae serovar
MAEISILGAGGLTGKELLLLFSRQKEHEVVHITSDKLAGKTISEVFPEVSFPKNLVFKKHEDIVPLKSLVVLAVPNEVSVESAPKFLDAGHKVIDLSGVYRLHNQEILEKYYKLKHTRFNYINRAVFGIPEIFRDQLKNADFVSNPGCFSTSVILPIFLLGQLRKNLRPRIIVDSKSGVSGAGGRTEDSGYSYTSVYENFRAYKILSHQHEPEIREYVYSKSGLSDPEVIFTPHLLPVYRGILSTIVLEFDSEPEQDLISILENSSLNEPFIRILKTPEEIELKKVQHTNFLDISLRKRGNTLVVVSALDNLVKGAAGQALQNINLMTGAKETLGLLP

SEQ ID NO: 47992 - DNA, 1017 bp, Leptospira interrogans
  CDS (1)..(1017): transl_table=11
atggcagagattagtattttaggagctgggggattaaccggaaaggaattacttttacttttctcccgccaaaaagaacatgaagtagttcatataacaagcgataaacttgcaggtaaaacaatttcagaagtttttcccgaagtgtcgtttcccaaaaatctagtttttaaaaaacacgaagatattgttcctctaaaatctttagtcgtacttgcagttcctaatgaagtttctgtggaatctgctcctaagtttttagacgctggacataaggtcatagacctttctggagtttacagacttcataatcaagaaatattagaaaaatattataaactaaaacatactcgttttaattatataaacagggcagtatttggtattcctgaaattttcagagatcaattgaaaaacgcggattttgtttctaatcctggatgtttttctacctctgtgattttacctatatttttactaggtcaacttagaaaaaatcttagacctagaattatagtcgattccaaatcaggggtttctggcgcaggaggaaggacagaagattcaggttattcttatacaagcgtatatgaaaattttagagcgtataaaattctttcccaccaacacgaaccggaaatccgggaatatgtttattctaaatctggactttccgatccggaggtaatttttactcctcatttacttcctgtttatagaggaattctttccacaatcgtattagaatttgattctgaaccagagcaagatcttatttctattttagaaaactcttctttaaatgaaccttttattcgtattttaaaaactcccgaagaggttgaattaaaaaaggtgcaacatacaaattttctagacatttcgcttcgtaaaagagaaaacacgttagtcgttgtttctgcactggataatctagtaaaaggtgccgcgggtcaggctttacaaaacatcaatttaatgactggagccaaagaaaccttggggttacttccctaa

SEQ ID NO: 47993 - protein, 338 aa, Leptospira interrogans
MAEISILGAGGLTGKELLLLFSRQKEHEVVHITSDKLAGKTISEVFPEVSFPKNLVFKKHEDIVPLKSLVVLAVPNEVSVESAPKFLDAGHKVIDLSGVYRLHNQEILEKYYKLKHTRFNYINRAVFGIPEIFRDQLKNADFVSNPGCFSTSVILPIFLLGQLRKNLRPRIIVDSKSGVSGAGGRTEDSGYSYTSVYENFRAYKILSHQHEPEIREYVYSKSGLSDPEVIFTPHLLPVYRGILSTIVLEFDSEPEQDLISILENSSLNEPFIRILKTPEEVELKKVQHTNFLDISLRKRENTLVVVSALDNLVKGAAGQALQNINLMTGAKETLGLLP

SEQ ID NO: 47994 - DNA, 1032 bp, Listeria innocua
  CDS (1)..(1032): transl_table=11
atgaaagtttctattattggggcgacaggatacggagggcttgagctaatccgcttgctgcaccagcattcttcggtcgacatagcgacgttacatagtttttccgcacaatcagaaacattggcaaacttttatccgcatttaaaaggtttagaagctagccccttagagaagataaatccagcagaaattatcgaaaaaagcgatacagtttttattgctactccatcgggaatcgcgaaagatgtggccttaccgtacatcgatgccgggcttaatgtgattgatttatccggagactttcgactaaaagataaccagctttacgagaaatggtacgggaaaaaagcagcacctgaggattacttagctaaggcggaatatggtttagcagaatttcgcgataatgaacttgcgacttttattgctaatccaggatgttacgcaacggcgactttgttagggttagctccactcgtgaaaaagcagctaattgatcccacatccattattgtagatgccaaatcaggtatttccggagcgggaaaagtgccatctaaaagcacccattttacagaaacaaatgaaaatatgacactatataaaatgaattcccatcaacacattccggaaattatgcaacaactaacaaaatgggataagagtatccctgcaattcaattttccacttcattaattcccatcacacgaggaatcttcacaaccatctacgttaaacctaaaaatccaattacccagcaagaattacatcaattatacgaatccacctacgagcatgcttcatttgtccgaattcaagcagaaaatacttacccaactgtaaaacaagtaacggcttctaattattgtgatattggccttgcttataatgaaaaaacgaatgtaatcaccatcgtttccgtaatcgataatttagttaagggagcggctggtcaagcaattcaaaatttaaatataatggcgaattttgctgagagtgacggattgggatttattccagtgtatccgtga

SEQ ID NO: 47995 - protein, 343 aa, Listeria innocua
MKVSIIGATGYGGLELIRLLHQHSSVDIATLHSFSAQSETLANFYPHLKGLEASPLEKINPAEIIEKSDTVFIATPSGIAKDVALPYIDAGLNVIDLSGDFRLKDNQLYEKWYGKKAAPEDYLAKAEYGLAEFRDNELATFIANPGCYATATLLGLAPLVKKQLIDPTSIIVDAKSGISGAGKVPSKSTHFTETNENMTLYKMNSHQHIPEIMQQLTKWDKSIPAIQFSTSLIPITRGIFTTIYVKPKNPITQQELHQLYESTYEHASFVRIQAENTYPTVKQVTASNYCDIGLAYNEKTNVITIVSVIDNLVKGAAGQAIQNLNIMANFAESDGLGFIPVYP

SEQ ID NO: 47996 - DNA, 1032 bp, Listeria monocytogenes serotype 4b
  CDS (1)..(1032): transl_table=11
atgaaagtttccattattggtgcaacaggatacggagggcttgagctaattcgcttgcttcatcaacatgcttcggtagacatagcgacgttacatagtttttccgctcaatcagaaacacttgcaaccttttatcctcatttaaaagatttagaagctagccccttagagaaaataaattcagcagaaatcatcgaaaaaagtgataccgtttttattgccacgccttctggaatcgcgaaagatattgctctcccatatgtagatgcaggtttgaatgtcattgatctatccggggactttcgattaaaagacaggcagctttacgaaaaatggtatggaaaaagcgcggctccaatcgagtatatcgctaaggcggaatatggtttagcagaattccgtgataagaaagaagctagattcattgctaatcctggatgttatgcaactgcaacattgttaggtatagcacctctagtgataagccagttgattgatccaacatcgattatcgtagacgctaaatcaggtatttccggcgcaggaaaagtgccctctgcaagtactcattttacagaaaccaatgaaaacatgacactttataaaatgaattctcatcaacatattccagaaattatgcaacaattaactaaatgggatgagactatcccagcaattcaattttctacttcgttaattcccatcacaagaggcatcttcacaaccatctacgttaaacccaaaaatcctatcacccaaaaagagttacatacgctttacaaatccacctacgagaatgctccatttgtccgaatccaaccagaaaatgtatatccgactgtcaaacaagtgacagcatcgaattactgtgatataggtcttgcttataatgaaaaaacgaatgtgattactatcgtttctgtgattgataatttagttaaaggggcggctggtcaggccattcaaaatttaaacataatggcgaattttgctgaaagtgacggattaaggtttattccggtgtatccgtga

SEQ ID NO: 47997 - protein, 343 aa, Listeria monocytogenes serotype 4b
MKVSIIGATGYGGLELIRLLHQHASVDIATLHSFSAQSETLATFYPHLKDLEASPLEKINSAEIIEKSDTVFIATPSGIAKDIALPYVDAGLNVIDLSGDFRLKDRQLYEKWYGKSAAPIEYIAKAEYGLAEFRDKKEARFIANPGCYATATLLGIAPLVISQLIDPTSIIVDAKSGISGAGKVPSASTHFTETNENMTLYKMNSHQHIPEIMQQLTKWDETIPAIQFSTSLIPITRGIFTTIYVKPKNPITQKELHTLYKSTYENAPFVRIQPENVYPTVKQVTASNYCDIGLAYNEKTNVITIVSVIDNLVKGAAGQAIQNLNIMANFAESDGLRFIPVYP

SEQ ID NO: 47998 - DNA, 1032 bp, Listeria monocytogenes
  CDS (1)..(1032): transl_table=11
atgaaagtttcaatcattggcgcgacggggtatggaggacttgagctaattcgcttgcttcatcaacactcttcggtagacatagcgacgttacatagtttttccgctcaagcagaaacgttagcaactttttatccacatttaaaagatttagcagttagccccttagagaaaataaatccaacagaaatcatcgaaaaaagtgacacggtttttatcgcgacgccttctggaatcgcgaaagatattgcactgccatatgtagatgcgggtttgaatgtcattgatttatccggggactttcgattaaaagacaggcaactttacgaaaagtggtacggaaaaagcgcggcgccaaccgagtatatcggtaaggcggaatatggtttagcagaattccgtgaaaagaaagaaactactttcattgcgaatcctgggtgttatgcaactgcaacattgctaggtctcgcaccacttgcaacgaataagttgattgatcccacatctattattgtagacgctaaatcaggtatttccggcgcaggaaaagtgccctcagcaagtacacatttcacagaaaccaatgaaaacatgacgctttataaaatgaattcccatcaacatattccagaaattatgcagcaattaactaaatgggatgaaagtatcccagcaattcaattttctacttcattaattcccatcacaagaggaatcttcacaaccatctacgttaaacccaaaaatcctatcacccaaaaagagttacataagctttacgaatccacctacgataatgctccatttgtccgaatccaaccagagaatgtatatccaactgtcaaacaagtgacagcctcaaattactgcgatataggtcttgcttataacgaaaaaacgaatgtgattactatcgtttctgtgattgataatttagtcaaaggggcggctggtcaggccattcaaaatttaaacataatggcgaattttgctgaaagtgacggattaaggtttattccggtgtatccgtga

SEQ ID NO: 47999 - protein, 343 aa, Listeria monocytogenes
MKVSIIGATGYGGLELIRLLHQHSSVDIATLHSFSAQAETLATFYPHLKDLAVSPLEKINPTEIIEKSDTVFIATPSGIAKDIALPYVDAGLNVIDLSGDFRLKDRQLYEKWYGKSAAPTEYIGKAEYGLAEFREKKETTFIANPGCYATATLLGLAPLATNKLIDPTSIIVDAKSGISGAGKVPSASTHFTETNENMTLYKMNSHQHIPEIMQQLTKWDESIPAIQFSTSLIPITRGIFTTIYVKPKNPITQKELHKLYESTYDNAPFVRIQPENVYPTVKQVTASNYCDIGLAYNEKTNVITIVSVIDNLVKGAAGQAIQNLNIMANFAESDGLRFIPVYP

SEQ ID NO: 48000 - DNA, 1011 bp, Methanosarcina acetivorans
  CDS (1)..(1011): transl_table=11
atcaaggtaggaattataggagcttccggatacacaggaggagaactcctgcgcttacttgtaagccaccccgatgtcaggcttgagctagcaacttcccggagtcttgcaggaaaacccgtatcaagcacccataggcatctcaccggttttctggacttaaagtatgaaaatccggtttccgaagaaatcagggagcgctgtgatgtggtctttgtggcggtgcctcacgggactgctatgaattatgtccccgaactgctcgacggcagtacaaaggtaatcgacctcagcgcagactacaggcttgatactcctgtatttgaaaatatttatgggatcaagcacagcgaccccaggaaggcagtttacgggttagtagaacttcaccctgaagctgccagggaagagtttgtggcaaaccctggctgttttcctaccggagcaaaccttgcagcagctcctctcgcggcagcaggtttaatagatattgcagtctttgattccaaaacagggatttcaggtgccgggatctcgccgacggaaacctctcattatccgaacatcgcagaaaatattatcccctataagcttactgcccacaggcatagggctgagattttacaggagctaaccaggctggacggaaagcttaggaatatcagcttcactccccatgtgatcccgtccatcaggggaatccttacgactgcccacctctttacaaaagagcctctctcgaccggagatgtgcaggaaatttatgaggaattttacagggacaaacccttcgtccggcttccgggaggagtcccgtcccttaccgcagtcagggggtctaacttctgtgatatcggttttgaagcagataaagagaataacagggttgtggtgctctcggcaatcgataatcttgtcaaaggcgcatcagggcaggctatccagaacatgaaccttatgttcggactggctgagacccgtgggctctggctgcctgcagcagctccgtaa

SEQ ID NO: 48001 - protein, 336 aa, Methanosarcina acetivorans
MKVGIIGASGYTGGELLRLLVSHPDVRLELATSRSLAGKPVSSTHRHLTGFLDLKYENPVSEEIRERCDVVFVAVPHGTAMNYVPELLDGSTKVIDLSADYRLDTPVFENIYGIKHSDPRKAVYGLVELHPEAAREEFVANPGCFPTGANLAAAPLAAAGLIDIAVFDSKTGISGAGISPTETSHYPNIAENIIPYKLTAHRHRAEILQELTRLDGKLRNISFTPHVIPSIRGILTTAHLFTKEPLSTGDVQEIYEEFYRDKPFVRLPGGVPSLTAVRGSNFCDIGFEADKENNRVVVLSAIDNLVKGASGQAIQNMNLMFGLAETRGLWLPAAAP

SEQ ID NO: 48002 - DNA, 1128 bp, Methanococcus jannaschii; identical to SEQ ID NO: 47578
  CDS (103)..(1128): transl_table=11

SEQ ID NO: 48003 - protein, 341 aa, Methanococcus jannaschii
MKEVAIIGATGYTGAELLRLLANHEKVNVTYITSRKEAGKHVFKVHPHLKGIEKYKNLCFTGDIDKVDAYLVFTATPHGASMDIVPDFIERGMKVIDLSGDYRFEDLSLYEKYYKIKHKGLPDVKIAYGLPELHREEIKEAQLVANPGCFPTGAILAVAPLVKENIIEERIIFDSKTGVSGAGIKPTETTHFPNVNENINPYKITTHRHTPEIEKELKKLGKAKVSFTPHLAPITRGILTTAHTFLAKDVDREEIIKIYEKFYGSEVFVRIFSEEIPKLTWVRGTNFCDIGGFEIDEHGRLVVISAIDNLVKGASGQAIQNMNIMFGFDEKEGLFDVGLNP

SEQ ID NO: 48004 - DNA, 1032 bp, Methanopyrus kandleri
  CDS (1)..(1032): transl_table=11
gtggtcgtggtcggcatcgtgggtgcatcaggttacaccggaggcgagctccttagactcctcgcccgacacccggaggtggaagaggtccgctacgcgacctccaggaggctcgagggaaagccagtctggaaggtacacccgaacctgcggcgtgactaccccgacctcgagttctcggaccctgatcccgttgaaatcggcgaagactgcgacgtcgtattcaccgccgtcccacacaccgccgccatggagctggtcccggatctactggaaggaggggccgtggtgatcgatctcagcgccgatttccggttcgacgacgtggatgtctacgaggagtggtacggcgtcgaacacgcggctccggagctgaacgacgaggccgtttacgggctgcccgagctacaccgggacgagatacggcgcacagacctcatcgccaacccggggtgctacccgacaggcgctatcctggccgccgcaccgctagtcgaggaagggctcgtcgacgtcgtgatcttcgactccaagagcggtacctccggggccggtgcgaagccttcggaggtcacccaccacccggagtgcgccgaggacctgacaccctacaacccgacggatcaccgtcacttacccgaaatacggcaggagctggggaagttgggcgacgtcgaggttcacttcaccccgcacctggcgccgctcgtccggggtatcgagaccacggcccacggtctaggggatgtagagatcgagccgaaggagctccgggagctttacgtggaatactacgacggtgagcctttcatccgtgtctgcgaggtcggtgaggctccgcggctctgggccgtccgtgggaccaactactgcgacgtgggcgtcttcgcggtaggtgatggcagggtcgtcgtagcgtcggcgatcgacaacctcaccaagggcgcgtccggtcaggcgattcagaacatgaacgtgaggttcgggttcgaggagaccgcggggttagaggagcccgggtatcatccctga

SEQ ID NO: 48005 - protein, 343 aa, Methanopyrus kandleri
MVVVGIVGASGYTGGELLRLLARHPEVEEVRYATSRRLEGKPVWKVHPNLRRDYPDLEFSDPDPVEIGEDCDVVFTAVPHTAAMELVPDLLEGGAVVIDLSADFRFDDVDVYEEWYGVEHAAPELNDEAVYGLPELHRDEIRRTDLIANPGCYPTGAILAAAPLVEEGLVDVVIFDSKSGTSGAGAKPSEVTHHPECAEDLTPYNPTDHRHLPEIRQELGKLGDVEVHFTPHLAPLVRGIETTAHGLGDVEIEPKELRELYVEYYDGEPFIRVCEVGEAPRLWAVRGTNYCDVGVFAVGDGRVVVASAIDNLTKGASGQAIQNMNVRFGFEETAGLEEPGYHP

SEQ ID NO: 48006 - DNA, 1023 bp, Methanosarcina mazei
  CDS (1)..(1023): transl_table=11
gtgaataccatgatcaaggcaggaattataggagcttccggatatacaggaggagaactcctgcgcttacttgtaagccaccccgatgtcagtcttgaactggcgacctcccggagtcttgcaggaaaacccgtagcaagcactcacaggcacctcgaaggctttctggacctgaagtacgaaaaccccgggcttgaagaaatcagggagcgttgtgacttggtttttttggcggtgcctcacgggaccggtatgaattacgtccccgaactgctcgacggtagcacaaaggtaatcgacctcagcgcggactacaggcttgatattccggtatttgaaaaaatttatggaataaaacacagcgacccgaggaatgcagtgtacgggcttgtagaacttcaccctgaagcagccagagaatattttgtggcaaatccgggctgtttccctacaggagcgattctctcagcagccccgcttgcagcagccgggctgatagatatcgcggtattcgactccaaaacagggatttcaggggcaggaatttctccaactgaaacctcgcattacccgaatcttgcagaaaatattgtcccgtataaacttacagctcacaggcacagggctgagatcgtacaggaactaacgaggcttgacggaaatctccgaaacatcagcttcactccgcatgtaatcccaaccatcagagggatctctacaactgcacacctctttacaaaagagcctctttcgaccgaagatgtcaggggaatttatgaggagttttacagggataagccttttgtccggctcccgggaggagtcccgtcccttactgcggtcaggggttctaacttctgtgatattggctttgaagcagataaagagaataacagggttgttgtactctcggcaatcgataatcttgtcaaaggcgcatccgggcaggctatccagaacatgaaccttatgttcgggctggttgagacccgcggtctctggacgcctgccacagctccataa

SEQ ID NO: 48007 - protein, 340 aa, Methanosarcina mazei
MNTMIKAGIIGASGYTGGELLRLLVSHPDVSLELATSRSLAGKPVASTHRHLEGFLDLKYENPGLEEIRERCDLVFLAVPHGTGMNYVPELLDGSTKVIDLSADYRLDIPVFEKIYGIKHSDPRNAVYGLVELHPEAAREYFVANPGCFPTGAILSAAPLAAAGLIDIAVFDSKTGISGAGISPTETSHYPNLAENIVPYKLTAHRHRAEIVQELTRLDGNLRNISFTPHVIPTIRGISTTAHLFTKEPLSTEDVRGIYEEFYRDKPFVRLPGGVPSLTAVRGSNFCDIGFEADKENNRVVVLSAIDNLVKGASGQAIQNMNLMFGLVETRGLWTPATAP

SEQ ID NO: 48008 - DNA, 1032 bp, Methanococcus maripaludis
  CDS (1)..(1032): transl_table=11
atgaaaacagtttcgataataggcggaacggggtatacgggctcagaacttttaagactcctttcaaaccacgacgaagttgaagttgtgaatgtaacatcaagaaaggaagctggaaaaaatctcactgattatcaccctcaggtcagaaatttaagtaactataacgatttaaaattccaaaatattgctccagaagatatcgattctgatatcgtgttctgtgcaacaccacacggtgcgtcaatggcaattgtcccgacactgcacgaaaaaggaataaatgtaatcgatttaagcggggattacaggtttgaagatattgatatgtatgaatcatggtatggattgaaacactctggaaaaatagattctgcagtttacggccttcctgaacttcaccgggaaaaaataaaaaagtcaaaaacaattgcaaatccgggatgctacccaacaggagcaattctttcaatggcgccattggttgcaaatgatctcgttgaagacaggataatttttgattcaaaatcgggagtaagtggtgcaggtgtcgaagcaagtcaaactacccattttgcaaatgtaaatgaaaatatcggaccctacaaaataacgaaacacagacacagtcccgaaattggaaaagagcttcaatatcttgcaaacaaaaatttgaaagtttcatttactcctcaccttctgccagttacacggggaatattaactactgcgcattcattccttaaagaggatataagtccaatagatgttatcgaaatttacgaagaattctacaaagacgaatttttcataagaattttcgaagaaggaatgccttcattaacgggagttcgaggaaccaacttctgcgacattggcggatttgaaattgaccaatatggcagaattgttgtagtttcagcaatagacaatttagtaaaaggagcaagtggtcaagcaatccagaacatgaatattatcatgggattcgatgaaaaagagggtttaggcgttggcgggcttaagccttaa

SEQ ID NO: 48009 - protein, 343 aa, Methanococcus maripaludis
MKTVSIIGGTGYTGSELLRLLSNHDEVEVVNVTSRKEAGKNLTDYHPQVRNLSNYNDLKFQNIAPEDIDSDIVFCATPHGASMAIVPTLHEKGINVIDLSGDYRFEDIDMYESWYGLKHSGKIDSAVYGLPELHREKIKKSKTIANPGCYPTGAILSMAPLVANDLVEDRIIFDSKSGVSGAGVEASQTTHFANVNENIGPYKITKHRHSPEIGKELQYLANKNLKVSFTPHLLPVTRGILTTAHSFLKEDISPIDVIEIYEEFYKDEFFIRIFEEGMPSLTGVRGTNFCDIGGFEIDQYGRIVVVSAIDNLVKGASGQAIQNMNIIMGFDEKEGLGVGGLKP

SEQ ID NO: 48010 - DNA, 1149 bp, Methanobacterium thermoautotrophicum; identical to SEQ ID NO: 47580
  CDS (145)..(1149): transl_table=11

SEQ ID NO: 48011 - protein, 334 aa, Methanobacterium thermoautotrophicum
MISVGIIGASGYTGGELLRLLENHREVEVVSATSRQYSGVPVSRVHPHLQDTDLKFEDVGAGEIDADLVFTATPHGASMKIVPQLIERGIRVVDLSGDYRFDDTETYEEWYGIKHESPLEAVYGLPEIHREEIASADLVANPGCFPTGAILACLPLVYEKIADTFIIDSKTGVSGAGVKPTALTHYPHCSDNVIPYNVTGHRHTPEIRQELSRLNPVRLSFTPHLVPVTRGILTTAHTFLLEDLEQGEIADIFMGFYDGEPFVRVVEGIPGLSAVRGSNFCQIGCFEVDDNQRAVIVSAIDNLVKGASGQAIQNMNIMFGFREVEGLDFPGMYP

SEQ ID NO: 48012 - DNA, 1011 bp, Moritella abyssi
  CDS (1)..(1011): transl_table=11
atgttaaaaacaattttagtcggtgcgaccgggtataccggtgctgagctagcccattacataaccaaacatccagaactggaattagcaggtctgtatgtttcagaacacagtttagatgcaggaaaaccgttttcttcattatatggacatttattaggtgttgttgaccaaacgattcaacctttagccctaagcaacattaaacatatttgtgatgatgttgatattgttgtgttagcaactgcacatgaagtgagccatgatattgccgctgaatttttggcgcagggtactgtggtatttgatttatccggtgcatttagagtgaatgatccggctttttatgaaaagtattacggttttaaacataacttcgataaagaattaaaaagtgctgtttatggtttagctgaatgggcaagtgccgatatcgctgaagcaaatttaattgctgtaccagggtgctatccaacggcgtcgttatcagcactaaaaccattagcacaacacggtcttatcgctgcagagcaaaaacctattattaatgccgtgagtggcgtgagtggtgcagggcgtaaagcgtcattggcttctgctttttgcgaagtgagccatgccccttatggtgtgtttaatcaccgtcatcaacctgagatcagtacgcatttaggtcacgaggttatttttacgccgcacttaggtagctttaagcgtggtattttagccacgattaacgtcaaacttgttgctggtgtaacaccggaacaagtcactgcagcttatcaagaagcctatcaagatcaacctatggtacggttattaccgagacgcacgccaagtattaaagcagtagagaaaaccgcttattacgatctagcatggcaacaacaaggccaagacctgattgttgtgtcggcgattgataacttattaaaaggtgccgcagcgcaagcaatgcagtgcatcaatatccgttttggtttcgccatgacaacctcgttagtataa

SEQ ID NO: 48013 - protein, 336 aa, Moritella abyssi
MLKTILVGATGYTGAELAHYITKHPELELAGLYVSEHSLDAGKPFSSLYGHLLGVVDQTIQPLALSNIKHICDDVDIVVLATAHEVSHDIAAEFLAQGTVVFDLSGAFRVNDPAFYEKYYGFKHNFDKELKSAVYGLAEWASADIAEANLIAVPGCYPTASLSALKPLAQHGLIAAEQKPIINAVSGVSGAGRKASLASAFCEVSHAPYGVFNHRHQPEISTHLGHEVIFTPHLGSFKRGILATINVKLVAGVTPEQVTAAYQEAYQDQPMVRLLPRRTPSIKAVEKTAYYDLAWQQQGQDLIVVSAIDNLLKGAAAQAMQCINIRFGFAMTTSLV

SEQ ID NO: 48014 - DNA, 1011 bp, Moritella profunda
  CDS (1)..(1011): transl_table=11
atgttaaaaacaattttagtcggtgcaaccggatatactggtgctgagctagcccattacattactaaacatccagagcttgaattagcaggtctgtatgtgtcagaacacagtttagatgcaggaaaaccgttttcttcattatatggccatttattaggtgttgttgaccaaacgattgaacctttagctgttagcaacataaaaaacatttgcgatgacgttgatatcgttgtgttagcgactgcgcatgaagtcagtcatgatattgctgctgagtttttagcgcaggatactgtggtatttgatttatctggtgcatttagagtgaatgatccggctttttatgaaaactattacggctttaaacataactttgataaagaattgcaaagtgcagtttatggtttggcggaatgggcgagtgccgatatcgctgaagcaaatttgattgcagtaccgggctgttatccaacggcatcgttatctgcgttaaaaccgttagctaaacatggtcttatttcaacagatcaaaaaccaattattaatgcggtgagtggcgtcagtggcgcaggacgtaaagcgtcattggcttctgctttttgcgaagtgagccatgccccttatggtgtgtttaatcatcggcatcaacctgagatcagtacgcatttaggtcacgaggttatttttacgccgcatttaggtagttttaagcgtggtattttggcaaccattaacgtcaaactggctgccggggtaaccccagagcaagtgactgcggcttatcaagaagcctatcaagatcagccgatggtgcggttattaccaagtggctggccaagtattaaagcggtagagaaaaccgcgtattgtgatttagcgtggcagcaacaagggcaagacctgatcgtggtgtctgctattgataacctattaaaaggtgctgcggcacaagcaatgcagtgtattaatatccgttttggtttcgccatgacaacctcgttagtataa

SEQ ID NO: 48015 - protein, 336 aa, Moritella profunda
MLKTILVGATGYTGAELAHYITKHPELELAGLYVSEHSLDAGKPFSSLYGHLLGVVDQTIEPLAVSNIKNICDDVDIVVLATAHEVSHDIAAEFLAQDTVVFDLSGAFRVNDPAFYENYYGFKHNFDKELQSAVYGLAEWASADIAEANLIAVPGCYPTASLSALKPLAKHGLISTDQKPIINAVSGVSGAGRKASLASAFCEVSHAPYGVFNHRHQPEISTHLGHEVIFTPHLGSFKRGILATINVKLAAGVTPEQVTAAYQEAYQDQPMVRLLPSGWPSIKAVEKTAYCDLAWQQQGQDLIVVSAIDNLLKGAAAQAMQCINIRFGFAMTTSLV

SEQ ID NO: 48016 - DNA, 1059 bp, Mycobacterium bovis
  CDS (1)..(1059): transl_table=11
atgcaaaatcggcaggtggccaatgcgacgaaggtggcggttgccggtgccagcggatatgccggtggtgagattctccgcctgctgctcgggcatccggcgtacgccgacggccggctgaggatcggtgcgctgaccgcggcgaccagcgccggcagcacgctcggcgaacaccatccgcacctgacgccgctggcccatcgagtagtcgaacccaccgaagctgccgtgctcggtggccatgacgccgtcttcttggccttgccgcacgggcattcggcggtgttggcgcagcaactgagccccgagacactgatcatcgactgcggggcggactttcggctcaccgacgccgccgtctgggagcggttctacgggtcgtcgcacgccggtagctggccgtatgggttgcccgagctgccgggcgcgcgggaccaattgcgcggcacccgccgcatcgcggtgcccggctgctatccgaccgcggcactgctggcgctttttcccgcgctggccgcagaccttatcgagcccgcggtgaccgtggtcgccgtgagcggtacctcgggggcgggtcgtgcggccaccaccgacttgctgggcgcggaggtcatcgggtcggcgcgcgcctacaacatcgccggcgtccaccggcacacccccgagatcgctcaagggctacgcgcggtcaccgaccgcgacgtctcggtctcgtttaccccggtgctgatcccggcctcccgtggcatcctggccacctgcacggcacgcacccgatcacccctgtcgcagctgcgggcagcctacgaaaaggcctaccatgcagagcctttcatttatctgatgccggaggggcagctgccgcgcaccggcgcggtgatcggcagcaacgcagcgcacatcgccgtcgcggtggacgaggacgcgcagacgttcgtggcgatcgccgcgatcgacaacctggtcaagggcaccgccggcgccgcggtgcaatcgatgaacctggcgctgggctggccggagaccgacggcctttcggttgtgggggtggcgccgtga

SEQ ID NO: 48017 - protein, 352 aa, Mycobacterium bovis
MQNRQVANATKVAVAGASGYAGGEILRLLLGHPAYADGRLRIGALTAATSAGSTLGEHHPHLTPLAHRVVEPTEAAVLGGHDAVFLALPHGHSAVLAQQLSPETLIIDCGADFRLTDAAVWERFYGSSHAGSWPYGLPELPGARDQLRGTRRIAVPGCYPTAALLALFPALAADLIEPAVTVVAVSGTSGAGRAATTDLLGAEVIGSARAYNIAGVHRHTPEIAQGLRAVTDRDVSVSFTPVLIPASRGILATCTARTRSPLSQLRAAYEKAYHAEPFIYLMPEGQLPRTGAVIGSNAAHIAVAVDEDAQTFVAIAAIDNLVKGTAGAAVQSMNLALGWPETDGLSVVGVAP

SEQ ID NO: 48018 - DNA, 1044 bp, Mycobacterium leprae
  CDS (1)..(1044): transl_table=11
atgtcctacgcgataagagtggcggttgtcggtgccagcggttacgcgggcggcgagattcttcggttgctacttgggcatccggcgtacgccgacgatcggctgacgatcggcacgctgaccgccgcggccagttcgggtgacacgctcggcgagcaccatccgcacttgacgccgctggctcatcgagtactcgaatctactgagttgaccgtgctagctggccacgacgtggtttttcttggcttgccacacggacattcggcagcgctggccgaacgactgggtccagaaacactgatcatcgactgcggtgcggacttccgactcaccgacgccggtgcctgggggcggttctacgaatccccgtatgccggcagctggccgtacgggttgccagagctgcccggcggtcgggagcggttacaaaaggcacgccgcatcgcggttcccggttgctacccgacggccatcctactagccttgctacccgcgatggcggagggccttatcgaacccgccgtgacggtgttcgcggtgagcggtatttccggagccggtcgagcagccaagaccaagttgctcggctcagaggtcatcggttcggcaagagcctataacattggcggtacccaccgacacaccgccgagatcatacaggggctgcgggtggtgaccgatcgtgctgtcacagtgtccttcaccccagtgctcatccctacttcccgcggcatcctagctgcctgcactgcgcgcacctcctcatcgctctcgaagctgcgcaccgcctacgaaaaagcataccaagtagagcctttcgtctacctgatgccggagggacagttgcctttcaccggcgcagtgatcggcagcaacgcggcgcatatcgctgttgcggtggacgaagctgctgagacgttcatcgcgatctcggcgatcgacaatctcgtcaagggcaccgctggcgccgctgtgcagtcgatgaacttagcgctgggttggccggaagcagagggcctttcagtggttggggtggcaccgtga

SEQ ID NO: 48019 - protein, 347 aa, Mycobacterium leprae
MSYAIRVAVVGASGYAGGEILRLLLGHPAYADDRLTIGTLTAAASSGDTLGEHHPHLTPLAHRVLESTELTVLAGHDVVFLGLPHGHSAALAERLGPETLIIDCGADFRLTDAGAWGRFYESPYAGSWPYGLPELPGGRERLQKARRIAVPGCYPTAILLALLPAMAEGLIEPAVTVFAVSGISGAGRAAKTKLLGSEVIGSARAYNIGGTHRHTAEIIQGLRVVTDRAVTVSFTPVLIPTSRGILAACTARTSSSLSKLRTAYEKAYQVEPFVYLMPEGQLPFTGAVIGSNAAHIAVAVDEAAETFIAISAIDNLVKGTAGAAVQSMNLALGWPEAEGLSVVGVAP

SEQ ID NO: 48020 - DNA, 1044 bp, Mycobacterium paratuberculosis
  CDS (1)..(1044): transl_table=11
atggccgacgtgatgagggtggcggtagccggtgccagcggctatgcgggcggtgagatcctacgcctgctgctcgggcacccggcttacgcccaggggcggctggcgatcggcgcggtgaccgccgcggccagcgccggcagcccactcggcgagcatcacccgcacctgacgccgttggcccagcgcgtgctggagcccaccgacgccgccgtgctggccggccacgacgtggtgtttctggcgttgccgcacggacattcggcggcgctggccgaccagctcggcgccgacacgctgatcgtcgactgcggcgcggacttccggctgaccgacgccgccgcctgggagcggttctacggctcgccgcacgccggcagttggccctacgggctgccggagctgcccggggcgcgcgagcggctgcgcggcgcccgccggatcgcggtgccgggctgctacccgaccgcggcgctgctggccctgctgcccgcgatggccgaggacctgatcgagcccgccgtcaccgtggtcgccgtcagcggcacctccggagccggtcgcgccgccaagaccgacctactgggctcggaggtcatcgggtcggcgcgggcctacaacatcgccggggcgcaccggcacacccccgagatcgcccagggcctggcggccgtgtccggacgcgacgtcacggtgtcgttcaccccggtgctgatcccgacctcgcgcggcatcctggccacctgcaccgcccgcaccaccgcgccgttttcggcgcttcgggccgcatacgaaaaggcttatgacgcagagcctttcatctacctgatgcccgagggacagctgccgcggaccggggcggtgatcggcagcaacgcggcgcacatcgcggtggcggtggacgaggcggcgggcgtgctggtggcgatcgccgcgatcgacaacctggtcaagggaaccgccggggcggccgtgcagtcgatgaacctggcgctgggttggccggagacacaaggactttcggtgatcggggtggcgccgtga

SEQ ID NO: 48021 - protein, 347 aa, Mycobacterium paratuberculosis
MADVMRVAVAGASGYAGGEILRLLLGHPAYAQGRLAIGAVTAAASAGSPLGEHHPHLTPLAQRVLEPTDAAVLAGHDVVFLALPHGHSAALADQLGADTLIVDCGADFRLTDAAAWERFYGSPHAGSWPYGLPELPGARERLRGARRIAVPGCYPTAALLALLPAMAEDLIEPAVTVVAVSGTSGAGRAAKTDLLGSEVIGSARAYNIAGAHRHTPEIAQGLAAVSGRDVTVSFTPVLIPTSRGILATCTARTTAPFSALRAAYEKAYDAEPFIYLMPEGQLPRTGAVIGSNAAHIAVAVDEAAGVLVAIAAIDNLVKGTAGAAVQSMNLALGWPETQGLSVIGVAP

SEQ ID NO: 48022 - DNA, 1044 bp, Neisseria meningitidis serogroup A
  CDS (1)..(1044): transl_table=11
atgagtaaaaaaatcaaagtcggcattgtcggcgcgacgggctacacgggcgtggaactgctgcgcctgcttgccgcccatcccgatgtcgaagtcgccgccgtaaccagccgcagcgaagcgggaactgcagttgccgattactttccgagtttgcgcggcgtgtacggcctcgccttccaaacgcccgacgaggcaggtttggaacaatgcgacatcgtcttcttcgccacgcccaacggcatcgccatgaaagacgcgccgcgcctgattgaacagggcgtgcgcgtcatcgacctttccgccgacttccgcatacgggacattccgacctgggaacactggtacggcatgacccacgccgcccccgacctcgtttcccaagccgtgtacggattgagcgaactcaaccgcgaagccgtcgcacaggcacgcctcgtcgccaaccccggctgctacccgacctgcgtatccctgccgctcgtgccgctgttgcggcaatgccgtctgaagcccggtatgccgctgattgccgactgcaaatccggcgtgtccggcgcgggcaggaaaggcaatgtcggttcgctgttgtgcgaagtcggcgacaacttcaaagcatacggcatagctggacaccgccacctgcccgaaatcaggcagaccatcgccgggcttcaggacggcatcgccgaaggattcgtgttcacgccgcacctcgcgccgatgatacgcggtatgcacgccaccgtttacctccacctttcagacggcatctgccccgaaaccatcctgcgcgactattaccgcgacagcctgttcgtggacatcctgcccgccggttcgacacccgaaacccgcagcgtgcgcggcgcaaacctctgccgcatcagcatccaacaggcggcgcaatccgatgtgtgggtcgtcctttccgtcatcgacaacctcgtcaaaggcgcggcgggtcaggcggtgcaaaatatgaacatcatgttcggactgaaggaaacacacggcttgggcgcaatccccctgctcccctga

SEQ ID NO: 48023 - protein, 347 aa, Neisseria meningitidis serogroup A
MSKKIKVGIVGATGYTGVELLRLLAAHPDVEVAAVTSRSEAGTAVADYFPSLRGVYGLAFQTPDEAGLEQCDIVFFATPNGIAMKDAPRLIEQGVRVIDLSADFRIRDIPTWEHWYGMTHAAPDLVSQAVYGLSELNREAVAQARLVANPGCYPTCVSLPLVPLLRQCRLKPGMPLIADCKSGVSGAGRKGNVGSLLCEVGDNFKAYGIAGHRHLPEIRQTIAGLQDGIAEGFVFTPHLAPMIRGMHATVYLHLSDGICPETILRDYYRDSLFVDILPAGSTPETRSVRGANLCRISIQQAAQSDVWVVLSVIDNLVKGAAGQAVQNMNIMFGLKETHGLGAIPLLP

SEQ ID NO: 48024 - DNA, 1044 bp, Neisseria meningitidis serogroup B
  CDS (1)..(1044): transl_table=11
atgagtaaaaaaatcaaagtcggcattgtcggcgcgacgggctacaccggcgtggaactgctgcgcctgcttgccgcccatcccgatgtcgaagtcgccgccgtaaccagccgcagcgaagcgggaaccgcagttgccgattactttccgagtttgcgcggcgtgtacggcctcgccttccaaacgcccgacgaggcaggtttggaacaatgcgacatcgtcttcttcgccacgcccaacggcatcgccatgaaagacgcgccgcgcctgattgaacagggcgtgcgcgtcatcgacctttccgccgacttccgcatacgggacattccgacctgggaacactggtacggcatgacccacgccgcccccgacctcgtttcccaagccgtgtacggattgagcgaactcaaccgcgaagccgtcgcacaggcgcgcctcgtcgccaaccccggctgctacccgacctgcgtatccctaccgctcgtgccgctgttgcggcaatgccgtctgaagcccggtatgccgctgattgccgactgcaaatccggtgtgtccggcgcgggcaggaaaggcaatgtcggttcgctgttgtgcgaagccggcgacaacttcaaagcctacggcatagccggacaccgccacctgcccgaaatcaggcagaccatcgccgggcttcaggacggcatcgccgaaggattcgtgttcacgccgcacctcgcgccaatgatacgcggtatgcacgccaccgtttacctccacctttcagacggcagcgaccccgaaaccgtcctgcgcgactactaccgcgacagcccgttcgtggacatcctgccgaccggttccgcccccgaaacccgcagcgtgcgcggcgcaaacctctgccgcatcagcatccaacaggcggcgcaatccgatgtgtgggtcgtcctttccgtcatcgacaacctcgtcaaaggcgcggcgggtcaggcagtccaaaatatgaacattatgttcggactggaggaaacacacggcttggacgcaatccccctgctcccctga

SEQ ID NO: 48025 - protein, 347 aa, Neisseria meningitidis serogroup B
MSKKIKVGIVGATGYTGVELLRLLAAHPDVEVAAVTSRSEAGTAVADYFPSLRGVYGLAFQTPDEAGLEQCDIVFFATPNGIAMKDAPRLIEQGVRVIDLSADFRIRDIPTWEHWYGMTHAAPDLVSQAVYGLSELNREAVAQARLVANPGCYPTCVSLPLVPLLRQCRLKPGMPLIADCKSGVSGAGRKGNVGSLLCEAGDNFKAYGIAGHRHLPEIRQTIAGLQDGIAEGFVFTPHLAPMIRGMHATVYLHLSDGSDPETVLRDYYRDSPFVDILPTGSAPETRSVRGANLCRISIQQAAQSDVWVVLSVIDNLVKGAAGQAVQNMNIMFGLEETHGLDAIPLLP

SEQ ID NO: 48026 - DNA, 1029 bp, Nitrosomonas europaea
  CDS (1)..(1029): transl_table=11
atgatcaatgctggcattgtaggtggaacaggttatacaggcgtcgagctgttacgtattctcgtacagcatccgaaagtcaaacttaaagtcattacatcccgacaggaagcaggtacgggagtggatgaacttttttccagtttacgcgggcagattgcgctcaagttcagtgatccggcgaaagtggatttcagcaagtgtgatgtcgttttttttgcaactcccaatgggattgccatgcagcaggcaaaagctttactcgattcaggaataaaagtgattgacctggctgctgattttcgtatcaaggatgttgctgagtgggaaaaatggtatggcatgacgcatgccgctcctgagctggtagccgaagccgtttacggtttgcctgaagtcaaccgggaaaaaatccgggatgcacgattgattgccaaccccggttgctatccaaccgcagtgcagttgggttttattccgctgatcgaagcgggggcagtagatgcggatcatctgattgcagataccaaatcaggtgtttccggagcaggtcgcaaagccgaaatacataccttatatgcggaagcatcagataacttcaaatcttatgctgtgccaggacatcgccatttgcccgaaatcaggcagggactgtccgagagatcgaatgggccgatcggattgaccttcgtgcctcacctgactccgatgatccgggggattcatgccacactctacgcaaggctgaccagagatgtcgatttgcaaaccctgtatgaaaaccgttatgccaatgagccctttgtcgatgtgcttcctgccggcagccatccggaaacccgctcggtacgtggttcaaatttttgccggattgcagttcatcgtccggggaatggtgataccgcagtgatactctcggttaccgataatttggttaaaggtgctgccggccaggccgttcagaacatgaatattatgtatggattaccggaaacgaccggtatccggcatgttccgctgctgccttag

SEQ ID NO: 48027 - protein, 342 aa, Nitrosomonas europaea
MINAGIVGGTGYTGVELLRILVQHPKVKLKVITSRQEAGTGVDELFSSLRGQIALKFSDPAKVDFSKCDVVFFATPNGIAMQQAKALLDSGIKVIDLAADFRIKDVAEWEKWYGMTHAAPELVAEAVYGLPEVNREKIRDARLIANPGCYPTAVQLGFIPLIEAGAVDADHLIADTKSGVSGAGRKAEIHTLYAEASDNFKSYAVPGHRHLPEIRQGLSERSNGPIGLTFVPHLTPMIRGIHATLYARLTRDVDLQTLYENRYANEPFVDVLPAGSHPETRSVRGSNFCRIAVHRPGNGDTAVILSVTDNLVKGAAGQAVQNMNIMYGLPETTGIRHVPLLP

SEQ ID NO: 48028 - DNA, 1059 bp, Nostoc ellipsosporum
  CDS (1)..(1059): transl_table=11
atgggcaattttggacgcgtacccgttgggattgttggcgcgtcaggctatggtggggtacagttagtccgattactgatggatcatccagaaatcgaactagtttatttaggtggtgagagtagtgtaggtaaatcttttgcatctctctacccccatttagctcatgcagttaaattatcaattgaagaagtagacccagaagtgattgcgcgtcgctgtgaagtggtgtttctctcgatgccaaatggtctggcttgtcaaattgtgccaacattgttggaaaaaggctgtaaagtactggatttgagtgcagactatcgattccgtaacttgacaacttacaccacttggtatggtgtggaaaggagcgatcgcactacagccgacaccgccatatatggtttacctgaactttaccgcgatcgcatctccgaagcccaattagtcggctgtcctggttcctaccccaccgctagcctcttagcattatcgccactgttaaaacaaggtttaatcgtccccgaaactgctattgttgacgctaaatctggtacatctggcggcgggagggaagctaaaacttatctattactagcagaagcagataattctctcgccccttatagtgtcgtccgtcaccgtcacaccccagaaatcgagcaaatttgtagcgatttggcgggtcacgaagttacagtccaatttacgccacatcttgtccctatagtacggggaattttggcaactgtatacgctaccctgcgcgatcctggtttagttggagatgatttaactactatttatacagccttctaccgtaattctccctgggtaaaagtttgtgaaagcggcatttatccgcaaacaaaatgggctgcgggcagcaatctttgttatatcggtgtagaagttgacccgcgtactggccgggtaattggcatgtcagtaattgacaacctgatcaaaggccaagcgggtcaagcaattcagtgtctcaacatcatgatgggttgggatgagacattgggtttaccaaaaatggggttttatccgtga

SEQ ID NO: 48029 - protein, 352 aa, Nostoc ellipsosporum
MGNFGRVPVGIVGASGYGGVQLVRLLMDHPEIELVYLGGESSVGKSFASLYPHLAHAVKLSIEEVDPEVIARRCEVVFLSMPNGLACQIVPTLLEKGCKVLDLSADYRFRNLTTYTTWYGVERSDRTTADTAIYGLPELYRDRISEAQLVGCPGSYPTASLLALSPLLKQGLIVPETAIVDAKSGTSGGGREAKTYLLLAEADNSLAPYSVVRHRHTPEIEQICSDLAGHEVTVQFTPHLVPIVRGILATVYATLRDPGLVGDDLTTIYTAFYRNSPWVKVCESGIYPQTKWAAGSNLCYIGVEVDPRTGRVIGMSVIDNLIKGQAGQAIQCLNIMMGWDETLGLPKMGFYP

SEQ ID NO: 48030 - DNA, 1041 bp, Oceanobacillus iheyensis
  CDS (1)..(1041): transl_table=11
ttgaaaaaggcagcgattattggtggtactggttatggtgctattgaacttattagactgttagattcacatccttatatagaattagcaaagatcatctcgcaatcacaacacggagagttacttgatgaaacctatccacatcttgcaacctatgttacacaacctatgcaagagctacatattcaacaactgatcgaagagatagatattgtttttctagcaacaccggctggagtagcaaaagagatcgctgctagttttctagattcttctatccaatgtattgacttatcaggtgatttacgtttgtcttccagtgactatgaaatgtggtatcaaaagaagccagcaagtgaagctttactagaaaaaacggcatatggattaacggaagtttttcaagagaagattaaacaagcgaatattatatctaatccaggttgttttcctactgctgctttattaggtcttattccaatgcttgaaaataatattattgaatcaaaaggaattatgattgatggcaaaactggaatatctggagcaggtaaaaattccagtgcaaaaacacatttttcaactacaaatgaaaatgtcactccatataaaattggaacacatcaacatataccagagatcgagaaatatttatctcagcatgttgaagaatcttctgtaagggtgactttaacgacccatttaattccaatgaccagaggattaatgtgtacgatgtatgcaccattacaacaagatatagataccgctgatgttatagatctgtataaacattattatgagcaatcatcatttatccggattcgaaaacaaggggaatacccatctacgaaagacgttacgggaagtaactattgtgatattggagcatatgtcgacaaacgaacaaatcaactaattatatcttctgcaattgataatctagtaaaaggtgctgcagggcaagcaatccaaaacattaatgtaatgaatggatgggatgaaaaaacaggattatctttcttgccagtatatccataa

SEQ ID NO: 48031 - protein, 346 aa, Oceanobacillus iheyensis
MKKAAIIGGTGYGAIELIRLLDSHPYIELAKIISQSQHGELLDETYPHLATYVTQPMQELHIQQLIEEIDIVFLATPAGVAKEIAASFLDSSIQCIDLSGDLRLSSSDYEMWYQKKPASEALLEKTAYGLTEVFQEKIKQANIISNPGCFPTAALLGLIPMLENNIIESKGIMIDGKTGISGAGKNSSAKTHFSTTNENVTPYKIGTHQHIPEIEKYLSQHVEESSVRVTLTTHLIPMTRGLMCTMYAPLQQDIDTADVIDLYKHYYEQSSFIRIRKQGEYPSTKDVTGSNYCDIGAYVDKRTNQLIISSAIDNLVKGAAGQAIQNINVMNGWDEKTGLSFLPVYP

SEQ ID NO: 48032 - DNA, 1008 bp, Pasteurella multocida
  CDS (1)..(1008): transl_table=11
atgcaaaaagcgattatcattggtgcaagtggttatacgggggctgaacttgctcgtcttttaatcaaacaccccgagtttgagctcaccggactgtacgtctctcgccaaagccaagatgccaataaatgcataagtgacatttatccacaactcaagcaccttgtggatttacctttacagccactgcctgaacaattaactcaacttgcacaacaagcggatctggtgtttctcgccaccgctcatgaagtcagccatgaccttgcccccattttcctacaaaatcaatgtaaagtctttgacttatctggcgcatttcgtgtgaataatgcggcattttatcgcacgttttatggttttgagcatcaacatcctgaattgctcacacaagcggtgtatggtttagcggaatggaatgcacatcaaattaaacaaacggatttagtagccgtcgcgggctgttatccaaccgtctctcaattaagccttaaacccttaattgcacacaatttattagatttaacccaattacctgtgattaatgccgtcagcggagtcagtggtgccggtcgcaaagcaactttaacaagcagtttctgtgaagtcagtttaaatgcttacggtgtgtttaatcaccgtcatcaacctgaaatagcgacccatttggggacagaggtcattttcacaccacacttaggtaactttaaacgcggtattttagcgacaatcacagcaaaactaaaaaccggcgtgagtgatgaacagattcgtgtagcttatcaacacgcctatgctgacaaaccattagtccgtgtttatgaacaaggtttaccaagtatcaaagccgtcgaatttactccttattgtgatattggctttgtgactaaaaatggtcatatcattatcatcggcgcagaagacaacttattaaaaggggcagcagcacaggcagtacaatgtgctaacattcgttatggtttgactgaaacattaggattactttaa

SEQ ID NO: 48033 - protein, 335 aa, Pasteurella multocida
MQKAIIIGASGYTGAELARLLIKHPEFELTGLYVSRQSQDANKCISDIYPQLKHLVDLPLQPLPEQLTQLAQQADLVFLATAHEVSHDLAPIFLQNQCKVFDLSGAFRVNNAAFYRTFYGFEHQHPELLTQAVYGLAEWNAHQIKQTDLVAVAGCYPTVSQLSLKPLIAHNLLDLTQLPVINAVSGVSGAGRKATLTSSFCEVSLNAYGVFNHRHQPEIATHLGTEVIFTPHLGNFKRGILATITAKLKTGVSDEQIRVAYQHAYADKPLVRVYEQGLPSIKAVEFTPYCDIGFVTKNGHIIIIGAEDNLLKGAAAQAVQCANIRYGLTETLGLL

SEQ ID NO: 48034 - DNA, 1005 bp, Photorhabdus luminescens subsp
  CDS (1)..(1005): transl_table=11
atgttgaatacgctggttgttggtgcaagtggttacaccggagcagaactggcagcatatctgcatcgtcatccgcatatgaatctgattaggctcatggtttctgctcagagcgttgatgcagataaatgcttctcagatttacatccacagtataaaggcattgttgatctaccgctgcaaccgctgactgatattattaatgctgctaaagggattgatgtggttttccttgccaccgcccatgaagttagtcatgacattgcgccgctatttctggcagcaggttgcactgtatttgatctctccggtgcctaccgcgtacaaaatgctcagatttatcaacaatactacggattcaaacataagcatactgaatggttagcacaagcagtatatggacttgccgaatggcaggctgaaaacatcaaacaggcccaattagttgctgtaccgggatgttacccaacagtttctcaactctgcctgaaaccgctgttggaaaatagtttgctggatatcagctattggccggtgattaatgcgactagtggtgtaagtggagcaggccggaaagccagtatgaccaacagtttctgcgaaatcagtttgcaaccttatggaatatttacccatcgtcatcaaccggagattgaggaacatctgggaaccagagtggtttttactccacatcttggcaatttcgcccggggtattcttgccacaattacctgtaagttgaagccgggtgttaccgcagaacagatagatgaggtgtatcgtcaagcatacaaagataagccattggtaaggctttacagcaaaggagtaccagcattgaaatccgttgttgggttaccgttctgtgatattggttttgttgtacagggtgaccatctgattgttgtaggtactgaggataatcttttgaagggcgcggcagctcaggcagttcagtgtatgaatatacgttttgggtttgaagaaactcaggcattactttaa

SEQ ID NO: 48035 - protein, 334 aa, Photorhabdus luminescens subsp
MLNTLVVGASGYTGAELAAYLHRHPHMNLIRLMVSAQSVDADKCFSDLHPQYKGIVDLPLQPLTDIINAAKGIDVVFLATAHEVSHDIAPLFLAAGCTVFDLSGAYRVQNAQIYQQYYGFKHKHTEWLAQAVYGLAEWQAENIKQAQLVAVPGCYPTVSQLCLKPLLENSLLDISYWPVINATSGVSGAGRKASMTNSFCEISLQPYGIFTHRHQPEIEEHLGTRVVFTPHLGNFARGILATITCKLKPGVTAEQIDEVYRQAYKDKPLVRLYSKGVPALKSVVGLPFCDIGFVVQGDHLIVVGTEDNLLKGAAAQAVQCMNIRFGFEETQALL

SEQ ID NO: 48036 - DNA, 1044 bp, Picrophilus torridus
  CDS (1)..(1044): transl_table=11
atgcaggttggcattgtcggtggttcaggatacattgcaggccagctgctaagaatgcttgccttccataaagatattgagataaaaattgtctcatcaaaatcccatgccggagaaaaattatcaagggtccatcctgatcttttaaatattttggatttaaggttcagtgatatggatcctgtggatcttgcctccagggttgatcttgtcttccttgcactgccacatggcacatcaataaattatgtgcctgatatctatgagatcggaacaaagattatagacatgagtgctgactttaggctaaaggatcctgatctttacagggaatggtacgggtttgaacacaattatcctgatttgctggaaaagtttgtttacggcatgcctgagttccataggaacgagataaaaaactcaaggtatgtatctgtgccaggctgtatagcatcatcaacaatttacagtgttgcaccattttccatgctaaatcttgataataacattgttactgttgatgcaaaggttggttcatcaggttctggttcaggcacagacagctcaaagaattactctgaaaggtacaattctgtcagggcctacaaaccagtgcaccacaggcacacaccggagatagagcaggaaataaagtatatatcaggtaaaaatattaaaatagcaatgtccgcgcattctgtaaacatggtgcgtggcatattaacaacatctaatatctttatcgaccttgatgagcctgatgccctttcacagctaagggagttctataaaaacgagaaattcatcagattaatatttgacaggaaaagcaatttcaggtaccctgacccaaagaccgtgataggcacaaattttgcagatcttggcgtgataagtgatggctacataaaaagaatagtatcccttggcgcaatagacaacatgataaagggcgctgccggcaatgccatacagtcaatgaatattatgaaccattttgacgagtcagagggtttgttaataccagcagcttttccggtgtga

SEQ ID NO: 48037 - protein, 347 aa, Picrophilus torridus
MQVGIVGGSGYIAGQLLRMLAFHKDIEIKIVSSKSHAGEKLSRVHPDLLNILDLRFSDMDPVDLASRVDLVFLALPHGTSINYVPDIYEIGTKIIDMSADFRLKDPDLYREWYGFEHNYPDLLEKFVYGMPEFHRNEIKNSRYVSVPGCIASSTIYSVAPFSMLNLDNNIVTVDAKVGSSGSGSGTDSSKNYSERYNSVRAYKPVHHRHTPEIEQEIKYISGKNIKIAMSAHSVNMVRGILTTSNIFIDLDEPDALSQLREFYKNEKFIRLIFDRKSNFRYPDPKTVIGTNFADLGVISDGYIKRIVSLGAIDNMIKGAAGNAIQSMNIMNHFDESEGLLIPAAFPV

SEQ ID NO: 48038 - DNA, 1080 bp, Prochlorococcus marinus
  CDS (1)..(1080): transl_table=11
atggactcaataaataataagtcaatacgcgtagctgtcataggtgcctctggatatgggggtatacaatccataagattacttaaggaacacccagattttgaaatctcttttttaggcggttataagacagctggcttgaaatggaatgatttatgcccctttttgcctttagaaaacgatccaactattaatgctgttgacctttctgaaataactgataagtcagacattgttttacttagtcttccaaatggtatttcatcacaactaacacctaaattaattaaggaaaaagtaagagttgtcgatttatcagcagattatagatataggtctttagaggaatggaaatctatttattcagttgaatcatctaaacattccagaaaggacgaacttctatgttcacaagctgtatatggaataccagaatggaattctatagaaatatctaaggctaaaatcgtagcctgtcctggctgtttccctacagcaagtcttttaccacttatgccttttttaaagcaaggaataattgaaacagacggaattataattgatagtaaaagtggaacttcaggtggaggtcgtgtaccaaaagaacacttattacttgcagaatcttcagagtctgtagaaccatattctgttgtaggtcatcgccatacatcagaaattgagcaggaacttagcaatttatctggatcaaatattcaaatacaattcacacctcacttagtgccaatggttagaggattacttagtactgtttacgctagattaagagatccctgcttgacagcagaggattgcaaaactgtcttagaaactgtctatcgctcttgtccttctgtagagatccaacctgtaggtgtatatccaaaaacaaaatgggtacgatttacaaataaggctctaattagcgtacaagtagatcaacgtaacggccgtgtaattttgatgtcagcaatagataatttaatcaaaggtcaagcagggcaggctattcaaagtctaaacttaatgtcaggtttaccaacatgtaaagggttacctttaattggttattatccataa

SEQ ID NO: 48039 - protein, 359 aa, Prochlorococcus marinus
MDSINNKSIRVAVIGASGYGGIQSIRLLKEHPDFEISFLGGYKTAGLKWNDLCPFLPLENDPTINAVDLSEITDKSDIVLLSLPNGISSQLTPKLIKEKVRVVDLSADYRYRSLEEWKSIYSVESSKHSRKDELLCSQAVYGIPEWNSIEISKAKIVACPGCFPTASLLPLMPFLKQGIIETDGIIIDSKSGTSGGGRVPKEHLLLAESSESVEPYSVVGHRHTSEIEQELSNLSGSNIQIQFTPHLVPMVRGLLSTVYARLRDPCLTAEDCKTVLETVYRSCPSVEIQPVGVYPKTKWVRFTNKALISVQVDQRNGRVILMSAIDNLIKGQAGQAIQSLNLMSGLPTCKGLPLIGYYP

SEQ ID NO: 48040 - DNA, 1056 bp, Prochlorococcus marinus subsp
  CDS (1)..(1056): transl_table=11
atgaatgttgcaatagttggtgccactggttacggggggatacaagcagtaaatctattaaagagtaataaaaattataaaatttcttatttaggaggtaataaatcttccggaacaaaatggagcgataattttccattcataaatttagagtctgacaatttaattgaaaaaatatcaatagatagaatcgccgataaagctaatgtggctttactttgcttgcctaatggaatttcatctacattaacaagaggtttattagagaaaggagtaaaagtaattgatttatcagccgattataggtataagtctcttgatcaatggaaaaatatatactctaatgaagcgaaaaaatataagagagatgacgatgatctatgtaaggaagcagtttatggtcttcctgaaattaatttcaatgacatatctaaagcaagattaatcgcctcccctggatgttacccaacatctgctcttattcctcttaatccattcttatcccaagggattattgataatgaaggtatagtaatagattcaaaaagtggtacatcaggtggaggcagagaaccaaatcaaaaatcattattctctgaatgtggagatggtctatctgcctatggactaataaatcatagacatacttcagaaatagaacaaattgcaagttttatttctggtaatgatattgaactactattcactcctcatttaataccaatgacaagaggtatgcattcgacaatatatggaagattacgggatccaggcttaacttcttctgattgtaggattatattagaaaattattatagaaactactcgcatattcgagtattaccagttgatatttatccttccaccaagtgggttaagaatacaaatgaaatccatctctctgtcaaagttgatactagaaatggaagagtaattattttatcagtaatagataatttaataaaaggacaaacagggcaagctatacaaaatcttaatctaatatctggattgccaataaataatgggttagaaatgattaatcattacccataa

SEQ ID NO: 48041 - protein, 351 aa, Prochlorococcus marinus subsp
MNVAIVGATGYGGIQAVNLLKSNKNYKISYLGGNKSSGTKWSDNFPFINLESDNLIEKISIDRIADKANVALLCLPNGISSTLTRGLLEKGVKVIDLSADYRYKSLDQWKNIYSNEAKKYKRDDDDLCKEAVYGLPEINFNDISKARLIASPGCYPTSALIPLNPFLSQGIIDNEGIVIDSKSGTSGGGREPNQKSLFSECGDGLSAYGLINHRHTSEIEQIASFISGNDIELLFTPHLIPMTRGMHSTIYGRLRDPGLTSSDCRIILENYYRNYSHIRVLPVDIYPSTKWVKNTNEIHLSVKVDTRNGRVIILSVIDNLIKGQTGQAIQNLNLISGLPINNGLEMINHYP

SEQ ID NO: 48042 - DNA, 1035 bp, Pseudomonas aeruginosa
  CDS (1)..(1035): transl_table=11
atgatcaaggtcggcatcgttggcggtacgggttatacgggcgtggaactgctgcgcctgctggcgcagcatccgcaggcccgggtggaagtgatcacttcgcgttccgaggcgggggtgaaggtcgccgacatgtacccgaacctgcgaggtcattatgacgacctgcagttcagcgtgccggacgcgcagcgcctcggcgcctgcgacgtggtgttcttcgccacgccgcacggcgtggcgcacgcgctggctggcgaactgctggacgccgggacccgggtcatcgatctgtccgctgacttccgcctggcggacgccgaggagtgggcgcgctggtacggccagccgcatggcgctccggcgctgctcgacgaggctgtctacggcctgccggaagtgaaccgcgagaagatccgccaggcccgcctgatcgccgtgccgggctgctacccgaccgcgacccagctgggcctgatcccgctgctggaagccggcctggccgacgcctcgcggctgatcgccgattgcaagtccggggtcagcggtgccggtcggggcgccaaggttggctcgctgttctgcgaggcgggcgaaagcatgatggcctacgcggtcaaagggcatcggcatctcccggaaatcagccagggcctgcgtcgggcctccggcggcgacgtcgggctgacgttcgtaccgcacctgacgccaatgatccgcggtatccatgcaaccctctatgcccatgtcgcggatcgctcggtcgacctccaggcgttgttcgagaagcgctacgccgacgaacccttcgtcgacgtgatgccggccggcagccatccggagacccgcagcgtgcgtggcgccaatgtctgccgaatcgccgtgcatcgcccccagggcggcgacctggtggtggtgctgtcggtgatcgacaacctggtcaagggcgcctcgggtcaggcgctccagaacatgaacatcctgttcgggctggacgagcgcctgggcctctcgcatgcggccctgctcccctga

SEQ ID NO: 48043 - protein, 344 aa, Pseudomonas aeruginosa
MIKVGIVGGTGYTGVELLRLLAQHPQARVEVITSRSEAGVKVADMYPNLRGHYDDLQFSVPDAQRLGACDVVFFATPHGVAHALAGELLDAGTRVIDLSADFRLADAEEWARWYGQPHGAPALLDEAVYGLPEVNREKIRQARLIAVPGCYPTATQLGLIPLLEAGLADASRLIADCKSGVSGAGRGAKVGSLFCEAGESMMAYAVKGHRHLPEISQGLRRASGGDVGLTFVPHLTPMIRGIHATLYAHVADRSVDLQALFEKRYADEPFVDVMPAGSHPETRSVRGANVCRIAVHRPQGGDLVVVLSVIDNLVKGASGQALQNMNILFGLDERLGLSHAALLP

SEQ ID NO: 48044 - DNA, 1035 bp, Pseudomonas syringae pv
  CDS (1)..(1035): transl_table=11
atggtcaaggtcggtatcgtcggcggcacgggttacaccggggtagagctgctgcgtctgttggcacagcatccgcaggcagaagtcgtggttattacctcgcgctcggaggccggcctgccagtcgccgatatgtacccgaacctgcgaggtcattacgacggcctggccttcagcgtgcctgacgtgaaaaccctgggtgcctgtgacgtcgtgttcttcgccacgccgcatggtgttgctcatgctctggcgggtgagctgctcgcagccggcaccaaagtgatcgacctgtctgccgacttccgtctgcaggacccggtcgagtgggccaagtggtacggccagccgcatggcgcgccggaattgctgcaggatgcggtttacgggttgccggaagtcaatcgcgagcagatcaggaacgcgcggctcattgctgtgcctggctgctacccaacggctacccagctgggtttcctgcctctgcttgaagcaggcattgccgataacacgcgcctgattgccgactgcaagtccggcgtcagcggcgccggtcgcggtctgaacattggctcgctgtattcggaggccaacgaaagcttcaaggcgtacgccgtcaaaggccaccgtcacctgcctgaaatcacccaagggctgcgtcgcgctgcccgtggtgatatcggcctgacctttgtcccacatctggtaccgatgattcgtggcattcattccacgctctacgcgacggtcacggatcgctcggtagatttgcaggcccttttcgagaagcgctatgccgacgagccgtttgtggacgtgatgcctgcgggcagccacccggaaacccgcagcgtacgtggcgccaatgtctgccgcatcgctgtgcatcgcccgcaggatggcgatctggttgttgtgctgtcggtcatcgacaacctggtgaagggtgcatcggggcaggcggttcagaacatgaacatcctgttcggtctggatgagcgcgccgggctgtctcatgcggggatgatgccttag

SEQ ID NO: 48045 - protein, 344 aa, Pseudomonas syringae pv
MVKVGIVGGTGYTGVELLRLLAQHPQAEVVVITSRSEAGLPVADMYPNLRGHYDGLAFSVPDVKTLGACDVVFFATPHGVAHALAGELLAAGTKVIDLSADFRLQDPVEWAKWYGQPHGAPELLQDAVYGLPEVNREQIRNARLIAVPGCYPTATQLGFLPLLEAGIADNTRLIADCKSGVSGAGRGLNIGSLYSEANESFKAYAVKGHRHLPEITQGLRRAARGDIGLTFVPHLVPMIRGIHSTLYATVTDRSVDLQALFEKRYADEPFVDVMPAGSHPETRSVRGANVCRIAVHRPQDGDLVVVLSVIDNLVKGASGQAVQNMNILFGLDERAGLSHAGMMP

SEQ ID NO: 48046 - DNA, 993 bp, Pyrococcus abyssi
  CDS (1)..(993): transl_table=11
atgattaaagctgccatagtgggaggtagtggatacattggtggggagttaataaggttgctctcaatgcatcctgaggttgaaataaccactatcacatcccgaaagtttgccggaaagaaggttcataaagttcaccccaacttaaggggattgaacctgaggtttactgataaatacgagttcgacgctgacgttatatttctggccgttccgcatgggacctccatgaggataataggtgaattcctgggtagcgctaagataatagacctgagtgctgatttcagggtttcaaaggatctttacgagaaatactatggttcccacgagaagcctgagttgatagataaattcgtttacggtctccctgagttgcatcggaaagaaataaagagagctgagcttgtggctaacccaggatgcaatgccacagccgtgatcttggccctttatcctttcagagatgtaacatccgaagctatagttgatctaaaggttagctcttccgcaggtggtaggagggaaaacgtagcaagcattcatcctgaaaggagtcacgttgttagggtttacaaacccttccaccaccgacacgaagctgaagttctccaagaaactggagttaaagcgatgttcacggttcactcagttgacatagtcagggggcttttggctacaacatacttcaagttcgagggtagcgagaaggatttgcttaagaggttgctaatgtacaggggagaacctttcataaggttagttaccgataaaggagggctccaaaggtatcccgatccgaagtacgtgattggtagcaacttcgtcgacatagggttctcctacgattcggaaaactctagggcgatagtattttctgccctagacaatctgatcaaaggcggggcgggacaggccgttcaaaacatgaacatcatgtttggattcgatgagacccttggtttgaattattaccccctctatccggggtga

SEQ ID NO: 48047 - protein, 330 aa, Pyrococcus abyssi
MIKAAIVGGSGYIGGELIRLLSMHPEVEITTITSRKFAGKKVHKVHPNLRGLNLRFTDKYEFDADVIFLAVPHGTSMRIIGEFLGSAKIIDLSADFRVSKDLYEKYYGSHEKPELIDKFVYGLPELHRKEIKRAELVANPGCNATAVILALYPFRDVTSEAIVDLKVSSSAGGRRENVASIHPERSHVVRVYKPFHHRHEAEVLQETGVKAMFTVHSVDIVRGLLATTYFKFEGSEKDLLKRLLMYRGEPFIRLVTDKGGLQRYPDPKYVIGSNFVDIGFSYDSENSRAIVFSALDNLIKGGAGQAVQNMNIMFGFDETLGLNYYPLYPG

SEQ ID NO: 48048 - DNA, 1056 bp, Pyrobaculum aerophilum
  CDS (1)..(1056): transl_table=11
atgaaagtctgtattataggagcgtcgggctttgtgggcggggagcttttgagaatactcttgcaacacagcggcgtggaggtggtctgtgccacttctagaagatttaagggggagtatgtatacagagttcaccccaatctgagggggttcacccagttgaaattcgtagagccctcaatagacgcggcgttgaaagccgatgtggtattcctcgcgttgccgcacggtgagtctgtcaaatgggtccctaagctctacgagtctggcgtcgcggtttttgacctcagcgcggacttcaggctgaaagaccccaacgcatatgtggagtggtataagtggccgcagcctcacccctatcctgaccttttacaaaaagctgtgtacggccagccggagctacacagaagcgaactagtaggggctaagctcgtggcagtgcccggctgtatggcaacggcgtctatattaatgctggcgcctttagctaaacacggcttgttgggagagacgccgcctgtgatagacgccaaaattggatcaagcggggctggggctgaggggtcagtggtagatctccacagctttaggacatatgtagtgaggccctacgagcccgtgcaccaccgccacatagccgaaattgagcaagagctcagcctcctcgcggggaaaagagttaaagtggccttcaccccgcacgcagtcgatatggtcagggggattttcgccacaggccacgtctttgtggaaaaaatgcccactgaggccgacatgtggaaaatgtatagatctatgtacggagattctaaatttatacgtattgtaaaggacagattggggatttccaggtatccaaatgtaaaatacgtactgggttctaattttgtagatataggctttgagttagaccagaggcttaataggctggtgaccttctcggctatagacaatttagtgaggggtgccgccgggcaggcagtacaggcttttaacgtggcaatgggctttcccgaggacgagggccttaggtacataccgctggcgccagtatga

SEQ ID NO: 48049 - protein, 351 aa, Pyrobaculum aerophilum
MKVCIIGASGFVGGELLRILLQHSGVEVVCATSRRFKGEYVYRVHPNLRGFTQLKFVEPSIDAALKADVVFLALPHGESVKWVPKLYESGVAVFDLSADFRLKDPNAYVEWYKWPQPHPYPDLLQKAVYGQPELHRSELVGAKLVAVPGCMATASILMLAPLAKHGLLGETPPVIDAKIGSSGAGAEGSVVDLHSFRTYVVRPYEPVHHRHIAEIEQELSLLAGKRVKVAFTPHAVDMVRGIFATGHVFVEKMPTEADMWKMYRSMYGDSKFIRIVKDRLGISRYPNVKYVLGSNFVDIGFELDQRLNRLVTFSAIDNLVRGAAGQAVQAFNVAMGFPEDEGLRYIPLAPV

SEQ ID NO: 48050 - DNA, 993 bp, Pyrococcus furiosus
  CDS (1)..(993): transl_table=11
atgatcaaggctgctgttgttggggctagtggatatatcggaggggaattagttaggttactcgcaatgcatccagaagttgagattactgcaataacctcaagacaatatgccggaaagaaagtgcataaagttcatccaaaccttagaggacttgacttaagattcacaaacgactacaatttcgatgcagatgtgatattcttggcagtcccacatgggacatctatgaaaatcatagaggagttcttgggaagtgctaagataatagacatgagcgctgatttcaggataaagaaagagttgtacgaaaagtattatggtccgcacgagaaacccgaactcatagacagatttacttacggcttaccagagcttcacagaaaagaaataaaaaaggccgaacttgttgccaatccagggtgtaatgccacagcaacgatccttggactctatcccttcaaggacttaactcaggaggccatagttgacctaaaagtcagctcctctgcaggaggaagaagagagaacattgcaagtattcatccagaaagaagcaacgtggttagggtatacaagccctatcaccacaggcacgaggcagaggttctgcaggaaactagagtaaaggccatgttcacagtccattctgtagacttagtgagaggattgttagctacaatttacttccgctatgagggcaatgaaagagaactgctgagaaagctcttgatgtataaagacgagccctttgtaagaatcgtaactgataaaggaggattacaaaggtatcctgatccaaagtacgtcattggaagcaattttatcgatataggattcgcatacgactccgaaaactcaagggtgatggtattctcggcaatagataacttgatcaagggaggagctggacaggctgttcaaaacatgaacataatgtttggacttaaagaaacgactggattagagtattatcctgtttatcccgtgtga

SEQ ID NO: 48051 - protein, 330 aa, Pyrococcus furiosus
MIKAAVVGASGYIGGELVRLLAMHPEVEITAITSRQYAGKKVHKVHPNLRGLDLRFTNDYNFDADVIFLAVPHGTSMKIIEEFLGSAKIIDMSADFRIKKELYEKYYGPHEKPELIDRFTYGLPELHRKEIKKAELVANPGCNATATILGLYPFKDLTQEAIVDLKVSSSAGGRRENIASIHPERSNVVRVYKPYHHRHEAEVLQETRVKAMFTVHSVDLVRGLLATIYFRYEGNERELLRKLLMYKDEPFVRIVTDKGGLQRYPDPKYVIGSNFIDIGFAYDSENSRVMVFSAIDNLIKGGAGQAVQNMNIMFGLKETTGLEYYPVYPV

SEQ ID NO: 48052 - DNA, 993 bp, Pyrococcus horikoshii
  CDS (1)..(993): transl_table=11
atgattaaggtagctattgttggaggaagtggatacattggaggtgagctgataaggttacttgccatgcatcctgaagttgaaattgtggctgtaacatctagagaatatgctggaaagaaagttcataaagttcatccgaacctgagaggtcttaaccttagatttacctcagactataattttgatgctgatgtgatatttctcgccgttcctcatggggtttcaatgaaactcattaacgagttcctgggaagtgcaaagataattgatttgagtgcagatttcagggttagaaaggagctatacgagaagtactatggaaagcatgaaagaccggaactcatagaagattttgtctatggtcttcctgaaatccacaggaaggaaataaagaaggccgaactcgttgccaatcctgggtgcaatgcaactgcggtaatcctagccctttatccgttcaaagacctgacaaaagaagtattagttgatttaaaggttagctcttctgctggaggaaggagagagaacttaccaagcatacatcctgagaggagcaacgttgtaagggtctataaaccttatcatcatagacatgaggccgaagttttacaggaaactggagttagggcaatgtttacggttcattctgtagacattgtgagagggcttctcgccactatatactttacgtttgagggaaacgaaaaggatcttctaaagagaatgctaatttacaaggatgaaccttttataaggcttgtagtggacaaaggtggccttcagagatatccagatccaaaatacgttttggggagtaatttcgttgatcttggattggcttatgatgaggagaattccagggtgatagtgttctcagcacttgataacttgataaagggtggtgcaggtcaggcggttcagaatatgaacataatgtttggccttgatgaaacccttggccttggatattatcccctttatccggtgtga

SEQ ID NO: 48053 - protein, 330 aa, Pyrococcus horikoshii
MIKVAIVGGSGYIGGELIRLLAMHPEVEIVAVTSREYAGKKVHKVHPNLRGLNLRFTSDYNFDADVIFLAVPHGVSMKLINEFLGSAKIIDLSADFRVRKELYEKYYGKHERPELIEDFVYGLPEIHRKEIKKAELVANPGCNATAVILALYPFKDLTKEVLVDLKVSSSAGGRRENLPSIHPERSNVVRVYKPYHHRHEAEVLQETGVRAMFTVHSVDIVRGLLATIYFTFEGNEKDLLKRMLIYKDEPFIRLVVDKGGLQRYPDPKYVLGSNFVDLGLAYDEENSRVIVFSALDNLIKGGAGQAVQNMNIMFGLDETLGLGYYPLYPV

SEQ ID NO: 48054 - DNA, 993 bp, Pyrococcus kodakaraensis
  CDS (1)..(993): transl_table=11
atgataaaggccgcggttgtcggtgccagcggctacattggtggggaactagtcaggcttttggccatgcaccccgaggtcgagatcacggctataacatcgaggcgcttcgccggccagaaggtacacaaggttcatcccaacctcaggggactcgacttacgcttcaccaacaccaaggagttcgatgccgacgttatcttcttagcggtcccccacgggacctcgatggagataatagacgactacctcgggagcgcgaagatcatagacatgagcgcggacttcaggctgagggaagatctatacagggagtactacggcgagcacaagaggccggagctcatagaagagttcgtctacggtctccccgagctccacaggaaggagataaggaaggccgagctggtcgcaaacccaggctgcaacgcgaccgccacgatcctcgcgctctaccccttcagggagctcacggatgaggcgatagtcgatctcaaggttagctcgtctgcggggggaaggagggagaacgtggcgagcatacatccggagaggagccacgtcgtcagggtatacaagccctaccaccacaggcacgagggcgaggtgatccaggagaccggggttaaggcggccttcaccgtccactccgttgacatcatcaggggacttcttgccaccatctacttccgcttcgaggggagcacgagggagctcttgaggaagcttttggtgtacaaggatgaacccttcgtgaggctcgttaccgacaaaggcggcctccagcgctttccggatccgaagtacgtgatagggagcaacttcgcggacataggctttgcccacgacgaggagaactccagggcgatagtcctctcggccatagacaacctcatcaaaggtggttccgggcaggcggttcagaacatgaacctcatgttcggactcgacgagaggaccggtctgaactactacccggtctaccccgtgtga

SEQ ID NO: 48055 - protein, 330 aa, Pyrococcus kodakaraensis
MIKAAVVGASGYIGGELVRLLAMHPEVEITAITSRRFAGQKVHKVHPNLRGLDLRFTNTKEFDADVIFLAVPHGTSMEIIDDYLGSAKIIDMSADFRLREDLYREYYGEHKRPELIEEFVYGLPELHRKEIRKAELVANPGCNATATILALYPFRELTDEAIVDLKVSSSAGGRRENVASIHPERSHVVRVYKPYHHRHEGEVIQETGVKAAFTVHSVDIIRGLLATIYFRFEGSTRELLRKLLVYKDEPFVRLVTDKGGLQRFPDPKYVIGSNFADIGFAHDEENSRAIVLSAIDNLIKGGSGQAVQNMNLMFGLDERTGLNYYPVYPV

SEQ ID NO: 48056 - DNA, 1014 bp, Ralstonia solanacearum
  CDS (1)..(1014): transl_table=11
atggcattcaaggttttcgtcgacggtcaggaaggcaccaccggccttcgtctgctcgactatctgtcgcagcgcgacgatatcgagctcctgcgcatcgccgaagaccgacgcaaggacccggccgagcgcgccaaattcctgaacgccgccgacgtggccttcctgtgcctgccggacgtcgcttcgcgcgaggccgtgtcgctggtcgacaaccccaacacctgcatcatcgacgccagcaccgcgttccgcacctcggacgactgggcctacggcctgcccgagctggcgcccggccagcgcgagcgcctgcgcaacagcaagcgcatcgccgtgcccggctgccacgccagcgccttcgtgctgctgatgcgcccgctggtggaggccggcatcgttccggcggattaccccatcaccgcgttctcgctgaccggctacagcggcggcggcaagaagatgatcgccgactacctcgccgccgataaccccaagctgcagagcccgcgtccctacgcgctggcgttgacgcacaagcacctgcccgagatgcgcgtgcagagcaagctggccctgccgccgatcttcacgccggtggtgggcaacttcctgaagggtctggccgtgacgatcggcctgcatccgcagcacctggcgagcaaggtcagcccggccgatatcgccaaggtcttcgccgactactaccagggcgagcagttcatccgcgtcgccccggccgacaacgtcgagacgctcgacaacggcttcttcgacgtgcagggcgccaacgacaccaaccgcgccgacctgttcgtgttcggctcggacgagcgcatggtcgtcaccgcccgcctggacaacctgggcaagggcgcggccggcgccgccgtgcagtgcatgaacgtgcacctgggcgtggacgaggcgaccagcctgcacgtcgaagcccccgtcaaggccgaaggcccggcgcacccggtgcgcgaggccgcgccggatttcgcgacctga

SEQ ID NO: 48057 - protein, 337 aa, Ralstonia solanacearum
MAFKVFVDGQEGTTGLRLLDYLSQRDDIELLRIAEDRRKDPAERAKFLNAADVAFLCLPDVASREAVSLVDNPNTCIIDASTAFRTSDDWAYGLPELAPGQRERLRNSKRIAVPGCHASAFVLLMRPLVEAGIVPADYPITAFSLTGYSGGGKKMIADYLAADNPKLQSPRPYALALTHKHLPEMRVQSKLALPPIFTPVVGNFLKGLAVTIGLHPQHLASKVSPADIAKVFADYYQGEQFIRVAPADNVETLDNGFFDVQGANDTNRADLFVFGSDERMVVTARLDNLGKGAAGAAVQCMNVHLGVDEATSLHVEAPVKAEGPAHPVREAAPDFAT

SEQ ID NO: 48058 - DNA, 927 bp, Rhizobium etli
  CDS (1)..(927): transl_table=11
atggcaccgaaaatcttcatcgatggcgaacacggcacaacgggtctgcagatccgcacgcgcatggccggccgccgcgatgtcgagcttctgtccattcccgaggccgagcggcgcaatgccgccatgcgcgaagacatgctgaacagcgccgacatcgccatgctctgcctgcccgacgacgcgtcgaaggaagcggttcagatggtctcggccaataataacgtccgcgttatcgacacgtcgacggcctttcgcgtcaatcccggctgggcctacggctttgccgaaatggacaaagagcaggccgagaaaatcgcttccgcccgcttcgtctcgaacccgggctgctatcccacgggcgctatcggcctcatccggccgcttcgcgccgccggaattctgccggatggctatccggtgacggtcaacgcagtctccggttattccggcggcggcaagcagatgatcgcgcagatggaaaacccggatcatccggatgcgatcaccgcgccgcatttcctttatggcctgccgctcactcacaaacatgtgcccgaaatgaccgtgcacggcctgctcgaccgcgcaccgatcttctcgccgtcggtcggcaagttcgcgcagggcatgatcgtgcaggtgccgctgcatctcgacgatctcgccgagggtacgacgatggaaagcatccatgccgcactcgtcgcgcattatgccggacaggaaatcgtcaccgtcgtgccgctttccgacagcaaggcgcttgcccgcgtcaatgccgtcgaactcgaaggcaaggacacgatgaagctcttcgtcttcggcacgccgggcggttcccaggtcaatctggtggcgctgctcgacaatctcggcaaggcgcctcggggggtgcagaacatggacctgatgctcgcctcctga

SEQ ID NO: 48059 - protein, 308 aa, Rhizobium etli
MAPKIFIDGEHGTTGLQIRTRMAGRRDVELLSIPEAERRNAAMREDMLNSADIAMLCLPDDASKEAVQMVSANNNVRVIDTSTAFRVNPGWAYGFAEMDKEQAEKIASARFVSNPGCYPTGAIGLIRPLRAAGILPDGYPVTVNAVSGYSGGGKQMIAQMENPDHPDAITAPHFLYGLPLTHKHVPEMTVHGLLDRAPIFSPSVGKFAQGMIVQVPLHLDDLAEGTTMESIHAALVAHYAGQEIVTVVPLSDSKALARVNAVELEGKDTMKLFVFGTPGGSQVNLVALLDNLGKAPRGVQNMDLMLAS

SEQ ID NO: 48060 - DNA, 927 bp, Rhizobium loti
  CDS (1)..(927): transl_table=11
atgaaaccgaaaatcttcatcgacggcgagcacggcaccaccggcctgcagatccgggcgctgcttgccgagcgtggcgacctggagatcatttccattcccaccgagcgccgcaaggagacggcggcgcgcgccgaattcctcaatgccgccgatatcgcgatcctgtgcctgccggacgatgcggcgaaggaaagcgtctcgctgatcaccaacgacaccaccaaggtcatcgatgcgtcgaccgcgcatcgcgtcgccgaaggctgggcctatggcttcgccgagatggacaaggaacaagccaaggcgatcgccacggccaaacgcgtcgccaatcccggctgctggccgcagggaccgatcgcaacgctcaggccactggtcacatcaggcctgcttccggccgatttcccgatcaccgtcaacggcatttccggctattcgggcggcggacgcccgatgatcgaggactatgtcgccaaaggcgaggacgcctcggagttcctgccctatggcctgaccctgcagcacaagcatgtgccggaactgcgggcctatgcaaaactatcgcatgacccaatcatgcagccggcggtcggcaatttcgctcagggcatgatcaccgtggtgccgctgcagctcggcggcctcgacagtgtaccgacgggcgcggagcttcatgcggccattgccgaccattttgccgccatcaagggcggtgtggtcgaggtggcgccctatgcgcatctggagcgcatgccggagatcgatcccgagatctacaacggcaccaaccgcatgaaggtctatgtctttgccaacgacaaacgcgcgcaggcgctgctgctggcggtctacgacaatctcggcaagggtgcttcgggcgccgccgtccagaacatggacctgatgctcgggctttga

SEQ ID NO: 48061 - protein, 308 aa, Rhizobium loti
MKPKIFIDGEHGTTGLQIRALLAERGDLEIISIPTERRKETAARAEFLNAADIAILCLPDDAAKESVSLITNDTTKVIDASTAHRVAEGWAYGFAEMDKEQAKAIATAKRVANPGCWPQGPIATLRPLVTSGLLPADFPITVNGISGYSGGGRPMIEDYVAKGEDASEFLPYGLTLQHKHVPELRAYAKLSHDPIMQPAVGNFAQGMITVVPLQLGGLDSVPTGAELHAAIADHFAAIKGGVVEVAPYAHLERMPEIDPEIYNGTNRMKVYVFANDKRAQALLLAVYDNLGKGASGAAVQNMDLMLGL

SEQ ID NO: 48062 - DNA, 999 bp, Rhizobium meliloti; identical to SEQ ID NO: 47588
  CDS (67)..(999): transl_table=11

SEQ ID NO: 48063 - protein, 310 aa, Rhizobium meliloti
MKPKIFIDGEHGTTGLQIRVRMAGRTDLELLSIPEAERRNAAMREDLLNSADIAILCLPDDASREAVAMVAGNNRVRIIDTSTAHRVAPDWAYGFAEMDKAQPQRIRDARHVANPGCYPTGAIALIRPLRQAGILPDGYPVTVNAVSGYTGGGKQMIAQMEDDQNPDHIGAPHFLYGLTLKHKHVPEMKMHGLLERAPVFSPSVGKFAQGMIVQVPLYLEDLAAGATLETIHRALVDHYAGQSIVEVVPLDESAKLARIDATELAGSDAMKLFVFGTKGGAHVNLVALLDNLGKGASGAAVQNMDLMLSA

SEQ ID NO: 48064 - DNA, 1041 bp, Rhodopirellula baltica
  CDS (1)..(1041): transl_table=11
atgtcatcatccaatcttcgcgtcgctctcgttggatcgaccggttacaccgcactcgaagtcgcccgtttgctactcacccatcccggtgcggatctggtggttgcgaccagtcgccaagacgagggcaaaccgctgtcggaaattcatccgatgctggccggacgctgcgacgtgacactgcaaccactcgatgcagacgtgatcgcaaaatcggctgacgtggcgatgtgctgcttgcctcacggtgcatccgcagaaagcgtcaagcaattggccgaggctggcatgcgagtgatcgacttcagcgctgacttccggctctcgagtctcgaaacgtaccaacactggtacggcgtcaaacacccatggcctgagcggatcggtgacgtcgtctacggcatgcccgaattcttcgcggacgagattcgtagtgccgacatcgtggccaatccagggtgctatcccacgtccgcaatcatgccgctggctccgctggtgaaggcgggattgatcgaaaccgacgacatcatcgtcgacagtaaatcgggagtctcgggcgccggtcgttcacccaaattgggaacgctctactgtgagaccaacgaatcgatctcagcgtacgcggttggaacccaccgccacgcacccgaaatcgcggacctcgtcgaacgaatcgcaggtgctccgatcgaagtgatgttcacgcctcacttaacgccgatggatcgcggcatcctgtcgaccatttatgtgaaaccagttggcaaggcgggttcggtcgaagatgccgtccgcgcaatgatgagtctgttgcgagacacttactccgaccaaccttgcgttcacgtggtcgatcacttgcccgcaacgaagtacgtcgcaggaaccaaccacgttcaaatctcggtgcgtccatcgggcaaacgagcggtcatcgtttgtgccatcgacaatctcaccaagggtgccagtggtgccgcggtgcaaaacatgaacgtgatgtttggattgccagaaacggctgggctgttgatgtga

SEQ ID NO: 48065 - protein, 346 aa, Rhodopirellula baltica
MSSSNLRVALVGSTGYTALEVARLLLTHPGADLVVATSRQDEGKPLSEIHPMLAGRCDVTLQPLDADVIAKSADVAMCCLPHGASAESVKQLAEAGMRVIDFSADFRLSSLETYQHWYGVKHPWPERIGDVVYGMPEFFADEIRSADIVANPGCYPTSAIMPLAPLVKAGLIETDDIIVDSKSGVSGAGRSPKLGTLYCETNESISAYAVGTHRHAPEIADLVERIAGAPIEVMFTPHLTPMDRGILSTIYVKPVGKAGSVEDAVRAMMSLLRDTYSDQPCVHVVDHLPATKYVAGTNHVQISVRPSGKRAVIVCAIDNLTKGASGAAVQNMNVMFGLPETAGLLM

SEQ ID NO: 48066 - DNA, 1257 bp, Rhodobacter capsulatus
  CDS (229)..(1257): transl_table=11
atgccggtctgcccgttcccaattcgccatcccgccggaccagaccagcgtgtcggccttgacccgtccggcccggatcagatcgcggatcaccaattcgtccaccgggccttcgctcttgcccgcccatgcgtaatgccacgccttcgccatgaaaccctcgcgcaaactttgcttgcgtggcaccttagcctgaggcaggacggggcgacaattgcggagacgaaaatgacccagaaaatcgccatcctcggggcttcgggctataccggcgccgagcttgcccgcatcattgcgacccatcccgagatggagatcacggcgctctcgggcgaccgaaaggccgggatgcgcatgggcgaggtctttccgcatctgcgtcacatcgggctgcccgatctggtgaagatcgaggagatcgacttttccggcatcgatctggccttttgcgcgctgccgcatgcgaccagccaggcggtcatcgccgaattgccgcgggatctgaaggtggtggatctctctgccgatttccggctgcgcgacgcggccgaatatgaaaaatggtatggcaagccgcatgcggcgatggatctgcaggccgaggcggtctatggcctgaccgaattctaccgcgaagagctgaaaacggcgcggctttgcgcgggcaccggctgcaatgccgcggcggggcaatatgcgatccgcccgctgatcgaggcgggtgtgatcgatctggatgaaatcgtcatcgacctgaaggcaggggtgtcgggggccggacgctcgctgaaggaaaaccttttgcatgcggaacttgcgggcggcaccatgccctattcggcgggcggcaagcatcggcatctgggcgaattcgatcaggaattctccaaggtggcggggcggccggtgcgggtgcagttcacgccgcatctgatgcccttcaaccgcgggattctggcgaccgtctatgtccgcggcacccccgaagacatccatgccgcgctggccagccgctatgaaaacgaggttttcctggaggtgctgccctttggtcagctggcctcgacgcgttcggtcgccgggtcgaacttcgtgcatctgggcgtgatcggcgaccggctgccgggccgcgcggtggtgaccgtggcgctcgacaacctcaccaagggctcttcggggcaggcgatccagaacgccaacctgatgctgggcctgcccgaaaccctggggctgatgctggccccggtcttcccgtaa

SEQ ID NO: 48067 - protein, 342 aa, Rhodobacter capsulatus
MTQKIAILGASGYTGAELARIIATHPEMEITALSGDRKAGMRMGEVFPHLRHIGLPDLVKIEEIDFSGIDLAFCALPHATSQAVIAELPRDLKVVDLSADFRLRDAAEYEKWYGKPHAAMDLQAEAVYGLTEFYREELKTARLCAGTGCNAAAGQYAIRPLIEAGVIDLDEIVIDLKAGVSGAGRSLKENLLHAELAGGTMPYSAGGKHRHLGEFDQEFSKVAGRPVRVQFTPHLMPFNRGILATVYVRGTPEDIHAALASRYENEVFLEVLPFGQLASTRSVAGSNFVHLGVIGDRLPGRAVVTVALDNLTKGSSGQAIQNANLMLGLPETLGLMLAPVFP

SEQ ID NO: 48068 - DNA, 1005 bp, Salmonella paratyphi
  CDS (1)..(1005): transl_table=11
atgttgaatacgctgattgtaggcgctagcggttatgcgggcgcagagcttgtaagctacgtaaatcgccacccacatatgaccataaccgctttgaccgtctcagcgcaaagcaatgatgcaggaaagttaatttctgatttacatccgcagttaaaagggattgtcgacctgccattgcaaccgatgtcggatgtacgtgactttagcgcagatgttgatgtggtgttcctggcgacagcgcatgaagtgagccacgatctggcgccgcagtttttacaggccggatgcgtcgtattcgatctttccggcgcgtttcgggtaaacgatcgcgccttctatgaaaagtactacggatttactcatcagtatcctgagctgctggagcaggcggtgtacggtctggcggagtggaatgccgataaactgaacacggcgaatctgattgcggttcctggttgctatccaaccgcagcgcagttgtcgctaaaaccgctgattgacggcgggcttctggatctgacgcagtggccggtaattaatgccaccagcggagtgagcggcgcggggcgcaaagcggcaatatcgaacagtttctgtgaagtgagtttgcaaccgtatggcgtgtttacgcatcgtcatcagccggaaatcgccgcccatctgggcgcggaggtcatcttcaccccgcatctggggaatttcccgcgcgggattctggaaaccattacctgccgcctgaaagcgggagtaacccatgcgcaggtcgccgacgtgttgcaaaaagcctatggcgataaaccgctggtgcgcctgtatgacaaaggcgttccggcgttaaagaacgtcgtcgggctgccgttctgcgatattggttttgccgtccagggcgaacatctgattgtggtggcaaccgaagacaacttgttgaaaggcgcagcggcgcaggcggtgcagtgcgctaatattcgttttggcttcgctgaaacgcagtctcttatttaa

SEQ ID NO: 48069 - protein, 334 aa, Salmonella paratyphi
MLNTLIVGASGYAGAELVSYVNRHPHMTITALTVSAQSNDAGKLISDLHPQLKGIVDLPLQPMSDVRDFSADVDVVFLATAHEVSHDLAPQFLQAGCVVFDLSGAFRVNDRAFYEKYYGFTHQYPELLEQAVYGLAEWNADKLNTANLIAVPGCYPTAAQLSLKPLIDGGLLDLTQWPVINATSGVSGAGRKAAISNSFCEVSLQPYGVFTHRHQPEIAAHLGAEVIFTPHLGNFPRGILETITCRLKAGVTHAQVADVLQKAYGDKPLVRLYDKGVPALKNVVGLPFCDIGFAVQGEHLIVVATEDNLLKGAAAQAVQCANIRFGFAETQSLI

SEQ ID NO: 48070 - DNA, 1005 bp, Salmonella typhimurium
  CDS (1)..(1005): transl_table=11
atgttgaatacgctgattgtaggcgctagcggttatgcgggcgcagagcttgtaagctacgtaaatcgccacccacatatgaccataaccgctttgaccgtctcagcgcaaagcaatgatgcaggaaagttaatttctgatttacatccgcagttaaaagggattgtcgacctgccattgcaaccgatgtcggatgtacgtgactttagcgcagatgttgatgtggtgttcctggcgacagcgcatgaagtgagccacgatctggcgccgcaatttttacaggccggatgcgtcgtattcgatctttccggcgcgtttcgggtaaacgatcgcgccttctatgaaaagtattacggatttactcatcagtatcctgagctgctggagcaggcggtgtacggtctggcggagtggaatgtcgataaactgaacacggcgaatctgattgcggttcctggttgctatccaaccgcagcgcagttgtcgctaaaaccgctgattgacggcgggcttctcgatctgacgcagtggccggtaattaatgccaccagcggggtgagcggcgcggggcgcaaggcggcaatatcgaacagtttctgtgaagtgagtttgcaaccgtatggcgtgtttacgcatcgtcatcagccggaaatcgccgtccatctgggcgcggaggtcatcttcaccccgcatctggggaatttcccgcgcgggattctggaaaccattacctgccgcctgaaagcgggagtaacccatgcgcaggtcgccgacgtgttgcaaaaagcctatggcgacaaaccgctggtgcgcctgtatgacaaaggcgttccggcgttaaagaacgtcgtcgggctgccgttctgcgatattggttttgccgtccagggcgaacatctgattgtggtggcaaccgaagacaacttgttgaaaggcgcagcggcgcaggcggtgcagtgcgctaatattcgttttggcttcgctgaaacgcagtctcttatttaa

SEQ ID NO: 48071 - protein, 334 aa, Salmonella typhimurium
MLNTLIVGASGYAGAELVSYVNRHPHMTITALTVSAQSNDAGKLISDLHPQLKGIVDLPLQPMSDVRDFSADVDVVFLATAHEVSHDLAPQFLQAGCVVFDLSGAFRVNDRAFYEKYYGFTHQYPELLEQAVYGLAEWNVDKLNTANLIAVPGCYPTAAQLSLKPLIDGGLLDLTQWPVINATSGVSGAGRKAAISNSFCEVSLQPYGVFTHRHQPEIAVHLGAEVIFTPHLGNFPRGILETITCRLKAGVTHAQVADVLQKAYGDKPLVRLYDKGVPALKNVVGLPFCDIGFAVQGEHLIVVATEDNLLKGAAAQAVQCANIRFGFAETQSLI

SEQ ID NO: 48072 - DNA, 981 bp, Shewanella oneidensis
  CDS (1)..(981): transl_table=11
atgaaaaacatcgccattatcggcgccagtggttacacaggtgcacaactcacggctttagtccatgcggagtctgaattatcaattcaaggtctgtatgtctctgaaaatagtttagataaaggtagagctttagcagatttgtaccctgtctacagccacattgagttaaccctatcaccgcttaccgaagaagcgaaggccaatatcgtcgctgaggcagatgctgtggtgttagcgactgagcattctgtgagtttgcatttagcggcttggttttatagccaagggttagcggtattcgatttaagcggtgcttatcgtttcagtgacgtggcgcagtatccgaagtggtatggctttgagcatgaatatccagaggttttagccaaagccgtatatggccttgctgagtggaatgctaaagacgtggccgccactaagatgattgctgtgccaggttgttacccaacagcatcactaacagccttgaaaccattaaagaatttactgacttcagcctatccagtgatcaacgctgttagcggtgtaacaggagcgggtcgtaaggcgcagctacataccagtttttgcgaggtcagcctcacaccctacggtgtactaggccacagacatcagcccgaaatcgctactcaactgggacaagaggtgattttcacaccacaccttggcaactttaagcgcggtattctcgcaactatcacggtacagctaaaaccaggcactactaccgccgatgtggctgcggcatacagtgtgtatgaccaagctccactggtgacggtgaaacagaaccagttccctaaagtggatgacgtggtgctgacaccgaattgccacttaggttggaagtttgatgagagcagtggctacctagtggttgctagcgccatcgacaatttgatgaaaggcgcggcaagccaagcgctgcagtgcataaagattcactttaacctttaa

SEQ ID NO: 48073 - protein, 326 aa, Shewanella oneidensis
MKNIAIIGASGYTGAQLTALVHAESELSIQGLYVSENSLDKGRALADLYPVYSHIELTLSPLTEEAKANIVAEADAVVLATEHSVSLHLAAWFYSQGLAVFDLSGAYRFSDVAQYPKWYGFEHEYPEVLAKAVYGLAEWNAKDVAATKMIAVPGCYPTASLTALKPLKNLLTSAYPVINAVSGVTGAGRKAQLHTSFCEVSLTPYGVLGHRHQPEIATQLGQEVIFTPHLGNFKRGILATITVQLKPGTTTADVAAAYSVYDQAPLVTVKQNQFPKVDDVVLTPNCHLGWKFDESSGYLVVASAIDNLMKGAASQALQCIKIHFNL

SEQ ID NO: 48074 - DNA, 1005 bp, Shigella flexneri
  CDS (1)..(1005): transl_table=11
atgttgaatacgctgattgtgggtgccagcggctacgctggcgcagagctagtgacctatgtaaatcgccatccgcatatgaacataaccgctttgactgtttcagcgcaaagcaatgatgcgggaaagttaatctccgatttgcatccgcagctaaaaggcatcgttgagctgccgttgcagccgatgtcggatatcagcgagtttagcccaggggtggacgtagtgtttctcgccaccgcccatgaagttagccacgatttagcgccgcagtttcttgaagcgggctgcgtggtgttcgacctttccggcgcgtttcgtgttaacgacgccaccttctatgaaaaatattacggctttacccatcaatacccggaactgctggaacaggcagcctacggtctggcggagtggtgcggtaataaattaaaagaagcgaatttgattgcggtgccaggctgttatccgacggcggcacagctggcgctgaaaccgttgattgatgccgatcttcttgacctcaatcagtggccggtgatcaacgccaccagcggcgtgagcggtgcaggacgtaaggcagcgatttcaaatagtttttgtgaagttagcctgcaaccgtatggcgtctttactcatcgccatcaaccagagatcgccacacacctcggtgctgacgttatcttcaccccacatctgggcaatttcccgcgcggcattctcgaaaccattacctgccgcctgaaatcgggtgtgacccaggcgcaagtcgcgcaagcgttacagcaggcgtatgcccataaaccgctggtgcggctgtatgacaaaggcgttccggcgctgaaaaatgtcgttgggctgccattttgcgatatcgggtttgccgttcagggcgagcatctgattattgtggcgaccgaagacaacttactgaaaggcgcggcggcacaagcggtacagtgcgccaatattcgtttcggctatgcggaaacgcagtctcttatttaa

SEQ ID NO: 48075 - protein, 334 aa, Shigella flexneri
MLNTLIVGASGYAGAELVTYVNRHPHMNITALTVSAQSNDAGKLISDLHPQLKGIVELPLQPMSDISEFSPGVDVVFLATAHEVSHDLAPQFLEAGCVVFDLSGAFRVNDATFYEKYYGFTHQYPELLEQAAYGLAEWCGNKLKEANLIAVPGCYPTAAQLALKPLIDADLLDLNQWPVINATSGVSGAGRKAAISNSFCEVSLQPYGVFTHRHQPEIATHLGADVIFTPHLGNFPRGILETITCRLKSGVTQAQVAQALQQAYAHKPLVRLYDKGVPALKNVVGLPFCDIGFAVQGEHLIIVATEDNLLKGAAAQAVQCANIRFGYAETQSLI

SEQ ID NO: 48076 - DNA, 1029 bp, Silicibacter pomeroyi
  CDS (1)..(1029): transl_table=11
atgacccacaagatcgcaattctgggtgccagcggttacaccggtgccgaactggtgcggctgatcgccgaacatccgaacatggaaattgtcgccctgtcgggcgagcgcaaggccgggcagagcatggccgaggtgttcccgcatttgcgtcacctggacctgcccgtgctgtgcaagatcgacgagatcgactttgccggggttgacctgtgcttttgcgccctgccgcacaagaccagccaggaggtgatccgcgcgctgcccgcaacgctcaagatcgtcgatctgagcgccgatttccggctgcgcgaccccgaggcctatcgcacatggtatggcaacgaacatgtggcgctggagcagcaggcagaggcggtttatggcctgaccgagttttaccgtgaccagatccgcaccgcgcggctggtggcaggaaccggctgcaacgcggccaccgggcaatatgtgctgcggccgctgatcgccgccggtgtcatcgacctggacgagatcatcctcgatctgaaatgcgcggtgtccggcgcggggcgcagcctgaaagagaacctgctgcacgccgagttgagcgagggcgccaatgcctatgcggtgggcggcacccaccggcatctgggtgagttcgaccaggaattctcggcgctggccgggcgcccggtgcaggtgcagttcaccccgcatctgatccccgcgaacaggggcatcctggccaccacctatgtgcgcggcgatgcgcaaaccgtgtttcagacgctggcggctgcctatgcggacgagccctttgtgcatgtgctgccctttggcgagacaccctcgacccatcatgtgcgcggctcgaaccattgccatatcggggtgacgggtgatcgtatcgcggggcgggccatcgtgatcgcggcgctggataacctgacaaaaggtagcagtggtcaggccttgcagaacgcaaacctgatgttaggtgaaacagagaccaccgggctgaccatggccccgctattcccgtga

SEQ ID NO: 48077 - protein, 342 aa, Silicibacter pomeroyi
MTHKIAILGASGYTGAELVRLIAEHPNMEIVALSGERKAGQSMAEVFPHLRHLDLPVLCKIDEIDFAGVDLCFCALPHKTSQEVIRALPATLKIVDLSADFRLRDPEAYRTWYGNEHVALEQQAEAVYGLTEFYRDQIRTARLVAGTGCNAATGQYVLRPLIAAGVIDLDEIILDLKCAVSGAGRSLKENLLHAELSEGANAYAVGGTHRHLGEFDQEFSALAGRPVQVQFTPHLIPANRGILATTYVRGDAQTVFQTLAAAYADEPFVHVLPFGETPSTHHVRGSNHCHIGVTGDRIAGRAIVIAALDNLTKGSSGQALQNANLMLGETETTGLTMAPLFP

SEQ ID NO: 48078 - DNA, 1032 bp, Staphylococcus aureus
  CDS (1)..(1032): transl_table=11
atgattaaagtaggtatcgttggcggtagcggttatggcgcaattgaattaattcgattgttacaaacacatcctcatgtaacgattgcacacatctactcacattcaaaagtagatgaaccgttgaaattaacatttccacatttacaacatattatgcaacatttcgaagcacttacagtggacaataatgactgtgatgtaattttctttgcgacaccagcacccgtaagtaaaacatgtatccctcccttagtagaaaaaggtattcatgttatcgatttatctggcgcatttagaattaagaatcgtgaaatatatgaagcatattacaaagaaactgctgcagcacaagatgatttgaatcatgctatttacagcatttcagaatggcaatcgtttgataacaatggaacgaagctcatttctaatcctggctgtttccctacagcaacattattagcattacatccacttattagcgaaaaaatagtagatttgtcatctattattattgatgctaagaccggcgtgtcaggtgctggtcgttcattatcacaacgtgttcatttttcagaaatgaatgaaaatctaagtgcttatgcaatcggaaaccataaacacaaaccggaaatcgagcaatatttatctatcattgcgggtcaagatgtatcagtcatatttacaccacatctcgtaccaatgacacgaggtattttatcaacaatttatgtcaaattttcatctgaatatacgactgaatcattacataaattaatgacctcttattatgctaatcagccatttgtcagaattagagatattgggacttttccaaccacaaaagaagtactcggtagtaactactgcgatatcggtatctatgtagatgaaacaacacaaacagcaattttagtatcagtgattgataaccttgtcaaaggcgcaagtggtcaagccattcaaaatttaaatatattatatgattttgaagtaacgactggcctaaatcaatcaccagtttatccataa

SEQ ID NO: 48079 - protein, 343 aa, Staphylococcus aureus
MIKVGIVGGSGYGAIELIRLLQTHPHVTIAHIYSHSKVDEPLKLTFPHLQHIMQHFEALTVDNNDCDVIFFATPAPVSKTCIPPLVEKGIHVIDLSGAFRIKNREIYEAYYKETAAAQDDLNHAIYSISEWQSFDNNGTKLISNPGCFPTATLLALHPLISEKIVDLSSIIIDAKTGVSGAGRSLSQRVHFSEMNENLSAYAIGNHKHKPEIEQYLSIIAGQDVSVIFTPHLVPMTRGILSTIYVKFSSEYTTESLHKLMTSYYANQPFVRIRDIGTFPTTKEVLGSNYCDIGIYVDETTQTAILVSVIDNLVKGASGQAIQNLNILYDFEVTTGLNQSPVYP

SEQ ID NO: 48080 - DNA, 1026 bp, Staphylococcus epidermidis
  CDS (1)..(1026): transl_table=11
atgcatatttctatagtaggtatcacaggctatacaggactagaattgttaagattagcacttaatcaccctcatgtaacagtttcatcgattcatgctacaaaagaagtgggagtgcaaatttctgatatattccctcatttgaaaggtatttttgataaagaaattcaggttttcgacagtgaatttattatgacacattcagatttggtattttttgctactccgagtggcgttgcaaaagatttatccaaaaatttcgttaaaaataattttcctgttatagacttatcaggtgaccatcgtttatctccagatgtttatctcaaatggtataaaaaatcaccgtgtactgttgatatacaaaagcgttttacatatggtctctcagaagtaatgaatattagtcatcgcaatagatttattgctaaccctggttgttatgcaactgcaactgaattagcgctatatcccataatcagcaatcatttaatccgtgttgattctataattgttgatgctaaaagtggtcttactggagctggtaaaaaattaaatcagtcatcgcattacgtaaatgtaaacaataattatgtgacgtataaacttaataaacatcaacatattcctgaaattgtacaaacgttgcagttttttaacaaaagtttacagaatattcagttttcgacatcgcttattccggttaatagaggtattgttgcaactatatacacacggcttgaaaacggagttaaaataaatcaaatagaatctacctacaaggatgtatataaaaataagcctttcataagaattaaagatggattaccacagttaaatgaagtaataggaacaaattacactgatattggttttgtttataacgaaaccacgggtgttttaacaatttcatcagttattgataatttaattaaaggtgccgctggacaagcaattcaaaacatgaatctgatgtttaatttcgacgaaactgatggtttaattttggcgcctttatatatctaa

SEQ ID NO: 48081 - protein, 341 aa, Staphylococcus epidermidis
MHISIVGITGYTGLELLRLALNHPHVTVSSIHATKEVGVQISDIFPHLKGIFDKEIQVFDSEFIMTHSDLVFFATPSGVAKDLSKNFVKNNFPVIDLSGDHRLSPDVYLKWYKKSPCTVDIQKRFTYGLSEVMNISHRNRFIANPGCYATATELALYPIISNHLIRVDSIIVDAKSGLTGAGKKLNQSSHYVNVNNNYVTYKLNKHQHIPEIVQTLQFFNKSLQNIQFSTSLIPVNRGIVATIYTRLENGVKINQIESTYKDVYKNKPFIRIKDGLPQLNEVIGTNYTDIGFVYNETTGVLTISSVIDNLIKGAAGQAIQNMNLMFNFDETDGLILAPLYI

SEQ ID NO: 48082 - DNA, 1026 bp, Staphylococcus epidermidis
  CDS (1)..(1026): transl_table=11
atgcatatttctatagtaggtatcacaggctatacaggactagaattgttaagattagcacttaatcaccctcatgtaacagtttcatcgattcatgctacaaaagaagtgggagtgcaaatttctgatatattccctcatttgaaaggtatttttgataaagaaattcaggttttcgacagtgaatttattatgacacattcagatttggtattttttgctactccgagtggcgttgcaaaagatttatccaaaaatttcgttaaaaataattttcctgttatagacttatcaggtgaccatcgtttatctccagatgtttatctcaaatggtataaaaaatcaccgtgtactgttgatatacaaaagcgttttacatatggtctctcagaagtaatgaatattagtcatcgcaatagatttattgctaaccctggttgttatgcaactgcaactgaattagcgctatatcccttaatcagcaatcatttaatccgtgttgattctataattgttgatgctaaaagtggtcttactggagctggtaaaaaattaaatcagtcatcgcattacgtaaatgtaaacaataattatgtgacgtataaacttaataaacatcaacatattcctgaaattgtacaaacgttgcagttttttaacaaaagtttacagaatattcagttttcgacatcgcttattccggttaatagaggtattgttgcaactatatacacacggcttgaaaacggagttaaaataaatcaaatagaatctacctacaaggatgtatataaaaataagcctttcataagaattaaagatggattaccacagttaaatgaagtaataggaacaaattacactgatattggttttgtttataacgaaaccacgggtgttttaacaatttcatcagttattgataatttaattaaaggtgccgctggacaagcaattcaaaacatgaatctgatgtttaatttcgacgaaactgatggtttaattttggcgcctttatatatctaa

SEQ ID NO: 48083 - protein, 341 aa, Staphylococcus epidermidis
MHISIVGITGYTGLELLRLALNHPHVTVSSIHATKEVGVQISDIFPHLKGIFDKEIQVFDSEFIMTHSDLVFFATPSGVAKDLSKNFVKNNFPVIDLSGDHRLSPDVYLKWYKKSPCTVDIQKRFTYGLSEVMNISHRNRFIANPGCYATATELALYPLISNHLIRVDSIIVDAKSGLTGAGKKLNQSSHYVNVNNNYVTYKLNKHQHIPEIVQTLQFFNKSLQNIQFSTSLIPVNRGIVATIYTRLENGVKINQIESTYKDVYKNKPFIRIKDGLPQLNEVIGTNYTDIGFVYNETTGVLTISSVIDNLIKGAAGQAIQNMNLMFNFDETDGLILAPLYI

SEQ ID NO: 48084 - DNA, 1029 bp, Streptomyces avermitilis
  CDS (1)..(1029): transl_table=11
atggcggtacgagtggcagtggccggagcaagtgggtacgcgggcggagaagcgctgcggctgctcctcgcgcaccccgaggtcgagatcggcgccctgaccggaaactccaacgccggccagaagctcggcgcgctgcagccgcacctgctgccgctcgccgaccgggtgctccaggagacctcccccgacgtgctcgccgggcacgacgtcgtcttcctcgcgctgccgcacggccagtccgccgccgtcgccgaacagctcggcccggacgtcctcgtcgtggacatgggtgccgacttccggctcaggaaccccgccgactgggagaagttctacggctccccgcacgccgggacctggccctacgggctcccggagctgccgggcggccgcgccgcgctggaggggtccaagcgcatcgcggtgcccggctgctacccgacggccgtctcgctcgcgctcttccccgcgtacgcggccgcactcgccgaaccggaggccgtgatcgtcgccgcctccggcacctccggcgcgggcaaggcggccaagccgcacctgctgggcagcgaggtcatgggctccatgtccccgtacggcgtcggcggcgtccaccgccacacccccgagatgatccagaacctcggcgcggccgccggcgagcccgtctccgtctccttcacgccgaccctcgcgccgatgccccgcggcatcctcgccacctgcaccgcgaaggccagggccggcgtcaccgccgagtccgtacgggccgcgtacgagaaggccttcgccgacgaaccgtttgtgcacctgctccccgaggggcagtggcccgccacggcgtccgtctacggttccaacgccgttcaggtccaggtcgcgtacgacgcggccgcacagcggatcatcgcgatcagcgccatcgacaacctcaccaagggcaccgcgggcggcgccctccagagcatgaacatagccctcgggctccccgaggagctgggcctttccacgatcggagtcgcaccgtga

SEQ ID NO: 48085 - protein, 342 aa, Streptomyces avermitilis
MAVRVAVAGASGYAGGEALRLLLAHPEVEIGALTGNSNAGQKLGALQPHLLPLADRVLQETSPDVLAGHDVVFLALPHGQSAAVAEQLGPDVLVVDMGADFRLRNPADWEKFYGSPHAGTWPYGLPELPGGRAALEGSKRIAVPGCYPTAVSLALFPAYAAALAEPEAVIVAASGTSGAGKAAKPHLLGSEVMGSMSPYGVGGVHRHTPEMIQNLGAAAGEPVSVSFTPTLAPMPRGILATCTAKARAGVTAESVRAAYEKAFADEPFVHLLPEGQWPATASVYGSNAVQVQVAYDAAAQRIIAISAIDNLTKGTAGGALQSMNIALGLPEELGLSTIGVAP

SEQ ID NO: 48086 - DNA, 1026 bp, Streptomyces clavuligerus
  CDS (1)..(1026): transl_table=11
atgacggtaagggtggcggttgcgggtgccagtggctatgccggtggcgaggtggtgcgtctgctgttgggccacccggcggaaagctgggtggcgctgacggcgttctcgcaggcgggccaggcggtgggtcatccgcacctggggccggtggcggggcgggtgttcgagccgatctcggcccaggcgcccctggcggggcacgacgtggtgttcctggcgctgccgccagcgcagtcggccgccctggcggaggaggctggggcccgagtcgtggatcgcaacatgggggcggacttccggctgcgggacgcgggtgtgtgggagcgcttctacggctcgccgtggcgcggatgctggccctacgggctgccggaatccccgggcgcccgggaagccctggcgggggcccggcgaatcgcggtaccgggctgctacccgaccgccgtgaccctggccctgttccccgccgtcggcgccggactggtggaccgggaggtcgtcaccgccgtctcgggcacctccggggcgggccgcgccctgaagccgcatctgctgggcgcggaggttatgggctccgtctccccctacgccgtcggcggcacccaccgccacacccccgagatcgcccagaactcaaccgccgtcacggacggcgaacccgtctcggtgtctttcacaccactgctcgcccccatgccccgcggcatcctcgccacctgctcggcacgtctcaccccgggcaccgacgcacggcaggtccgcgcggtctacgagaagacgtacgcggacgaacccttcgtctccctgctgccggagggcgtgtggccctcgaccggggcggtcctcggctccaaccaggtgcaggtgcaggtggcggtggacccggccgcggaccggctggtcgtcgtcagcgcgatcgacaacctgaccaagggcaccgccggaggcgccctccagagcatgaacctcgccctcggcctccccgagaccaccggcctcccccgaaccggcctcgccccctga

SEQ ID NO: 48087 - protein, 341 aa, Streptomyces clavuligerus
MTVRVAVAGASGYAGGEVVRLLLGHPAESWVALTAFSQAGQAVGHPHLGPVAGRVFEPISAQAPLAGHDVVFLALPPAQSAALAEEAGARVVDRNMGADFRLRDAGVWERFYGSPWRGCWPYGLPESPGAREALAGARRIAVPGCYPTAVTLALFPAVGAGLVDREVVTAVSGTSGAGRALKPHLLGAEVMGSVSPYAVGGTHRHTPEIAQNSTAVTDGEPVSVSFTPLLAPMPRGILATCSARLTPGTDARQVRAVYEKTYADEPFVSLLPEGVWPSTGAVLGSNQVQVQVAVDPAADRLVVVSAIDNLTKGTAGGALQSMNLALGLPETTGLPRTGLAP

SEQ ID NO: 48088 - DNA, 1029 bp, Streptomyces coelicolor
  CDS (1)..(1029): transl_table=11
atggcggtacgtgcggcggtggccggagcgagtgggtatgcgggcggtgagctgctgcggctgctcctgacccatcccgaggtcgagatcggcgccctgaccggcaactccaacgcgggtcagcggctgggtgcccttcagccgcatctgctgccgctggccgaccgggtgctggaggcgaccacccccgaggtgctcggcggtcacgacgtcgtcttcctcgcgctgccgcacgggcagtccgccgccgtcgccgagcagctcggaccggacgtcctcgtcgtcgacatgggcgccgacttccggctgaaggacgccggtgactgggagcggttctacggctccccgcacgccggcacctggccctacggcctccccgaacttccgggtgcccgcgccgcgctggaggggtccaagcgcatcgcggtgcccggttgctaccccacggccgtctccctggccctcttcccggcgtacgccgcgtcgctggccgagcccgaggccgtgatcgtcgccgcctccggcacctccggcgcgggcaaggcggccaagccgcacctgctgggcagcgaggtcatgggctccatgtcgccgtacggcgtcggcggcggccaccggcacacccccgagatgatccagaacctcggcgcggtcgcgggcgagccggtcaccgtctccttcactccgaccctcgcgccgatgccgcgcggcatcctcgccacctgcaccgcgaaggcgaagcccggggtcaccgccgagtcggtgcgcgccgcctacgagaaggccctcgccgacgaaccgttcgtgcacctgctgcccgagggccagtggcccgcgaccgcctccgtgtacggctccaacgccgtccaggtacaggtcgcccacgacgccgccgccggccgcatcatcgccatcagcgccatcgacaacctggccaagggcaccgcgggcggtgccgtccagagcatgaacctcgccctcggtctcgacgagaccaccggactgacgacgatcggagttgcgccgtga

SEQ ID NO: 48089 - protein, 342 aa, Streptomyces coelicolor
MAVRAAVAGASGYAGGELLRLLLTHPEVEIGALTGNSNAGQRLGALQPHLLPLADRVLEATTPEVLGGHDVVFLALPHGQSAAVAEQLGPDVLVVDMGADFRLKDAGDWERFYGSPHAGTWPYGLPELPGARAALEGSKRIAVPGCYPTAVSLALFPAYAASLAEPEAVIVAASGTSGAGKAAKPHLLGSEVMGSMSPYGVGGGHRHTPEMIQNLGAVAGEPVTVSFTPTLAPMPRGILATCTAKAKPGVTAESVRAAYEKALADEPFVHLLPEGQWPATASVYGSNAVQVQVAHDAAAGRIIAISAIDNLAKGTAGGAVQSMNLALGLDETTGLTTIGVAP

SEQ ID NO: 48090 - DNA, 1023 bp, Streptococcus mutans
  CDS (1)..(1023): transl_table=11
atgaaagtttcgattgtcggtattacaggatatagtggattagaattagtccgaatcttaaatggccatcagaaagttgagctcgtatctgtccatgctactaaggagattggaacaaaattatctgatatttattcatatttaaaaggaatttgtgatttagaaattcaatcttttgatagtcaaaaaataatggcgacagctgatttggtcttttttgctacccccagcggtgtcgctaaagaattagctaaagacttcattgcagctgattttccagtcattgatatctctggagatcatcgtctgcctgctgctatttatgaaaaatggtataagaaagcagcagctgaacaagcatctttggataaattcacatacgctctggccgaattgacagatgttaagggaaagaaattcattgctaatccaggctgttatgcgacagcaactgaattggctttgcttcctttggttaaggagaaacttattgatgtgaacagtatcatcgtggacgctaagtctggactaacaggagcaggcaaggtcttgtcagagtccagtcattttgtcaatgtccatgataattacgttacttacaagttaaaccgccatcaacatattcctgaaattgtccaagagttgaaacgatttgataacaacttggaacatatccaattttcaacctcgcttttgcctgttaatcgtggcattatggcaacctgttatgtcactttaaaaaagcctttaagcaatgaagccgttagcaaaatttatcaggatctttatgcagataagccttttgtccgcttacagcaagacttgccagaattgcataatgtcattggttcaaatttttgtgatattggctttgcctataatccagtaaccaatgtcctaacagtcatttcggttattgataatctggttaaaggagcagctggtcaggctgttcaaaatctcaatttgatgatgggctgggatgagacagaaggcttcccgatgacacctagttatttataa

SEQ ID NO: 48091 - protein, 340 aa, Streptococcus mutans
MKVSIVGITGYSGLELVRILNGHQKVELVSVHATKEIGTKLSDIYSYLKGICDLEIQSFDSQKIMATADLVFFATPSGVAKELAKDFIAADFPVIDISGDHRLPAAIYEKWYKKAAAEQASLDKFTYALAELTDVKGKKFIANPGCYATATELALLPLVKEKLIDVNSIIVDAKSGLTGAGKVLSESSHFVNVHDNYVTYKLNRHQHIPEIVQELKRFDNNLEHIQFSTSLLPVNRGIMATCYVTLKKPLSNEAVSKIYQDLYADKPFVRLQQDLPELHNVIGSNFCDIGFAYNPVTNVLTVISVIDNLVKGAAGQAVQNLNLMMGWDETEGFPMTPSYL

SEQ ID NO: 48092 - DNA, 1053 bp, Sulfolobus acidocaldarius
  CDS (1)..(1053): transl_table=11
atgataagagtagcagttattggtggatcagggtatacaggtggagaattattaaggctattagctatgcataacaaagtagaagtaacctatataacatccagggaatatgcaggtaaaccgatatcaattattcatccaaacctaagaggattttataatatcaatttttcacagttttcatgggataaaataggagaaaaagccgaggccgtatttttagccttacctcataaagtttctgtagattatgtacctaaacttttggaaatgggactacaggtagtggatttaagtgctgatttcagattgaaaaatccagaattatataaattatggtatgagtttgaccatccgtatcctgatttattaaaaaaggctgtctatggaatcccagagatacactatgaggaattaaaaggggcaaaattaatagcttcacctggttgcaattccacagctactatacttgcagcagcgccattagtatatagtaatatattagataactataggttgattagtgacgtaaaggttggtagtagcgaaggaggggcaaaacctagcgaaggaagtcaccatccggaaagacagaatgctataaggccctatgaagctgaggggcatagacatgctgcagaagttgagcaagagttacagtatatatcgaaaaaagaagtaaaaataagtttagtacctcatgctgttagcacaattagaggtgcacttgcgtctgtacatggttggcttatttcggatgatctcaacgagattgaattttggaaaaaaattattgaattttatagaggtagaaaattcgttagagtaatcagaggcaatatacatccatacccagatccaaaatatgtgattggaagtaacttcgtagatattggattcgcagtagagaagagagtaggtagaataactatgttttcagcaatagacaatcttatgaaaggagctgcaggtcaggcagttcaagcttttaatgtttcaagaggtttcgaagaagacgaaggtttaagaattcctccattgaggcctgcttaa

SEQ ID NO: 48093 - protein, 350 aa, Sulfolobus acidocaldarius
MIRVAVIGGSGYTGGELLRLLAMHNKVEVTYITSREYAGKPISIIHPNLRGFYNINFSQFSWDKIGEKAEAVFLALPHKVSVDYVPKLLEMGLQVVDLSADFRLKNPELYKLWYEFDHPYPDLLKKAVYGIPEIHYEELKGAKLIASPGCNSTATILAAAPLVYSNILDNYRLISDVKVGSSEGGAKPSEGSHHPERQNAIRPYEAEGHRHAAEVEQELQYISKKEVKISLVPHAVSTIRGALASVHGWLISDDLNEIEFWKKIIEFYRGRKFVRVIRGNIHPYPDPKYVIGSNFVDIGFAVEKRVGRITMFSAIDNLMKGAAGQAVQAFNVSRGFEEDEGLRIPPLRPA

SEQ ID NO: 48094 - DNA, 1059 bp, Sulfolobus solfataricus
  CDS (1)..(1059): transl_table=11
atgaaagataaagttagagttgccgtagttggaggttcaggatatacgggcggagaattactaagaatattagttacacatccgaagacagaaatatcagtcataacttctagagaatatgcgggaaaaccagtatcattgatacatccgaatttaagaggactaatatctcttaattttacaaatttctcaatagataagatctcagacaaagctgacgcaatttttcttgctctacctcatggagtatcgttaaattacgcgcctaaattactagatttaggattgacagtcgtggatttaagtgcagattttagactcaaaaatccagaactttataaaatatggtacaattatgaacatccttatccagatctattagacaaggcggtatatgggctaccagagttacattacgaggaattaaaaaatgctaaacttatagcatccccaggctgtaatgcaactgcaactatactagcgttagccccaattgtggcaacaaaaataactgacgagaaaaagttcatcagcgacgtaaaagtaggcagtagcgaaggaggagcaaaaccatcagaaggtagccatcatccagagagacaaaatgcaattagaccttatgaagctgaagggcatagacacgcagcagaggctgaacaagaactgtctagaatagctaaagcaaatataagcgtgagtattgtccctcatgcagtgagtagcatcagaggagccttagcgtctgcacatacgtggttaactaatgaactagaagagattgaaatatggaaaaaaatagctgagttttataggggtaagagattcattagaataattaggggaaacatacacccatatcctgatccaaaattcgttatcggaagcaactttgctgatataggattcgctgtagaaaagagaatttcaagactaacaacgttctccgctatagataatttaatgaaaggcgctgctggccaagctgtccaagctttcaatatttctatgggatttaacgaagatgacggattaaaactagtacccttgaggcctgcctaa

SEQ ID NO: 48095 - protein, 352 aa, Sulfolobus solfataricus
MKDKVRVAVVGGSGYTGGELLRILVTHPKTEISVITSREYAGKPVSLIHPNLRGLISLNFTNFSIDKISDKADAIFLALPHGVSLNYAPKLLDLGLTVVDLSADFRLKNPELYKIWYNYEHPYPDLLDKAVYGLPELHYEELKNAKLIASPGCNATATILALAPIVATKITDEKKFISDVKVGSSEGGAKPSEGSHHPERQNAIRPYEAEGHRHAAEAEQELSRIAKANISVSIVPHAVSSIRGALASAHTWLTNELEEIEIWKKIAEFYRGKRFIRIIRGNIHPYPDPKFVIGSNFADIGFAVEKRISRLTTFSAIDNLMKGAAGQAVQAFNISMGFNEDDGLKLVPLRPA

SEQ ID NO: 48096 - DNA, 1092 bp, Sulfolobus tokodaii; identical to SEQ ID NO: 47586
  CDS (43)..(1092): transl_table=11

SEQ ID NO: 48097 - protein, 349 aa, Sulfolobus tokodaii
MIRVAVIGGSGYTGGELLRILAVHPKIEVTYVTSREYAGKPITLVHPNLRGFYNMNFSQFSFDKLGDKADAVFLGLPHKVSLEYVPKILEMGIQVIDLSADFRLKDPTLYKIWYGYEHPYPDLLKKAVYGLPELHYEELKNAKLIASPGCNATATILAGAPLVASSLLETYKLISDVKVGSSEGGAKPHEGSHHPERQNAIRPYEADGHRHAAEAEQELSLIAKRDVKVSLVPHAVSSVRGALASVHGWLSSDISEMDMWKKSIEFYKGRKFIRIIRSNIHPYPDPKFVIGSNFADIGFAIEKRMQRITMFSAIDNLMKGAAGQAVQAFNISRGFEEDEGLRIPPLRPA

SEQ ID NO: 48098 - DNA, 1053 bp, Synechococcus elongatus
  CDS (1)..(1053): transl_table=11
atgggcgatcgcgtgacggtggggattgtgggtgcctcaggctatgggggcgtccaactggtgcgcttactccttgagcatcccaaggtggatattgtttatctcggtggtgaaggcagtgctggtcgtccctacacggagttatatccccacttgcaggggcgggtgaatctcacagtggagcccgtatccgtggaggtcattcgcgatcgcgcccaagtggtgtttctctccctgcccaatggcattgcctgtcagcttgccccgcaacttcttgagcagggctgtaaggtgctggatctatcggcagactatcgctttcaggatttgcaaacctatacccagtggtacggtgaacccagggaagatcaggctacggcacaaaaggcggtctatggcttgccagaactctatcgcgatcgcattcgccaaagtgccctcattggctgtccggggtgttaccccaccgctagtttgctagcactggcgcctttaatgaagcaaggcctgattgaacccaatacggcaattattgatgccaagtccggtacctctggcggcgggcgtcagggcaaaattaatctcctccttgcagaagctgacaactccctggccccttacaatgttgcccgtcaccgccacaccccagaaattgaagccatttgtagtgatttggctggccaaagtgttcttgtgcagtttacaccccacctcgtccccatgccgcgggggatcttggccactgtctatgccacactgcgggatccgggtctggtacgtgaagatttgatcaccatctaccaagccttttatcgccattccccctgggtcaatatcctgccccccggcctctatccccaaaccaaatgggcctggggcaccaatgcctgctttattggcattgaggtggatgagcgcaccggccgcgttattgtcatgtctgccattgataaccttatgaagggccaagcgtcccaagcggtgcagtgcttgaatttgatgatgggttggccagagacgatgggcttaccgcaggttgctttttatccctaa

SEQ ID NO: 48099 - protein, 350 aa, Synechococcus elongatus
MGDRVTVGIVGASGYGGVQLVRLLLEHPKVDIVYLGGEGSAGRPYTELYPHLQGRVNLTVEPVSVEVIRDRAQVVFLSLPNGIACQLAPQLLEQGCKVLDLSADYRFQDLQTYTQWYGEPREDQATAQKAVYGLPELYRDRIRQSALIGCPGCYPTASLLALAPLMKQGLIEPNTAIIDAKSGTSGGGRQGKINLLLAEADNSLAPYNVARHRHTPEIEAICSDLAGQSVLVQFTPHLVPMPRGILATVYATLRDPGLVREDLITIYQAFYRHSPWVNILPPGLYPQTKWAWGTNACFIGIEVDERTGRVIVMSAIDNLMKGQASQAVQCLNLMMGWPETMGLPQVAFYP

SEQ ID NO: 48100 - DNA, 1059 bp, Synechococcus sp
  CDS (1)..(1059): transl_table=11
atgcacgagtcttcccgtcttcccgtcggtattattggcgcttcaggctatggtggcgtacagctcgtccggcttttgcaagatcacccgcaactggaggttgcttaccttgggggcgatcgcagtgccggtaaagagtttgctgagctctatccccacctcggcccccacctcaacctgacgatcgaagcgatcgacgtcgaccgcattgctgagcgttgtgcggcagtattcctctcgcttcccaatggtttggcctacgatctagcgccggccttactggagcggggctgcaaggttttggacctctcggcagactatcgcttccacgacctcaagacctatgcactttggtacggcggcgatcgccaagatgccgcggtcgcgcacacggccatttacggtctgccagagctctatcgcaaccgcattgccaatgcccagctgattggctgccctggttgctatcctacggccagcttgctggcgctagcaccggctcttaaacagggcttgatcgaccccgacacgattgtgatcgatgccaaatcgggcacttctggggccggccgccaggcgaagaccaatgccttgctcgcggaagcaggtaattccgtcggggcctatggcgtcgctcggcaccgccatactcccgaaatcgagcaaatctgtagcgacctcagcggtcatgaggtgctgttgcaattcacgccccacctaatgccgatggtacgggggattcacgccacgatctacgccaagctgcgtgatcccaatctgacgactgaagattgcttgacggtctatcaggccttttaccgcaacgctcccatggtcaaggtactgacgcacgggacttatccacaaaccaagtgggcagcgggcactaacctctgctatctcggcttagaggtcgatgctcgcacggggcgaattgtcttgctatccgcgatcgataacttgatcaaaggacaggcaggacaggcgattcaatgcctgaacctaatgcagggctgggaggaaggcttaggtctgcccacactctgctactacccctag

SEQ ID NO: 48101 - protein, 352 aa, Synechococcus sp
MHESSRLPVGIIGASGYGGVQLVRLLQDHPQLEVAYLGGDRSAGKEFAELYPHLGPHLNLTIEAIDVDRIAERCAAVFLSLPNGLAYDLAPALLERGCKVLDLSADYRFHDLKTYALWYGGDRQDAAVAHTAIYGLPELYRNRIANAQLIGCPGCYPTASLLALAPALKQGLIDPDTIVIDAKSGTSGAGRQAKTNALLAEAGNSVGAYGVARHRHTPEIEQICSDLSGHEVLLQFTPHLMPMVRGIHATIYAKLRDPNLTTEDCLTVYQAFYRNAPMVKVLTHGTYPQTKWAAGTNLCYLGLEVDARTGRIVLLSAIDNLIKGQAGQAIQCLNLMQGWEEGLGLPTLCYYP

SEQ ID NO: 48102 - DNA, 1074 bp, Synechococcus sp
  CDS (1)..(1074): transl_table=11
atggccggtggtgggcagggtcgtgtcgcggtgatcggtgcatcgggctatggcgggctgcagaccatcaggcttctgcaggaccatccgtcattgaccgtgacgttcctcggcggagaacggagtgcaggacggcgctggagctcgatctgctcatttctgccgcttccggaagaccccgttgttcagtccgctgatgctgagcgcatcgctgcggccgcggattacgccgtcctcagcctccccaatggattggcctgtcaactcgcaccggagcttctgcagcgaggtgtgcgggtggtggatctctcggccgactttcgctaccgatcgctggagcagtggagtcaggtgtatgcccaggaggccaaccgtctctcacgggaggattcggaactctgccaacaggcggtgtatggattgccggagtggcatggtcctgccatcgctgaggccaggttggtggcagcgcccggttgtttcccgaccgcaagcctgcttccgttgcttcccttcctgaagcagggcctgatcgacaccgacggcatcgtcatcgatgccaaaacaggcacatccggcggcggtcgtgttcctaaggaggcgatgttgctggcagaggcctcagagtcgattgctccttacggcgtgatcggacatcggcacacctcggaaatcgaacagatggcccgggaggttgccggtcaggatgttcggttgcagttcactccccatctcgtgccgatggtgcgtggcctgttatccaccgtgtacgcacgcctgcgggatcctggtctgacggctgaggactgcacaacggttctcgaagcggtgtatcgccaccacccctgcgtttccgtgctgccggtgggcacctatccagccaccaagtgggcgcggcacaccaatcgcgcgttggtctccgttcaggtggacacaagaaccgggcagatgatcctgatgagcgccatcgacaacctgatcaaaggtcaggctggacagggggtgcaatgcctgaacctgatgcatggcctgccgccggagacagggcttcccttgcagagtttttatccctga

SEQ ID NO: 48103 - protein, 357 aa, Synechococcus sp
MAGGGQGRVAVIGASGYGGLQTIRLLQDHPSLTVTFLGGERSAGRRWSSICSFLPLPEDPVVQSADAERIAAAADYAVLSLPNGLACQLAPELLQRGVRVVDLSADFRYRSLEQWSQVYAQEANRLSREDSELCQQAVYGLPEWHGPAIAEARLVAAPGCFPTASLLPLLPFLKQGLIDTDGIVIDAKTGTSGGGRVPKEAMLLAEASESIAPYGVIGHRHTSEIEQMAREVAGQDVRLQFTPHLVPMVRGLLSTVYARLRDPGLTAEDCTTVLEAVYRHHPCVSVLPVGTYPATKWARHTNRALVSVQVDTRTGQMILMSAIDNLIKGQAGQGVQCLNLMHGLPPETGLPLQSFYP

SEQ ID NO: 48104 - DNA, 1020 bp, Thermotoga maritima
  CDS (1)..(1020): transl_table=11
ttgatcagagctggaataataggtgcgacaggttacacaggactggagctcgtcagacttttgaaaaaccaccccgaagcgaagataacctatctgtcctcgaggacctacgccggaaagaaacttgaagaaatcttcccttcgacactggagaacagtattctcagcgagttcgatccagagaaggtctcaaaaaactgcgatgttcttttcacggcgcttccagccggtgcgagttacgatctcgtcagggagctcaaaggtgtgaagataatagatcttggcgcggattttcgtttcgacgacccgggagtgtacagagagtggtacggaaaagagttgtcgggatacgagaacataaaaagagtttacggacttccagaactccatcgtgaggagataaagaatgctcaggtggtgggaaatcccggatgttatccaacgagcgtcatcctcgctctcgctcccgcactgaaacacaatcttgtggatccggaaacgatactggtcgacgcgaaatctggagtttccggggcgggaagaaaagagaaggtagattatctcttctccgaggtgaacgaaagtctcagaccgtacaacgtggcaaaacacagacacgttcctgaaatggagcaggaactcgggaagatctcggggaagaaagtgaacgtggtgttcacacctcatctcgttcctatgacgcgtggaatcctctcgacgatatacgtaaaaacagacaaatccctcgaagagatacacgaagcgtacctcgaattctacaagaatgaaccgttcgttcatgttcttcccatgggaatttatccttcgacgaagtggtgctatggatccaaccacgtcttcatcggtatgcagatggaagaaagaacaaacacgctcatactgatgagcgcaatagacaacctcgtgaagggggcgtcgggacaggcagttcagaacatgaacatcatgttcggtctggacgagacgaagggactcgaattcactccaatatatccgtga

SEQ ID NO: 48105 - protein, 339 aa, Thermotoga maritima
MIRAGIIGATGYTGLELVRLLKNHPEAKITYLSSRTYAGKKLEEIFPSTLENSILSEFDPEKVSKNCDVLFTALPAGASYDLVRELKGVKIIDLGADFRFDDPGVYREWYGKELSGYENIKRVYGLPELHREEIKNAQVVGNPGCYPTSVILALAPALKHNLVDPETILVDAKSGVSGAGRKEKVDYLFSEVNESLRPYNVAKHRHVPEMEQELGKISGKKVNVVFTPHLVPMTRGILSTIYVKTDKSLEEIHEAYLEFYKNEPFVHVLPMGIYPSTKWCYGSNHVFIGMQMEERTNTLILMSAIDNLVKGASGQAVQNMNIMFGLDETKGLEFTPIYP

SEQ ID NO: 48106 - DNA, 1020 bp, Thermotoga neapolitana
  CDS (1)..(1020): transl_table=11
ttgatcagagtcggcatagtgggagccacaggttacacggggatcgaactcttcagacttttgaaaaaacatccttctgcaaagatcgtttacatgtcctccagaacgtacgccggaaagaagatgatggaggtgtatccgtccacgctcgaagaggccgttctggaagacttcgattccagaaagatatcagaaagctgtgatgtggtgttcaccgcccttcccgcgggtgtcagttacagactcgccatggaacttcaaaacgtgaaaatcatcgatctcggtgcggactttcgtttcgacgacccgaacacttacgcggagtggtacggaaacaaacttgaagactacaacagcacagaaagagtatacggccttcctgaactttacagggactcgataaaaaacgccagaattgtgggaaacccggggtgttaccctacgagcgtgatccttgccctcactccggccctgaagtcaggtatcgtggaagttgacacgatcgttgtcgattcaaaatcgggtgtgtcaggggcaggaagaaaagaaacactcgactacaccttctccgaggtgaacgaaaacctgaggccctacaatgtggcaaagcacagacacgttccggagatggagcaagaactaaagaagatagccggaaaggatgtgaaagtgatcttcacaccgcatcttgttcccatgacgcgaggaatcctctccacaatctacgtgaaaacgaatgcttctctggaaaagatccacagaatctaccaggagttttacgctggagagccttttgtgcatgtattacctttaggggtgtttccatcgacgaagtggtgctacggttcgaaccacgttttcataggaatgcagctggaagagagaaccggaacgcccattctgatgagtgccatagacaacctcgtgaagggggcatcgggtcaggcgattcagaacatgaacatcatgttcgatctaaaagaaacggaaggactggaatctcttcccatatacccatga

SEQ ID NO: 48107 - protein, 339 aa, Thermotoga neapolitana
MIRVGIVGATGYTGIELFRLLKKHPSAKIVYMSSRTYAGKKMMEVYPSTLEEAVLEDFDSRKISESCDVVFTALPAGVSYRLAMELQNVKIIDLGADFRFDDPNTYAEWYGNKLEDYNSTERVYGLPELYRDSIKNARIVGNPGCYPTSVILALTPALKSGIVEVDTIVVDSKSGVSGAGRKETLDYTFSEVNENLRPYNVAKHRHVPEMEQELKKIAGKDVKVIFTPHLVPMTRGILSTIYVKTNASLEKIHRIYQEFYAGEPFVHVLPLGVFPSTKWCYGSNHVFIGMQLEERTGTPILMSAIDNLVKGASGQAIQNMNIMFDLKETEGLESLPIYP

SEQ ID NO: 48108 - DNA, 1035 bp, Thermoanaerobacter tengcongensis
  CDS (1)..(1035): transl_table=11
atgataaaagttgggatatttggagcaactggatacactggagtagagcttatgcgccttctttcaaagcatgaaaaagtaaaaatagagtacatttcgtctcaaagttatgcaggaaagtcaatagcagatgtctatccatcccttacagggttttatgacatttctctcgatgatgtagaggtagagaaggcggtttcaaagtgcgatgtagtttttacggcgctacctgcaggttatgcttctaaaattgcaagggaagcggtaaaaaaaggggttaaagtgattgatttgggggcagatttcagatttgacgattattcgacttataaagaatggtatggcggagaatacgatgggtatgatgggataaaaagagcgtatggcttacctgagatttatagagatagtataaaagaagccgatgtagtgggaaatccagggtgctatcctactagtgtgatattagggcttgttcctcttttgaaagagaaggttatagatggaaacataattattgattcaaaatcggggatatcgggagcaggccacagcccgtcacagaagaatatatatgcagaatgtaatgaaagtataagagcatacaatgtggcaaatcacaggcatgtgcccgagatggttcaggaactttccaaggcatcgggagaaaaggtatcggtggtttttgcacctcacttgacacctatgaccaggggaattttgagtacaatgtattgcaagctaagagaaaatttaaatcaagaggaaatttatgaggttttcgctgaattttataaaaatgagtattttgtgaaggtgctaaagcctggggcttatccttctactaaaaatgtatatggttcgaatttttgtcacataggttttgaagttgacaaagcgacaggtactttagttgtaatgactgccattgataacttagtaaaaggagcatcaggtcaagcgatacagaatatgaacataatgttcgaaatagaagaaaaagcagggcttgatatagtgccagtatatccataa

SEQ ID NO: 48109 - protein, 344 aa, Thermoanaerobacter tengcongensis
MIKVGIFGATGYTGVELMRLLSKHEKVKIEYISSQSYAGKSIADVYPSLTGFYDISLDDVEVEKAVSKCDVVFTALPAGYASKIAREAVKKGVKVIDLGADFRFDDYSTYKEWYGGEYDGYDGIKRAYGLPEIYRDSIKEADVVGNPGCYPTSVILGLVPLLKEKVIDGNIIIDSKSGISGAGHSPSQKNIYAECNESIRAYNVANHRHVPEMVQELSKASGEKVSVVFAPHLTPMTRGILSTMYCKLRENLNQEEIYEVFAEFYKNEYFVKVLKPGAYPSTKNVYGSNFCHIGFEVDKATGTLVVMTAIDNLVKGASGQAIQNMNIMFEIEEKAGLDIVPVYP

SEQ ID NO: 48110 - DNA, 1041 bp, Vibrio cholerae; identical to SEQ ID NO: 47576
  CDS (40)..(1041): transl_table=11

SEQ ID NO: 48111 - protein, 333 aa, Vibrio cholerae
MLKTTIIGASGYTGAELALMVHKHPQLTLSGLYVSANSVDAGKSLAQLHGRVAGLIDMPVQALTDVDTVAAECDVVFLATAHEVSHDLAPQFLAQGCQVFDLSGAFRVQSEAFYPTFYGFAHQHSEWLEKAVYGLAEWNAEAIKTSPMIAVAGCYPTASQLAIKPLLVDGLIDTTQWPVINAVSGVSGAGRKATMTNSFCEVSLQPYGVFNHRHQPEIATHLGCEVIFTPHLGNFKRGILATITMKLADGVTEQQVAEAFSKAYQDKPLVRFSNGLPRIQDVEFTPFCDLGWKVQGRHIIVVSAIDNLLKGASSQAMQCLNIHYGFDELTALV

SEQ ID NO: 48112 - DNA, 1005 bp, Vibrio parahaemolyticus
  CDS (1)..(1005): transl_table=11
atgctaaaaaccacaattatcggagccagcggttacaccggcgcagagttagcgttcatggttaataaacacccacaactcacgctatcaggtttatacgtttccgccaacagtgtcgatgcaggaaaaaccattgcacagttacacggtaaattggcgaacgtggttgatatggtggtgaatgcgttgaccgatccaaagcaagttgcgcaagactctgatgtggtttttttagctacggctcatgaggtcagccatgatcttgctcctatctttctcgaagctggatgtcaggtctttgatttgtccggcgcgtttcgtgtcaaaagcgatggcttttacgacaccttttacggctttgagcatcaattcaacaactggctagataaagcggcgtatggcttagcggagtggaaccaagaagagattaaaaacgctcctttagttgcggtagctggctgctacccaacggcgtcgcagttggctattaagccactactcgttgatggtttgttggatactcaacagtggccagtcattaacgcgacaagtggtgtctctggcgcagggcgtaaagcctcaatgaccaacagtttttgtgaggtcagccttcagccttacggtgtatttaatcatcgccaccaaccagaaattgcccagcatttaggatgtgatgtgatttttactcctcatcttggcaactttaaacgcggcattcttgctactgtcacgatgaagttggcgcaaggtgtaacggagcaacaagttgctcaagcttttgaacaagcttatcaaggtaagccagccgtacgcctcaaaggtgatggcattccacgtattcaggatgttgaaaatacccctttctgcgatatcggctggaaggtgcaaggcgaacacatcattgtgatttcagccatcgacaacctacttaaaggtgcatcgagtcaagcgatgcagtgtttaaatattcattacggttacccagaactgacagcgttgctgtag

SEQ ID NO: 48113 - protein, 334 aa, Vibrio parahaemolyticus
MLKTTIIGASGYTGAELAFMVNKHPQLTLSGLYVSANSVDAGKTIAQLHGKLANVVDMVVNALTDPKQVAQDSDVVFLATAHEVSHDLAPIFLEAGCQVFDLSGAFRVKSDGFYDTFYGFEHQFNNWLDKAAYGLAEWNQEEIKNAPLVAVAGCYPTASQLAIKPLLVDGLLDTQQWPVINATSGVSGAGRKASMTNSFCEVSLQPYGVFNHRHQPEIAQHLGCDVIFTPHLGNFKRGILATVTMKLAQGVTEQQVAQAFEQAYQGKPAVRLKGDGIPRIQDVENTPFCDIGWKVQGEHIIVISAIDNLLKGASSQAMQCLNIHYGYPELTALL

SEQ ID NO: 48114 - DNA, 1005 bp, Vibrio vulnificus
  CDS (1)..(1005): transl_table=11
atgttaaaaaccacaatcataggtgccagcggttacacaggcgctgaattggcactgatggtagagaaacacccagagctcacgctagcaggtttgtatgtatccgccaatagcactgatgcgggcaagtgcatttctcaactgcatggcaaacttgcgggtgtgattgaaatgcccgtgttgccgctaacggatccgctcggggtagcccaagactcggatgtgatctttttagcgacggcacatgaagtcagccatgaccttgctccgctctttttgcagcaaggttgtcaggtgtttgatctctcaggtgcattccgtgtgaaaggggatgatttctatactcagttttacggctttgcgcaccagcacagtgagtggttggacaaagcggcatatggtttggctgagtggaatgaagaagccattaaagccagtcaattggtggcggtcgcagggtgttacaccacagcggcacaattggcaattaagccgttgctgatctctcagttagtggataccaatcaatggccggtaattaacgccaccagtggtgtctctggagcaggacgtaaagcgtcgatgaccaatagcttttgtgaagtcagcttacagccttatggcatttttaatcacagacaccaaccggaaatcgttcaccatcttggctgtgatgtgatcttcacgcctcaccttggcaacttcaaacgtggcattttggcgacgatcaccatgaagttgcaggatggtgtgacgaaagaacaagttgcgcacgcttttgcgcaagcctatgacagaaaacctgcggtgcgcctcaaaggggatgttattccacgcattcaggatgtcgaatttaccccattctgcgatcttggctggagggttcaaggtcaacacatcatcgtgatttcggccatcgataacctattaaaaggggcatcgagccaagcgatgcagtgcctaaatattcactacggtttttcaccactaacagccttgctgtaa

SEQ ID NO: 48115 - protein, 334 aa, Vibrio vulnificus
MLKTTIIGASGYTGAELALMVEKHPELTLAGLYVSANSTDAGKCISQLHGKLAGVIEMPVLPLTDPLGVAQDSDVIFLATAHEVSHDLAPLFLQQGCQVFDLSGAFRVKGDDFYTQFYGFAHQHSEWLDKAAYGLAEWNEEAIKASQLVAVAGCYTTAAQLAIKPLLISQLVDTNQWPVINATSGVSGAGRKASMTNSFCEVSLQPYGIFNHRHQPEIVHHLGCDVIFTPHLGNFKRGILATITMKLQDGVTKEQVAHAFAQAYDRKPAVRLKGDVIPRIQDVEFTPFCDLGWRVQGQHIIVISAIDNLLKGASSQAMQCLNIHYGFSPLTALL

SEQ ID NO: 48116 - DNA, 1005 bp, Vibrio vulnificus
  CDS (1)..(1005): transl_table=11
atgttaaaaaccacaatcataggtgccagcggttacacaggcgctgaattggcactgatggtagagaaacacccagagctcacgctagcaggtttgtatgtatccgccaatagcagtgatgcgggcaagtgtatttctcaactgcatggcaaactcgcgggtgtgattgaaatgcccgtgttgccgctaacggatccgctcggggtagcccaagactctgatgtgatctttttagcgacggcacatgaagttagccatgaccttgctccgctatttttacagcaaggttgtcaggtgtttgatctctcaggtgcattccgtgtgaaaggggatgatttctatactcagttttacggctttgcgcaccagcacagtgaatggttggacaaagcggcatatggtttggctgagtggaatgaagaagccattaaagccagccaattggtggcggttgctgggtgttacaccactgcagcccaattggcaattaagccgttgctggtctctcagttagtggataccaatcaatggccggtaattaacgccaccagtggtgtctctggagcaggacgtaaagcgtcgatgaccaatagcttttgtgaagtcagcttacagccttatggcatttttaatcacagacaccaaccggaaatcgttcaccatcttggctgtgatgtgatcttcacgcctcaccttggcaacttcaaacgtggcattttggcgacgatcaccatgaagttgcaggatggtgtgacgaaagaacaagttgcgcacgcttttgcgcaagcctatgacagaaaacctgcggtgcgcctcaaaggggatgttattccacgcattcaggatgtcgaatttaccccattctgcgatcttggctggaaggttcaaggtcaacacatcatcgtgatttcggccattgataacctattaaaaggggcatcgagccaagcgatgcagtgcctaaatattcattacggtttttcaccactaacagccttgctgtaa

SEQ ID NO: 48117 - protein, 334 aa, Vibrio vulnificus
MLKTTIIGASGYTGAELALMVEKHPELTLAGLYVSANSSDAGKCISQLHGKLAGVIEMPVLPLTDPLGVAQDSDVIFLATAHEVSHDLAPLFLQQGCQVFDLSGAFRVKGDDFYTQFYGFAHQHSEWLDKAAYGLAEWNEEAIKASQLVAVAGCYTTAAQLAIKPLLVSQLVDTNQWPVINATSGVSGAGRKASMTNSFCEVSLQPYGIFNHRHQPEIVHHLGCDVIFTPHLGNFKRGILATITMKLQDGVTKEQVAHAFAQAYDRKPAVRLKGDVIPRIQDVEFTPFCDLGWKVQGQHIIVISAIDNLLKGASSQAMQCLNIHYGFSPLTALL

SEQ ID NO: 48118 - DNA, 1014 bp, Wolinella succinogenes
  CDS (1)..(1014): transl_table=11
atgaaaaagattcccgttggaatcgtcggagtgagcggctacacagggttggagcttctgaaaatgcttttagagcatccctatttggagctagtctacgccgctaataccgaagggggtgtgagggtgggcgctcttcactcctcgcttcaaggggtttcagatttgagcgtggagaaggctgatcccaaagaggcggcgaagcgatgtgagctgctctttttggcgctccctcatcaaagtgccatggagtttgccaaagaggtgctctctttggggaaaaaagtcgttgacctttccgcggattaccgcctctctttagagcgctatgaggcacactactgcccccatcttgacaaagagaatctctcccatgccgtctatggactcattgagtgggcaagagaggagatcgtccaagcgaggctaatcgccaatcctgggtgttatcccaccgctacactccttggaatcctcccctttatcccctatctagacgaagattcttcactctttgtggatgccaaaagtggcgtgagtggtgcaggcaaaaaactgacccacaacacccactaccccaccattaacgagaatctttttgcctactcgcctctctcgcatcgtcacgaaccagagattgcggagaagattgagctttggggtaaaaaagccaaaaaagtgaatttcatcccccatctcacgccgcttactagaggaatgctggtctccacctttgcgcgattgaaggagcctgtggatgcgatggcgattctaagggagcgctacgccaatgagccttttatcaggttgcgctcttcccctgtggagattaaagcggtcgcaggaacgcacttttgcgacatctatgcaatgagtcaagggcgggatttgtgggtcaatagcgcgattgacaatcttttgcgtggggcgagctctcaagcgattgccaatgccaatttgatgctgggattgcccgagggtgctggattgccccgctttgcctatgctccatga

SEQ ID NO: 48119 - protein, 337 aa, Wolinella succinogenes
MKKIPVGIVGVSGYTGLELLKMLLEHPYLELVYAANTEGGVRVGALHSSLQGVSDLSVEKADPKEAAKRCELLFLALPHQSAMEFAKEVLSLGKKVVDLSADYRLSLERYEAHYCPHLDKENLSHAVYGLIEWAREEIVQARLIANPGCYPTATLLGILPFIPYLDEDSSLFVDAKSGVSGAGKKLTHNTHYPTINENLFAYSPLSHRHEPEIAEKIELWGKKAKKVNFIPHLTPLTRGMLVSTFARLKEPVDAMAILRERYANEPFIRLRSSPVEIKAVAGTHFCDIYAMSQGRDLWVNSAIDNLLRGASSQAIANANLMLGLPEGAGLPRFAYAP

SEQ ID NO: 48120 - DNA, 951 bp, Xanthomonas axonopodis pv
  CDS (1)..(951): transl_table=11
atgactgttcaaccaaagaccatcggcattgtcggcgcccgcgggcataccggctcggaattgatcaaactggttgcggcgcacccgcagctgcacttgagcttcgtgtcctcgcgcgagctggccgggcagcgcgtggccgagcataacgatgcctaccaggggcagttgcgctacgagaacctggatgccgacgcggtggccgtcaaggctgccgacgtggtgatcctggcgctgcccaatggcaaggcagcgcccttcgtcgccgcgatcgacgcagcaacgccgcagacgctggtgatcgatctgtcggcagactatcgcttcgatccggcctggtactacggcttgcctgagctgacgcgcggcagctacgccggacaaagacgcatcagcaacccgggctgttatgccaccgcgatgcagctgaccatcgcgccactgctcgaccagttggccgggccgccgcagtgtttcggcgtctccgggtattcgggcgcgggtaccacgccctcggacaagaacaaccccgagttgctctccaataatttgatgccgtatgcgctgaccaaccacatgcacgagcgcgaggtgtctgcgcagctcggcgtgccggtggagttcatgccgcacgtggcgccgcatttccgcggcatcaccatgaccgtcaatctgtggctgcagcagccgctgacgcgcgagcagatccaggcgcgttatacgcagcgttatgccgacgagccgttgatcgagatcgtcgacgaagcgccttgggtgagccgcatcgccggcaagcacggtgtgcagattggcggggtgacgctggcgcccggcaacaagcgcgtggtggtggtggcgacgctggacaacctgctcaagggtgcagcgacgcaggcgatgcagaacctcaacctggcgctgggctgggacgagttgatggcaattcgttga

SEQ ID NO: 48121 - protein, 316 aa, Xanthomonas axonopodis pv
MTVQPKTIGIVGARGHTGSELIKLVAAHPQLHLSFVSSRELAGQRVAEHNDAYQGQLRYENLDADAVAVKAADVVILALPNGKAAPFVAAIDAATPQTLVIDLSADYRFDPAWYYGLPELTRGSYAGQRRISNPGCYATAMQLTIAPLLDQLAGPPQCFGVSGYSGAGTTPSDKNNPELLSNNLMPYALTNHMHEREVSAQLGVPVEFMPHVAPHFRGITMTVNLWLQQPLTREQIQARYTQRYADEPLIEIVDEAPWVSRIAGKHGVQIGGVTLAPGNKRVVVVATLDNLLKGAATQAMQNLNLALGWDELMAIR

SEQ ID NO: 48122 - DNA, 951 bp, Xanthomonas campestris pv
  CDS (1)..(951): transl_table=11
atgactgttcaaccaaccaccatcggcattgtgggcgcacgcggccataccggcgcggagctgatcaagctgattgccgcgcacccgcagttgcagctggtgttcgtgtcctcgcgcgagctcgccggccagcgcgtggccgagcacagcgatggctatgagggcgagctgcgctatgaaagcctggacgccgacgcggtggctgccaaggccgcggacgtggtgatcctggcattgcccaacggcaaggccgagcccttcgtggcggccatcgatgccagccggccgcagacgttgctgatcgacctgtcggccgactaccgcttcgatccggcctggtattacggcttgccggagcttacccgccacacctacgccgggcagcgccgcatcagcaatcccggctgctatgccacggccatgcagctggcgatcacgccgctgcgcgagcaactggcagggccgccgcagtgctttggcgtctccggctattccggtgcgggcaccacgccttcagacaagaacaatcccgcgttgctggccgacaacctgatgccgtacgcgctgaccaaccacatgcacgagcgcgaagtctccgcgcagctcggcgtgccggtggaattcatgccgcatgtggcgccgcatttccgcggcatcaccatgaccgtgaacctgtggctgcagcagccgttgacgcgcgagcagatccacgcacgctacctggagcggtatgcgcatgagcccttgatcgagatcgtggacgaggcgccgtgggtgagccgtatcgccggcacccagggcgtgcagatcggtgggttcaccatggcgccgggcaacaagcgcgtggtggtggtggcaacgctggacaacctgctcaagggtgcggccacgcaggccatgcagaacctcaacctggcgctgggctgggacgaattgaccgcaattggctga

SEQ ID NO: 48123 - protein, 316 aa, Xanthomonas campestris pv
MTVQPTTIGIVGARGHTGAELIKLIAAHPQLQLVFVSSRELAGQRVAEHSDGYEGELRYESLDADAVAAKAADVVILALPNGKAEPFVAAIDASRPQTLLIDLSADYRFDPAWYYGLPELTRHTYAGQRRISNPGCYATAMQLAITPLREQLAGPPQCFGVSGYSGAGTTPSDKNNPALLADNLMPYALTNHMHEREVSAQLGVPVEFMPHVAPHFRGITMTVNLWLQQPLTREQIHARYLERYAHEPLIEIVDEAPWVSRIAGTQGVQIGGFTMAPGNKRVVVVATLDNLLKGAATQAMQNLNLALGWDELTAIG

SEQ ID NO: 48124 - DNA, 1002 bp, Xylella fastidiosa
  CDS (1)..(1002): transl_table=11
atgagcaccgccaccttcacccttggcattgttggcgcccgcggctacaccggcgccgcattgatcaccctccttactgcccaccccgcgattgaactcatctttgtttcctcgcgtgaataccatggccaacccgttgccgcccacaaccccacctaccgcggtgatctgcgttttgaaacccttgacccggctgccgttgctgccaaacgtgccgatgtcgtcatcctcgccctacccaatggcaacgccgccccttacgtacacgccattgatgccaccgcaccccccaccctcatcatcgacctatccgcagatacccgctttgacccagactggtactacggcctccccgaactgacccgacacacctacaccggacagaaacgcatcagcaacccaggctgctacgccaccgcaatgcaactcgccatcgccccccttcgcgaccaactggctggccccccacagtgctttggcgtctccggctactccggtgctggcaccaccccctcagacaaaaacaaccaagccctactgcgtgacaacctcatgccatacgcacttaccgaccacctgcatgaacgtgaagttagcgcccaacttggtatccccgtcgaattcatgccccatgtcgccccccactttcgcggcatcaccctcaccgccaacctctggttacaacgccccctgacccgagaacacatcaagatcctctacgcaacccgttatgccaacgacccactgatcgacatcatcgacccccccccctgggttaaccagattgccgcccgccataccgtacagatcggcgccttcaccatggcactcggcaacaaacgcgtggtggtggttgccaccttagataacctcctcaaaggagcggccacccaagccctacagaacctcaaccgcgcacttggcctggacgaactgaccgccattccctaccaccccaaaccccccacatccccgctaccctcatcaccccttgcatcatga

SEQ ID NO: 48125 - protein, 333 aa, Xylella fastidiosa
MSTATFTLGIVGARGYTGAALITLLTAHPAIELIFVSSREYHGQPVAAHNPTYRGDLRFETLDPAAVAAKRADVVILALPNGNAAPYVHAIDATAPPTLIIDLSADTRFDPDWYYGLPELTRHTYTGQKRISNPGCYATAMQLAIAPLRDQLAGPPQCFGVSGYSGAGTTPSDKNNQALLRDNLMPYALTDHLHEREVSAQLGIPVEFMPHVAPHFRGITLTANLWLQRPLTREHIKILYATRYANDPLIDIIDPPPWVNQIAARHTVQIGAFTMALGNKRVVVVATLDNLLKGAATQALQNLNRALGLDELTAIPYHPKPPTSPLPSSPLAS

SEQ ID NO: 48126 - DNA, 984 bp, Xylella fastidiosa
  CDS (1)..(984): transl_table=11
atgagcactgccaccttcacccttggcattgttggtgcccgcggctacaccggcgccgcattgatcaccctcctgactgcccaccccgcgattgaactcatctttgtttcctcgcgtgaataccatggccagcccgttgccgcacacaaccccacctactgcggtgatctgcgttttgaaaccctcgacccagctgccgttgctgccaaacgtgcagatgtcgtcatcctcgccctacccaatggcaacgccgccccttacgtacacgccattgatgccaccgcaccccccaccctcatcatcgacctatccgcagatacccgctttgacccagactggtactacggcctccccgaactgacccgacacacctacaccggacagaaacgcatcagcaacccaggctgctacgccaccgcaatgcaactagccatcgccccccttcgcgaccaactggctggccccccacagtgctttggcgtctccggctactccggtgctggcaccaccccctcagacaaaaacaaccaagccctactgcgtgacaacctcatgccatacgcactcaccgaccacctgcatgaacgtgaagttagcgcccaacttggtatccccgtcgaattcatgccccatgtcgccccccactttcgcggcatcaccctcaccgccaacctctggttacaacgccccctgacccgggaacacatcaagaccctctacgcaacccgttatgccaacgacccactgatcgacatcatcgacccacccccctgggttaaccagattgccgcccgccataccgtacagatcggcgccttcaccatggcaccgggcaacaaacgcgttgtgatcgtcgccaccttggataacctcctcaaaggcgccgccacccaagccctacagaacctcaaccgcgcacttggcctggacgaactgaccgccattccctaccaacctaaccctgtcccatcacccattccataa

SEQ ID NO: 48127 - protein, 327 aa, Xylella fastidiosa
MSTATFTLGIVGARGYTGAALITLLTAHPAIELIFVSSREYHGQPVAAHNPTYCGDLRFETLDPAAVAAKRADVVILALPNGNAAPYVHAIDATAPPTLIIDLSADTRFDPDWYYGLPELTRHTYTGQKRISNPGCYATAMQLAIAPLRDQLAGPPQCFGVSGYSGAGTTPSDKNNQALLRDNLMPYALTDHLHEREVSAQLGIPVEFMPHVAPHFRGITLTANLWLQRPLTREHIKTLYATRYANDPLIDIIDPPPWVNQIAARHTVQIGAFTMAPGNKRVVIVATLDNLLKGAATQALQNLNRALGLDELTAIPYQPNPVPSPIP

SEQ ID NO: 48128 - DNA, 1005 bp, Yersinia pestis
  CDS (1)..(1005): transl_table=11
atgttaaatacgttgattgttggtgccagtggctatgccggcgcggagcttacggcttaccttaatcgtcacccacatatgaacataaccggtttagcggtttcagcgcaaagtgcagatgcaggaaaattactttccgatctgcatccacagttaaaaggcattcttgacctcccgctacagcccttggtagatgtggctcaggcggctaaaggtatcgatgtggttttcctcgctaccgctcatgaggtcagccatgatttggcaccacaatttttagccgctggctgtgtggtatttgatctttccggtgcattccgtgtgcgtgatgcggcgttttacagccaatattacggttttgaacaccaacatcccgattggctcgataaggcggtttatggcctggcagaatggcaatcagaagacattaagcaagctcaattgattgctgttcctggttgttatccaaccgcatcacaactggcgcttaaaccgttggttgatgggcaattactgaacgatgcacagtggccagtcattaatgccgtcagtggtgtcagcggtgcagggcgtaaagccagcatgggcaacagcttctgtgaagttagcttgcagccatatggcctatttacccaccgtcaccagccagaaattgttacccatcttggcacccccgtcatttttacaccgcatctggggaattttgcccgagggatcttggcgacgattacctgccgcctgaaagctggggtcacggcgcaaaacatcgccgatgcctatcaccatgcttatcagaataagccactggtgcggttgtatcaacaaggtgtcccggcgctgaaagccgtggtcggcctacctttctgtgatattggtttctcggtacaaggcgagcatttaattattgttgccaccgaagataacctgctgaaaggtgctgcggctcaggccgtacaatgtatgaatatccgttttggcttcccggaaacgcagtccctgttgtag

SEQ ID NO: 48129 - protein, 334 aa, Yersinia pestis
MLNTLIVGASGYAGAELTAYLNRHPHMNITGLAVSAQSADAGKLLSDLHPQLKGILDLPLQPLVDVAQAAKGIDVVFLATAHEVSHDLAPQFLAAGCVVFDLSGAFRVRDAAFYSQYYGFEHQHPDWLDKAVYGLAEWQSEDIKQAQLIAVPGCYPTASQLALKPLVDGQLLNDAQWPVINAVSGVSGAGRKASMGNSFCEVSLQPYGLFTHRHQPEIVTHLGTPVIFTPHLGNFARGILATITCRLKAGVTAQNIADAYHHAYQNKPLVRLYQQGVPALKAVVGLPFCDIGFSVQGEHLIIVATEDNLLKGAAAQAVQCMNIRFGFPETQSLL

SEQ ID NO: 48130 - DNA, 1005 bp, Yersinia pseudotuberculosis
  CDS (1)..(1005): transl_table=11
atgttaaatacgttgattgttggtgccagtggctatgccggcgcggagcttacggcttaccttaatcgtcacccacatatgaacataaccggtttagcggtttcagcgcaaagtgcagatgcaggaaaattactttccgaactgcatccgcagttaaaaggcatccttgatctcccgctacagcccttggtagatgtggctcaggcggctaaaggtatcgatgtggttttcctcgctaccgctcatgaggtcagccatgatttggcaccacaatttttagccgctggctgtgtggtatttgatctttccggtgcattccgtgtgcgtgatgcggcgttttacagccaatattacggttttgaacaccaacatcccgattggctcgataaggcggtttatggcctggcagaatggcaatcagaagacattaagcaagctcaattgattgctgttcctggttgttatccaaccgcatcacaactggcgcttaaaccgttggttgatgggcaattactgaacgatgcacagtggccagtcattaatgccgtcagtggtgtcagcggtgcagggcgtaaagccagcatgggcaacagcttctgtgaagttagcttgcagccatatggcctatttacccaccgtcaccagccagaaattgttgcccatcttggcacccccgtcatttttacaccgcatctggggaattttgcccgagggatcttggcgacgattacctgccgcctgaaagccggggtcacggcgcaaaacatcgccgatgcctatcaccatgcttatcagaataagccactggtgcggttgtatcaacaaggtgtcccggcgctgaaagccgtggtcggcctacctttctgtgatattggtttctcggtacaaggcgagcatttaattattgttgccaccgaagataacctgctgaaaggtgctgcggctcaggccgtacaatgtatgaatatccgttttggcttcccggaaacgcagtccctgttgtag

SEQ ID NO: 48131 - protein, 334 aa, Yersinia pseudotuberculosis
MLNTLIVGASGYAGAELTAYLNRHPHMNITGLAVSAQSADAGKLLSELHPQLKGILDLPLQPLVDVAQAAKGIDVVFLATAHEVSHDLAPQFLAAGCVVFDLSGAFRVRDAAFYSQYYGFEHQHPDWLDKAVYGLAEWQSEDIKQAQLIAVPGCYPTASQLALKPLVDGQLLNDAQWPVINAVSGVSGAGRKASMGNSFCEVSLQPYGLFTHRHQPEIVAHLGTPVIFTPHLGNFARGILATITCRLKAGVTAQNIADAYHHAYQNKPLVRLYQQGVPALKAVVGLPFCDIGFSVQGEHLIIVATEDNLLKGAAAQAVQCMNIRFGFPETQSLL

SEQ ID NO: 48132 - DNA, 1248 bp, Oryza sativa
  CDS (1)..(1248)
atgggatcgacggcgctcggtggcggggctcctgctcgcctcggcttggcccccaaggatggagtctttggatctaatctgaagcaatgcggtggtttcatgctcaaaacaacccctaaggttggatcctcttcagtccgtgtgagggcatctgttgcttcttcaccgcagaaacagcactctcccaagacatcaggagttaaatcaggggaggaggtgcgcattgcggttctaggtgccagcggttatactggagctgagattgtcaggcttctagcaaaccatcctcaatttcgtatcaaagtgatgactgcagatagaaaagctggcgaacagtttggatctgtatttcctcacttaataacacaggacctgccaaatttagttgcagtaaaagatgcagatttttcaaatgtggatgcagttttttgttgcttgccacatggtacaacccaggaaattattaaaggtttaccgcaggaactgaagattgttgatctctctgcagattttcgattgcgtgatatcaatgagtacgctgagtggtatggccattctcatagggcaccagaacttcagcaagaagctgtgtatggcttgactgaagttcttcgcaatgaaataaggaatgcacggcttgttgcaaatccgggatgttatcccacatctattcaacttcctcttgttcctctaataaaggcaaaactgatcaaagtgagcaacattatcattgatgcaaaatctggggttagtggggcaggacgtggagctaaggaagccaatctctacaccgagatagctgaaggcattcatgcttatggaataaaaggccaccggcatgttcctgagattgaacaaggactttcagaggctgctgagtctaaagtcactatcagctttactccaaatctgatttgtatgaaacgtgggatgcaatctactatgttcgttgaaatggcacctggagtgactgccaatgatttgtatcagcatctcaagtctacatatgagggtgaagaatttgtgaaactgttaaatggtagcagcgttcctcacacacgccatgttgtgggatcaaattactgcttcatgaatgtctttgaggacagaattcctggacgtgccatcatcatatctgttatagataatcttgtgaagggagcatcaggtcaggctgttcagaaccttaatctgatgatgggtctgccagagaacactgggctgcaatatcaacccctatttccttga

SEQ ID NO: 48133 - protein, 415 aa, Oryza sativa
MGSTALGGGAPARLGLAPKDGVFGSNLKQCGGFMLKTTPKVGSSSVRVRASVASSPQKQHSPKTSGVKSGEEVRIAVLGASGYTGAEIVRLLANHPQFRIKVMTADRKAGEQFGSVFPHLITQDLPNLVAVKDADFSNVDAVFCCLPHGTTQEIIKGLPQELKIVDLSADFRLRDINEYAEWYGHSHRAPELQQEAVYGLTEVLRNEIRNARLVANPGCYPTSIQLPLVPLIKAKLIKVSNIIIDAKSGVSGAGRGAKEANLYTEIAEGIHAYGIKGHRHVPEIEQGLSEAAESKVTISFTPNLICMKRGMQSTMFVEMAPGVTANDLYQHLKSTYEGEEFVKLLNGSSVPHTRHVVGSNYCFMNVFEDRIPGRAIIISVIDNLVKGASGQAVQNLNLMMGLPENTGLQYQPLFP

SEQ ID NO: 48134 - DNA, 20 bp, Artificial sequence
  primer
atggggaatgaaaaagctag

SEQ ID NO: 48135 - DNA, 21 bp, Artificial sequence
  primer
ttagggataaaaagccagttg

SEQ ID NO: 48136 - protein, 403 aa, Artificial sequence
  consensus sequence
  Variant (2)..(3): Xaa in position 2 to 3 is any amino acid
  Variant (6)..(6): Xaa in position 6 is any amino acid
  Variant (8)..(16): Xaa in position 8 to 16 is any amino acid
  Variant (18)..(43): Xaa in position 18 to 43 is any amino acid
  Variant (44)..(72): Xaa in position 44 to 72 is any or no amino acid
  Variant (74)..(79): Xaa in position 74 to 79 is any amino acid
  Variant (81)..(97): Xaa in position 81 to 97 is any amino acid
  Variant (98)..(107): Xaa in position 98 to 107 is any or no amino acid
  Variant (109)..(109): Xaa in position 109 is any amino acid
  Variant (111)..(113): Xaa in position 111 to 113 is any amino acid
  Variant (115)..(120): Xaa in position 115 to 120 is any amino acid
  Variant (121)..(144): Xaa in position 121 to 144 is any or no amino acid
  Variant (148)..(148): Xaa in position 148 is any amino acid
  Variant (150)..(160): Xaa in position 150 to 160 is any amino acid
  Variant (161)..(175): Xaa in position 161 to 175 is any or no amino acid
  Variant (179)..(180): Xaa in position 179 to 180 is any amino acid
  Variant (182)..(188): Xaa in position 182 to 188 is any amino acid
  Variant (190)..(203): Xaa in position 190 to 203 is any amino acid
  Variant (204)..(212): Xaa in position 204 to 212 is any or no amino acid
  Variant (214)..(214): Xaa in position 214 is any amino acid
  Variant (217)..(217): Xaa in position 217 is any amino acid
  Variant (219)..(233): Xaa in position 219 to 233 is any amino acid
  Variant (234)..(247): Xaa in position 234 to 247 is any or no amino acid
  Variant (249)..(252): Xaa in position 249 to 252 is any amino acid
  Variant (253)..(256): Xaa in position 253 to 256 is any or no amino acid
  Variant (258)..(258): Xaa in position 258 is any amino acid
  Variant (260)..(261): Xaa in position 260 to 261 is any amino acid
  Variant (263)..(272): Xaa in position 263 to 272 is any amino acid
  Variant (273)..(284): Xaa in position 273 to 284 is any or no amino acid
  Variant (286)..(286): Xaa in position 286 is any amino acid
  Variant (288)..(293): Xaa in position 288 to 293 is any amino acid
  Variant (296)..(298): Xaa in position 296 to 298 is any amino acid
  Variant (300)..(316): Xaa in position 300 to 316 is any amino acid
  Variant (317)..(325): Xaa in position 317 to 325 is any or no amino acid
  Variant (327)..(366): Xaa in position 327 to 366 is any amino acid
  Variant (367)..(383): Xaa in position 367 to 383 is any or no amino acid
  Variant (387)..(387): Xaa in position 387 is any amino acid
  Variant (390)..(391): Xaa in position 390 to 391 is any amino acid
  Variant (393)..(393): Xaa in position 393 is any amino acid
  Variant (395)..(395): Xaa in position 395 is any amino acid
  Variant (397)..(398): Xaa in position 397 to 398 is any amino acid
  Variant (400)..(402): Xaa in position 400 to 402 is any amino acid
GXXGYXGXXXXXXXXXHXXXXXXXXXXXXXXXXXXXXXXXXXXXXXXXXXXXXXXXXXXXXXXXXXXXXXXXDXXXXXXPXXXXXXXXXXXXXXXXXXXXXXXXXXXDXSXXXRXXXXXXXXXXXXXXXXXXXXXXXXXXXXXXYGLXEXXXXXXXXXXXXXXXXXXXXXXXXXXPGCXXTXXXXXXXPXXXXXXXXXXXXXXXXXXXXXXXGXSGXGXXXXXXXXXXXXXXXXXXXXXXXXXXXXXYXXXXXXXXHXHXXEXXXXXXXXXXXXXXXXXXXXXXFXPXXXXXXRGXXXTXXXXXXXXXXXXXXXXXXXXXXXXXXYXXXXXXXXXXXXXXXXXXXXXXXXXXXXXXXXXXXXXXXXXXXXXXXXXXXXXXXXXDNLXKGXXGXAXQXXNXXXG

SEQ ID NO: 48137 - protein, 16 aa, Artificial sequence
  protein pattern
  Variant (4)..(4): Xaa in position 4 is any amino acid
  Variant (7)..(7): Xaa in position 7 is any or no amino acid
  Variant (9)..(11): Xaa in position 9 to 11 is any or no amino acid
  Variant (13)..(13): Xaa in position 13 is any amino acid
  Variant (15)..(15): Xaa in position 15 is Ala, Cys, Asn or Ser
  Variant (16)..(16): Xaa in position 16 is Phe, Ile, Leu, Met or Val
DNLXKGXAXXXAXQXX

SEQ ID NO: 48138 - DNA, 1911 bp, Synechocystis sp.
  CDS (1)..(1911): transl_table=11
atgggaaaagttgttgggattgacctcggtactaccaattcctgtgtggctgtaatggaagggggtaaacccactgttatcgccaatgcagaaggttttcgcacgaccccatcggtggttggttatgccaaaaatggcgatcgcctagtggggcaaattgccaagcgtcaagcggtgatgaacccgggcaatactttttattctgtcaaacgattcattggtcgtaaatttgatgaaattaccaatgaagccaccgaagttgcctacagcgtagttaaagacggcaacggcaatgtgaaactagattgcccagcccaaggaaaacagtttgccccggaagaaatttctgcccaagtgctgcggaaattggtggacgatgccagcaagtacctaggggagaccgttacccaagccgtcatcaccgttcctgcctactttaacgactcccaacggcaagccaccaaagatgcgggtaaaatcgccgggatcgaagtcctgagaattattaacgagcccaccgctgcctccctagcctacggtctggataaaaaggataacgaaaccattctggtgtttgacctagggggcggtacttttgacgtctccatcctcgaagtaggggaaggggtatttgaagtattagccacctctggggatacccatctgggaggggacgacttcgacaaaaaaattgtcgatttcctggccggtgaattccagaaggccgagggcatcgacctccgtaaggataagcaagctctacaacggttaaccgaagcggccgaaaaagccaaaatcgaactttccggcgtgagccaaacggaaattaacctgcccttcatcactgccacccaggatgggcctaaacatctagacaccaccctgtcccgggccaagtttgaagaaatttgctccgacctgattgatcgttgtggtattcccgtggaaaatgccattcgggatgccaaaatcgataaatctgccctggatgaaatcgttcttgttggcggttccacccggattcccgccgtgcaagaagtggtaaagaaaattcttggcaaagatcccaaccaaggagttaaccccgatgaagtagtggccgtcggagctgctatccaagggggtgtactttctggggaagtcaaagacattctgctcctggatgtttctcccctctccttgggcgtagaaaccctagggggcgtcatgaccaaaatcattccccgcaacaccaccatccccaccaaaaaatctgaaaccttctccaccgctgtggacggtcaaagcaacgtggaaatccatgtgctccaaggggaacgggaaatggccaatgacaataagagcttgggaaccttccgcttagatggtatcccccctgctccccggggcgtacctcaaatcgaagttactttcgatattgatgccaacggtattttgaatgtcactgctaaagaccggggtacgggcaaggagcagtccatcagcatcaccggggcttccaccctgcctgatacggaagtagaccggatggtgaaggaagctgaatccaacgccgccgctgacaaagaacgtcgggagaaaattgaccgcaaaaaccaagcggattccctcgtttaccaagcggaaaaacaaatcaccgagttgggcgataaagtgcccgccgctgataaaatcaaagcggaaggtttaatcaaagacctgaaggaagctgtagcccaggaagatgatgccaaaatccaaacggtgatgccggaactacaacaggttctctacagcattggttccaatatgtaccaacaggctggagcagaggctggggtaggcgctcccggtgctggccctgaagcgggaactagcagtggcggtggcgatgatgtcatcgatgcggaattctctgagccggagaaataa

SEQ ID NO: 48139 - protein, 636 aa, Synechocystis sp.
MGKVVGIDLGTTNSCVAVMEGGKPTVIANAEGFRTTPSVVGYAKNGDRLVGQIAKRQAVMNPGNTFYSVKRFIGRKFDEITNEATEVAYSVVKDGNGNVKLDCPAQGKQFAPEEISAQVLRKLVDDASKYLGETVTQAVITVPAYFNDSQRQATKDAGKIAGIEVLRIINEPTAASLAYGLDKKDNETILVFDLGGGTFDVSILEVGEGVFEVLATSGDTHLGGDDFDKKIVDFLAGEFQKAEGIDLRKDKQALQRLTEAAEKAKIELSGVSQTEINLPFITATQDGPKHLDTTLSRAKFEEICSDLIDRCGIPVENAIRDAKIDKSALDEIVLVGGSTRIPAVQEVVKKILGKDPNQGVNPDEVVAVGAAIQGGVLSGEVKDILLLDVSPLSLGVETLGGVMTKIIPRNTTIPTKKSETFSTAVDGQSNVEIHVLQGEREMANDNKSLGTFRLDGIPPAPRGVPQIEVTFDIDANGILNVTAKDRGTGKEQSISITGASTLPDTEVDRMVKEAESNAAADKERREKIDRKNQADSLVYQAEKQITELGDKVPAADKIKAEGLIKDLKEAVAQEDDAKIQTVMPELQQVLYSIGSNMYQQAGAEAGVGAPGAGPEAGTSSGGGDDVIDAEFSEPEK

SEQ ID NO: 48140 - DNA, 2490 bp, Zea mays subsp. mays
  CDS (272)..(2239)
gtcctatcctctccctcgccatcctcgtctccgcctccgccgctccccctcggtccccgccccacctcccgttctctccctccttggatagggttagagactgagttcacccgcacgcgcgcgagccatggtctccttcacctgttcccaggtcggcgcgacggcagcgggcggagcctcgcccttcatcggctaccggtggcggagcggccccgggggagccactccgtcgagctccctcttcgttggccggcggctggcagcggtgcagatgcgcgcgccatctcgcggggcccgcgggggctccgcgctgcgggtcacgtgcgagaaggtggtggggatcgacctgggcaccaccaactccgcggtcgccgccatggagggcggcaagccgaccgtcgtcaccaacgccgagggcgcgcgcaccacgccttccgtggtggcgtacaccaagaccggggagcgcctggtggggcagattgctaagcgccaggcggtcgtgaaccccgagaacaccttcttctctgtcaagcgcttcatcggccgcaagatggctgaggtcgacgacgaggccaagcaggtctcgtacggcgttgtcaaggacgagaacggcaacgtcaagctcgactgccccgctatcggcaaacagttcgctgccgaggagatctccgcgcaggttttgaggaagttggtggatgatgcatctaagtttcttaatgagaaaatcacaaaagcagtggttacagtcccagcatatttcaatgattcacaaaggacagcaactaaagatgctggccgcattgcaggactggaagttctccgtattattaatgaaccaactgctgcatcgttggcctatggtttcgagaagaaaaataatgaaacaattctagtgtttgatttgggaggcggaacctttgatgtatctgtattggaagttggtgatggtgtgtttgaggtgctttccacatctggtgacacacaccttggtggtgatgacttcgataagagaatagtagattggcttgctagcaacttcaagaaagatgaacgtattgatcttctgaaggataaacaagcccttcagaggcttactgaggcagcagagaaagctaagatggaactgtcaacgctgacacaggcaaatattagcctaccattcattactgctactgctgatgggccaaaacacatcgaggcaaccctctcgagagccaaattcgaggaactatgttcagaccttatagacaggcttaaaactcctgttaataatgcactgagagatgccaagttgtctctcagtgatctggatgaagttattcttgtgggtggatccacccgaatccctgcagttcaagaacttgtgaggaagcttactgacaaggatcccaatgttacggtcaaccctgatgaggttgtttctcttggggcagctgtgcagggcggggttttggcaggagatgtgaaagatgtcgttcttctggatgttactccattatctcttggtttggagacattgggtggagtgatgacaaagattatccccaggaataccacactgccaacctcaaaatcggaggtattctcaacagctgcagatggacagacgagcgttgagattaatgttctccagggagaaagagagtttgttagggacaacaagtcccttggaagcttccggttggacggaatccctcctgcacctcgtggtgtcccacaaattgaagtgaagtttgatattgatgcaaatggtatcctctcagttgctgccattgataagggcactggaaagaaacaggacatcaccatcactggtgctagtacgctacctaaggatgaggttgagagaatggtagaagaagccgataagtttgccaaggaggacaaagagaagagagatgcaatcgacaccaaaaaccaggcggactcagtggtctaccagactgagaagcaactgaaggagcttggcgacaaagtccccgctcctgtgaaagagaaggtggatgtgaagctccaggagctcaaagacgccatttctggtggatcaacacagagtatgaaagatgccatggctgctctgaaccaggaggtgatgcagattggccaggcaatgtataaccagcctggtgccagtgctgctgggcctactcctggtgctgaggccggacctacgcctggtaccggaccaacgcagaatgatggggatgtcattgacgcagacttcacagatagcaattgaggggtgattgatgcatggccatgtgttgagcaaggttggcgttaaggagtgaacaaattgttccttttttgtgttgggattgttactataggctatctagcatggagttgatagagatagtttttcgcgaacttctcctgtgattgactcaacaattagctgaatgctatataaagtcgaaaggagcgcataaggtttttattcaatttgtagctgattaattgaattgttgcaataaaggtgttgaattg

SEQ ID NO: 48141 - protein, 655 aa, Zea mays subsp. mays
MRAPSRGARGGSALRVTCEKVVGIDLGTTNSAVAAMEGGKPTVVTNAEGARTTPSVVAYTKTGERLVGQIAKRQAVVNPENTFFSVKRFIGRKMAEVDDEAKQVSYGVVKDENGNVKLDCPAIGKQFAAEEISAQVLRKLVDDASKFLNEKITKAVVTVPAYFNDSQRTATKDAGRIAGLEVLRIINEPTAASLAYGFEKKNNETILVFDLGGGTFDVSVLEVGDGVFEVLSTSGDTHLGGDDFDKRIVDWLASNFKKDERIDLLKDKQALQRLTEAAEKAKMELSTLTQANISLPFITATADGPKHIEATLSRAKFEELCSDLIDRLKTPVNNALRDAKLSLSDLDEVILVGGSTRIPAVQELVRKLTDKDPNVTVNPDEVVSLGAAVQGGVLAGDVKDVVLLDVTPLSLGLETLGGVMTKIIPRNTTLPTSKSEVFSTAADGQTSVEINVLQGEREFVRDNKSLGSFRLDGIPPAPRGVPQIEVKFDIDANGILSVAAIDKGTGKKQDITITGASTLPKDEVERMVEEADKFAKEDKEKRDAIDTKNQADSVVYQTEKQLKELGDKVPAPVKEKVDVKLQELKDAISGGSTQSMKDAMAALNQEVMQIGQAMYNQPGASAAGPTPGAEAGPTPGTGPTQNDGDVIDADFTDSN

SEQ ID NO: 48142 - DNA, 2357 bp, Arabidopsis thaliana
  CDS (100)..(2157)
atggcatcttcagccgcccaaatccacgttctcggcggaattggattcgcttcttcttcttcttccaagagaaatctcaatggtaaaggcggtacctttatgccgagaagtgccttcttcggtacaagaaccggtcctttctccacacccacttctgcttttctcagaatgggcaccagaaatggcggcggcgcttctagatacgcggttggtccggttcgtgtggttaacgagaaggttgttggaattgatttgggtacgactaactctgcagtagctgctatggaaggaggtaagcctacgattgtgactaacgctgaaggtcagaggacaacgccttctgttgtggcttacacgaagagtggtgataggcttgttgggcagattgcgaagaggcaagctgttgttaatcccgagaatactttcttctcagtgaagaggtttattggtaggaagatgaacgaggttgatgaagagtctaagcaggtttcttacagagttgttagagatgagaacaataatgttaagcttgagtgtcctgccattaacaaacaatttgctgctgaggagatttcagctcaggttctaaggaaacttgtggatgatgcatcaagattcttgaacgacaaagtaaccaaggctgtcatcactgtgcctgcttacttcaacgattcacagaggacagctacaaaagatgctggtcgaattgctgggttggaagttcttcgtattatcaatgagcccacagctgcttcattggcttatgggtttgacagaaaagccaatgaaacaatcctagtcttcgatcttggtggtggtacctttgatgtctcagtgcttgaggttggtgatggtgtgtttgaagtgctttccacttctggcgacacacacttgggtggtgatgactttgacaagagagttgttgattggcttgctgcagaattcaagaaagacgaagggatagatcttctgaaagacaagcaagctcttcagaggttaacagaggcagcagaaaaagctaaaattgagctttcttcactgactcagacaaatatgagcttaccttttatcacggccacagctgatggacctaaacacatagaaaccaccctcacacgtgccaagttcgaagaattgtgttcagatttacttgacagggtcaggactcctgtcgagaattccctgcgggatgcaaagctcagcttcaaagatattgatgaagtcatccttgtcggtggatccacacgtattcctgctgttcaggaactcgtgaggaaggtgactgggaaagaacctaatgttacagtaaatcctgacgaggttgtagcgttaggtgctgcagtccaggctggtgttcttgctggagatgtgagtgacattgtgcttcttgatgtgacaccgctttcgattggtttggagaccctaggtggtgttatgactaagattattccaaggaacaccacactgcctacttctaaatcagaagtcttttcaactgctgctgatggacagacaagtgttgagattaatgtgttgcagggtgagagggagtttgttagggataacaagtctcttggtagcttccgtctagatggtatcccccctgcaccacgtggagttccacaaatcgaagtcaaatttgacattgatgccaatggaattctatctgtcagtgctgttgacaagggcacaggaaagaagcaagacatcaccattactggcgcaagtacattgcccaaggatgaggtagaccaaatggtccaggaggcagaaagatttgcaaaagatgacaaagagaagagagacgcaatcgacacgaaaaaccaagcagattcagtggtgtaccagacagagaagcaactgaaagaactaggagagaaaattccaggtgaagtgaaagagaaggtggaggctaagctacaagagctgaaagacaagataggaagtggatcaacccaagaaatcaaagacgccatggctgctcttaaccaagaagtgatgcagattggtcagtctctatacaaccagcctggagctggaggtccaggtgcaggtccttccccgggaggcgaaggtgcttcatcaggagattcatcttcaagtaaaggaggagatggtgatgatgtgatcgatgctgacttcacagacagccaatgagaaaacaaactaggaaggctttggaattcatacatgggatgcgatgggagagacaaatgattttgtaggttggatttgagaacacaaatgaatttaagcaatgcttgtggacaacatttatttgtcgttagaaggaagcagtgtggttacagaggatgatgtttaatacataataatatgcaagccttctcttacacggt

SEQ ID NO: 48143 - protein, 685 aa, Arabidopsis thaliana
MPRSAFFGTRTGPFSTPTSAFLRMGTRNGGGASRYAVGPVRVVNEKVVGIDLGTTNSAVAAMEGGKPTIVTNAEGQRTTPSVVAYTKSGDRLVGQIAKRQAVVNPENTFFSVKRFIGRKMNEVDEESKQVSYRVVRDENNNVKLECPAINKQFAAEEISAQVLRKLVDDASRFLNDKVTKAVITVPAYFNDSQRTATKDAGRIAGLEVLRIINEPTAASLAYGFDRKANETILVFDLGGGTFDVSVLEVGDGVFEVLSTSGDTHLGGDDFDKRVVDWLAAEFKKDEGIDLLKDKQALQRLTEAAEKAKIELSSLTQTNMSLPFITATADGPKHIETTLTRAKFEELCSDLLDRVRTPVENSLRDAKLSFKDIDEVILVGGSTRIPAVQELVRKVTGKEPNVTVNPDEVVALGAAVQAGVLAGDVSDIVLLDVTPLSIGLETLGGVMTKIIPRNTTLPTSKSEVFSTAADGQTSVEINVLQGEREFVRDNKSLGSFRLDGIPPAPRGVPQIEVKFDIDANGILSVSAVDKGTGKKQDITITGASTLPKDEVDQMVQEAERFAKDDKEKRDAIDTKNQADSVVYQTEKQLKELGEKIPGEVKEKVEAKLQELKDKIGSGSTQEIKDAMAALNQEVMQIGQSLYNQPGAGGPGAGPSPGGEGASSGDSSSSKGGDGDDVIDADFTDSQ

SEQ ID NO: 48144 - DNA, 2357 bp, Arabidopsis thaliana; identical to SEQ ID NO: 48142
  CDS (169)..(2157)

SEQ ID NO: 48145 - protein, 662 aa, Arabidopsis thaliana
MGTRNGGGASRYAVGPVRVVNEKVVGIDLGTTNSAVAAMEGGKPTIVTNAEGQRTTPSVVAYTKSGDRLVGQIAKRQAVVNPENTFFSVKRFIGRKMNEVDEESKQVSYRVVRDENNNVKLECPAINKQFAAEEISAQVLRKLVDDASRFLNDKVTKAVITVPAYFNDSQRTATKDAGRIAGLEVLRIINEPTAASLAYGFDRKANETILVFDLGGGTFDVSVLEVGDGVFEVLSTSGDTHLGGDDFDKRVVDWLAAEFKKDEGIDLLKDKQALQRLTEAAEKAKIELSSLTQTNMSLPFITATADGPKHIETTLTRAKFEELCSDLLDRVRTPVENSLRDAKLSFKDIDEVILVGGSTRIPAVQELVRKVTGKEPNVTVNPDEVVALGAAVQAGVLAGDVSDIVLLDVTPLSIGLETLGGVMTKIIPRNTTLPTSKSEVFSTAADGQTSVEINVLQGEREFVRDNKSLGSFRLDGIPPAPRGVPQIEVKFDIDANGILSVSAVDKGTGKKQDITITGASTLPKDEVDQMVQEAERFAKDDKEKRDAIDTKNQADSVVYQTEKQLKELGEKIPGEVKEKVEAKLQELKDKIGSGSTQEIKDAMAALNQEVMQIGQSLYNQPGAGGPGAGPSPGGEGASSGDSSSSKGGDGDDVIDADFTDSQ

SEQ ID NO: 48146 - DNA, 2290 bp, Arabidopsis thaliana
  CDS (228)..(2213)
atcttcttcttcttcatctacctaacttaggttttatcaatctctcatttccaaccatggcttcctccgccgcccaaattcacatcctcggcggaatcggattccctacttcgtcttcttcctcctccaccaaaaacctcgacaacaaaaccaattccattccacgaagcgtcttcttcggcaacagaacaagtcctttcactactccaacctccgccttccttcgtatgggacgaagaaacaacaacgcttcccgatacaccgttggtccagtccgtgtggttaacgagaaagtcgtcggaatcgatttaggcacgacgaattcagctgttgctgctatggaaggaggtaaaccaacgattgtgactaacgctgaaggtcaaagaactacaccttctgttgtggcttatactaagagtaaagatagacttgttggtcagattgctaaacgtcaagctgttgttaatccggagaatactttcttctctgttaagaggtttattggtagaagaatgaatgaagttgctgaagagtctaagcaggtttcttatagagttattaaagatgagaatggtaatgttaagcttgattgtcctgctattggtaaacaatttgctgctgaggagatttctgctcaggttttgaggaagcttgtggatgatgcttcgagatttttgaatgataaagtaacgaaagctgtcatcactgtgcctgcttacttcaatgattcacaaaggacggctactaaagatgctggtcgtattgctggattggaagttcttaggattattaatgagcctactgctgcttctttggcttatgggtttgagaggaaaagcaatgaaactattcttgtttttgatcttggtggtggtacttttgatgtctcagtccttgaggttggtgacggtgtttttgaagtgctttcgacttctggtgatacacatttgggaggtgatgactttgacaagagagtcgttgattggcttgcttcaaccttcaagaaggatgaaggtatagatcttctcaaagacaagcaagcgcttcagaggttgacggaggcagctgaaaaagctaaaattgagctttcctcactgactcagacaaacatgagtttgccttttatcactgcaacggctgatgggcctaagcacattgaaaccactctcaccaggggcaagtttgaagaattgtgctctgacttactcgacagggtcaggacacctgtggagaattccctgagggatgcaaaactcagcttcaaagatattgatgaggtgatccttgttggtggatccacacgtatccctgctgttcaggatcttgtaaggaagctgacaggaaaagaacccaatgtctcagtcaatcctgatgaagttgtagctttaggtgctgcagttcaggccggtgttctatcaggagatgtgagtgacattgttcttcttgatgtgacgccgctatcgcttggtttggaaactcttggtggtgtcatgaccaagatcattccaagaaacaccacacttccaacttctaagtcagaagtcttctcaactgctgcagatggacagacaagcgttgagattaatgtgttacagggtgagagagagttcgtaagagataacaagtctattggtagcttccgtcttgatggtattccacctgcaccacgtggagttccacaaatcgaggtcaaattcgacattgatgccaatggaattctatctgtcagtgcttcggacaaaggtacaggaaagaagcaggacatcaccattactggtgctagtaccttaccaaaggatgaggtagacacaatggtgcaagaagcagagaggtttgcaaaggaagacaaagaaaagagagatgcgattgacacaaagaaccaggctgactccgtcgtttaccagacagagaagcagcttaaagaacttggagagaaaattccaggtccagtgaaagaaaaggttgaggctaagctccaagagctgaaggagaagatagcaagcggatcaactcaagaaatcaaagacaccatggcagctcttaaccaagaagtgatgcagattggccagtctctgtacaaccaaccccaaccaggtggtgctgattctcctcctggaggtgaagcttcctcgtcgtctgacacatcatcctcagccaaaggtggagacaacggcggtgatgtgattgacgctgacttcacagacagcaattaatacgaattggattcatacaaggattatttatggggtttgtccatgattttgtaggaatgataatgtgatttgttggc

SEQ ID NO: 48147 - protein, 661 aa, Arabidopsis thaliana
MGRRNNNASRYTVGPVRVVNEKVVGIDLGTTNSAVAAMEGGKPTIVTNAEGQRTTPSVVAYTKSKDRLVGQIAKRQAVVNPENTFFSVKRFIGRRMNEVAEESKQVSYRVIKDENGNVKLDCPAIGKQFAAEEISAQVLRKLVDDASRFLNDKVTKAVITVPAYFNDSQRTATKDAGRIAGLEVLRIINEPTAASLAYGFERKSNETILVFDLGGGTFDVSVLEVGDGVFEVLSTSGDTHLGGDDFDKRVVDWLASTFKKDEGIDLLKDKQALQRLTEAAEKAKIELSSLTQTNMSLPFITATADGPKHIETTLTRGKFEELCSDLLDRVRTPVENSLRDAKLSFKDIDEVILVGGSTRIPAVQDLVRKLTGKEPNVSVNPDEVVALGAAVQAGVLSGDVSDIVLLDVTPLSLGLETLGGVMTKIIPRNTTLPTSKSEVFSTAADGQTSVEINVLQGEREFVRDNKSIGSFRLDGIPPAPRGVPQIEVKFDIDANGILSVSASDKGTGKKQDITITGASTLPKDEVDTMVQEAERFAKEDKEKRDAIDTKNQADSVVYQTEKQLKELGEKIPGPVKEKVEAKLQELKEKIASGSTQEIKDTMAALNQEVMQIGQSLYNQPQPGGADSPPGGEASSSSDTSSSAKGGDNGGDVIDADFTDSN

SEQ ID NO: 48148 - DNA, 1884 bp, Ciona intestinalis
  CDS (1)..(1884)
atgtcaacagcagtaggaatcgatctgggaacaacgtattcatgcgttggcgtcttccgccatggcaaagtcgagattattgccaacgaccaaggtaatagaactacaccaagctatgtcgcattcaacgaaacagaaaggttgatcggtgatggggccaaagaccaagttgccagaaatcccgaaaattcaatttttgacgcaaagagattgattggaagaaattacaacgatccagctgtacagaaggataaagaacactggcctttcaaggtagtaaataagaatggaaaaccatttcttcaagcggaatatcaaggcgacgtgaagacgttttcacccgaggaaatcagtgcaatggttcttactaagatgaaggacactgcggaagcatacctcggtgaaaatgtaaaggacgcggttataacagtacctgcttacttcaacgactcacaacgacaagcaacaaaagacgctggcatcatcgcaggactgaacgtactcagagtgataaacgaacccacagcagcggcattggcgtacggactcgataagaacttggttggcgagaaaaaggttttaattttcgatcttggcggcggaaccttcgatgtctctgtgctcaccatcgacgaaggatcaatttttgaagttctttcaactgctggggacacccatcttggcggagaggacttcgataaccgaatggtgaagcatttcactgaagagttcaagcgaaaacacaaaaaggacatctcaaagagtaacagggcaattagaagattacggacggcctgtgagcgagctaagcgcgtcctctcaacctcgacagaagctgctgtcgagttggattctctatacgaaggaattgatttctacagtaaaatctcaagagcaagattcgaagaactgtgctccgatctcttccgttcctgtcttgaccctgtcgaaaaagctctaagagatgctaagctagataaaacgaagatcgacgaagttgttcttgtcggaggatcaaccaggatcccgagggtgcaaaacttactcagtgatttctttaacggaaaaaatcttaacaaatcaatcaaccccgacgaagcagttgcctacggtgctgcggtgcaggcggcagtgcttacaggcaactccggcgtgaaagatgtgttgttggtcgacgttgcacctctatcgttgggaattgagacagccggcgagatgatgacaaagctggtggaacgaaacacaagaatcccacacaatacttcacaggtgttcaccacgtacgctgataatcaacctgccgtcacaattcaagtttacgaaggcgaacgagcacagacgaaacataacaatctgctcggaacatttaacctcactggaatagcaccagcaccaagaggtgtgccaaagatcaaagtttcgtttgacatcgacgcaaatggaatcttgcaagtctccgccaaagacgaaagcacgggaaaggcgaaccagatcacgatcaacaaaggccgcttgtcgaaggcagatatagaaactatgctggctgatgctgagaaatacaaagaagaagacaataaacagatggaaagacacaaggccaaaaacgaactggagtcctacatgtacggctgcaaaaatgctgccgaagaggccggtgaaaaattgtcttctgcggataaagatcaagtcacacaaatttgtgacgacacgcagaaatggctggatggaaattctcttgcagaaaaggaagagtttgaagagcgactaaatgaactaaaaaaggtttgctcgcccttaatgagcaagattcacgcatcggctggagggcatcagcagaatggccaaggaaaacccgacggcccagtgatcgacgaaatggactag

SEQ ID NO: 48149 - protein, 627 aa, Ciona intestinalis
MSTAVGIDLGTTYSCVGVFRHGKVEIIANDQGNRTTPSYVAFNETERLIGDGAKDQVARNPENSIFDAKRLIGRNYNDPAVQKDKEHWPFKVVNKNGKPFLQAEYQGDVKTFSPEEISAMVLTKMKDTAEAYLGENVKDAVITVPAYFNDSQRQATKDAGIIAGLNVLRVINEPTAAALAYGLDKNLVGEKKVLIFDLGGGTFDVSVLTIDEGSIFEVLSTAGDTHLGGEDFDNRMVKHFTEEFKRKHKKDISKSNRAIRRLRTACERAKRVLSTSTEAAVELDSLYEGIDFYSKISRARFEELCSDLFRSCLDPVEKALRDAKLDKTKIDEVVLVGGSTRIPRVQNLLSDFFNGKNLNKSINPDEAVAYGAAVQAAVLTGNSGVKDVLLVDVAPLSLGIETAGEMMTKLVERNTRIPHNTSQVFTTYADNQPAVTIQVYEGERAQTKHNNLLGTFNLTGIAPAPRGVPKIKVSFDIDANGILQVSAKDESTGKANQITINKGRLSKADIETMLADAEKYKEEDNKQMERHKAKNELESYMYGCKNAAEEAGEKLSSADKDQVTQICDDTQKWLDGNSLAEKEEFEERLNELKKVCSPLMSKIHASAGGHQQNGQGKPDGPVIDEMD

SEQ ID NO: 48150 - DNA, 1950 bp, Bombyx mori
  CDS (1)..(1950)
atggcaaaagcacccgcagtaggaatcgatctgggtaccacgtactcttgcgttggtgtcttccagcacgggaaggtggagatcatcgccaacgaccagggcaacaggaccactccgtcttatgttgcgttcacagacaccgagcgtctcatcggagatgccgccaagaaccaggtggcgatgaaccccaacaacacaatattcgatgccaaacgtctcatcggacgtaagttcgaagatgctactgtgcaagccgacatgaagcactggcctttcgaggttgtcagtgatggaggcaaacctaagatcaaggtagcatataagggtgaagacaaaacctttttccccgaggaagtcagttccatggtgcttacgaaaatgaaggaaactgccgaagcttatcttggcaaaactgtgcagaatgcagttatcacggttcccgcgtacttcaatgactctcaaagacaagccacaaaagatgcaggtaccatctctggcttgaacgttctccgaatcatcaatgaaccgactgctgctgcgattgcttacggtcttgacaaaaagggtactggagaacgaaatgtacttatctttgacctcggcggcggtaccttcgacgtgtccatccttaccatcgaggatggtatcttcgaggtgaaatccaccgccggcgacacccacttgggaggtgaggactttgacaatcgcatggtcaaccactttgtccaggagttcaagaggaaatacaaaaaggacctcgctaccaacaagagagctcttaggcgtttgcgtactgcatgtgagagggcaaagaggaccttgtcatcgtccacacaagcgagcattgagatagattctctctttgagggtattgacttctacacgtcaattactcgtgctcgcttcgaggagctgaacgccgatctgttcaggtctaccatggagccagtggagaagtctctccgtgatgccaagatggataaggctcaaatccacgatattgtactggtgggtggctccactcgtatccccaaggtgcagaagctcctgcaagatttctttaatggaaaggagctcaacaaatctattaaccctgacgaggccgtagcttatggtgcagctgtccaggctgctatcttgcacggtgacaagtctgaggaggtgcaggatctgctgttgcttgatgtaacacccctttccctcggtattgagactgctggaggtgtcatgaccacactcatcaagcgtaacactaccatccccactaaacagactcagacattcaccacctactctgataaccaacccggagtactcatccaagtatttgagggtgagcgtgctatgaccaaagataacaacttgctcggtaaattcgagctgaccgggatcccaccggcgccgcgtggcgtgcctcaaattgaggtcaccttcgacatcgatgccaacggtatcctcaacgtttccgctatcgagaagtccaccaacaaggagaacaagatcaccattaccaacgacaaaggtcgtctctccaaggaagagatcgagcgtatggttaatgaggcagagaagtacagaaacgaggatgacaagcaaaaggagaccatccaggccaagaatgcattggaatcttactgcttcagcatgaagtctaccatggaggatgagaagctcaaggaaaagatctctgactctgacaagcagaccatcctcgacaagtgcaacgacaccatcaagtggctggattccaaccagctggccgacaaggaggagtatgagcacaagcagaaagaattggaaggcatttacaatccgataattacgaagatgtaccagggtgccggaggagtccccggaggtatgccgggcttcccgggcggagcacccggagccggaggtgccgcccccggggctggaggcgctggccccaccatcgaggaggtcgattaa

SEQ ID NO: 48151 - protein, 649 aa, Bombyx mori
MAKAPAVGIDLGTTYSCVGVFQHGKVEIIANDQGNRTTPSYVAFTDTERLIGDAAKNQVAMNPNNTIFDAKRLIGRKFEDATVQADMKHWPFEVVSDGGKPKIKVAYKGEDKTFFPEEVSSMVLTKMKETAEAYLGKTVQNAVITVPAYFNDSQRQATKDAGTISGLNVLRIINEPTAAAIAYGLDKKGTGERNVLIFDLGGGTFDVSILTIEDGIFEVKSTAGDTHLGGEDFDNRMVNHFVQEFKRKYKKDLATNKRALRRLRTACERAKRTLSSSTQASIEIDSLFEGIDFYTSITRARFEELNADLFRSTMEPVEKSLRDAKMDKAQIHDIVLVGGSTRIPKVQKLLQDFFNGKELNKSINPDEAVAYGAAVQAAILHGDKSEEVQDLLLLDVTPLSLGIETAGGVMTTLIKRNTTIPTKQTQTFTTYSDNQPGVLIQVFEGERAMTKDNNLLGKFELTGIPPAPRGVPQIEVTFDIDANGILNVSAIEKSTNKENKITITNDKGRLSKEEIERMVNEAEKYRNEDDKQKETIQAKNALESYCFSMKSTMEDEKLKEKISDSDKQTILDKCNDTIKWLDSNQLADKEEYEHKQKELEGIYNPIITKMYQGAGGVPGGMPGFPGGAPGAGGAAPGAGGAGPTIEEVD

SEQ ID NO: 48152 - DNA, 1947 bp, Oryza sativa (japonica cultivar-group)
  CDS (1)..(1947)
atggcgaagggagagggcccggcgatcggcatcgacctcggcaccacctactcgtgcgtcggcgtgtggcagcacgaccgggtggagatcatcgccaacgaccaggggaaccgcaccacgccgtcgtatgtcgcgttcaccgactccgagcggctcatcggcgacgccgccaagaaccaggtcgccatgaaccccatcaacaccgtcttcgatgccaagcgactgataggtaggcggttctccgacccgtccgtgcagagtgacatgaagctgtggccgttcaaggtcatccctggccccggcgataagcctatgattgtggtgcagtacaagggcgaggagaagcagttctccgccgaggagatctcctccatggtgctcatcaagatgagggagatcgctgaagcctacctcggctccaacatcaagaacgccgtggtgactgtgccggcctacttcaacgactcgcagaggcaggccaccaaggacgccggtgtcattgccggcctcaacgtgatgcgcatcatcaacgagcccaccgccgcggccatcgcctacggtcttgacaagaaggccaccagctccggcgagaagaacgtgctcatcttcgatcttggcggtggcacgttcgatgtgtcgctgctcaccattgaggagggcattttcgaggtgaaggccactgctggtgacactcaccttggtggtgaggacttcgacaaccgcatggtgaaccatttcgtcctggagttcaagcgcaagaacaagaaggacatcagcggcaacccgcgtgctctgcgccggctgcgcacggcctgcgagcgcgccaagcgcacgctgtcgtcgaccgcacagaccaccattgagatcgactccctgtacgagggcatcgacttctactcgaccatcaccagggctcgcttcgaggagctcaacatggacctgttccgcaagtgcatggagccggtggagaagtgcctgcgcgacgccaagatggacaagagcagcgtgcacgacgtcgtgctcgtcggcggctccacccgcatccccaaggtgcagcagctgcttcaggacttcttcaacggcaaggagctgtgcaagagcatcaaccccgacgaggccgtggcatacggcgccgctgtccaggccgccatcctcagcggcgagggcaacgagaaggtgcaggacctgcttctgctcgacgtcacgccgctgtcgctggggctcgagacagcaggaggtgtcatgaccgtgctcatcccgaggaacaccaccatccccaccaagaaggagcaggtgttctcgacctactccgacaatcagcctggcgtcctgatccaggtgtacgagggtgagcgtgcccggaccaaggacaacaacctgctgggcaagttcgagctctccggcatccctccagctccccgcggcgtgccccagatcaccgtctgctttgacatcgacgccaatggcatcctcaacgtctctgccgaggacaagaccaccgggcagaagaacaagatcaccatcaccaacgacaagggcaggctgagcaaggaggagatcgagaagatggtgcaggaggcggagaagtacaaggcggaggacgaggagcacaagaagaaggtggacgccaagaacgcgctcgagaactacgcctacaacatgaggaacaccatcaaggacgacaagatcgcctccaagctctcggcggacgacaagaagaagatcgaggacgccatcgacggcgccatcaactggctcgacagcaaccagctcgcggaggcggacgagttcgaggacaagatgaaggagctggagagcatctgcaaccccatcatcgcgaagatgtaccagggcgccggcgcggacatgggcggcgccgctggcatggacgaggacgcgccggcgggtggcagcggtgcaggccccaagatcgaggaggtcgattaa

SEQ ID NO: 48153 - protein, 648 aa, Oryza sativa (japonica cultivar-group)
MAKGEGPAIGIDLGTTYSCVGVWQHDRVEIIANDQGNRTTPSYVAFTDSERLIGDAAKNQVAMNPINTVFDAKRLIGRRFSDPSVQSDMKLWPFKVIPGPGDKPMIVVQYKGEEKQFSAEEISSMVLIKMREIAEAYLGSNIKNAVVTVPAYFNDSQRQATKDAGVIAGLNVMRIINEPTAAAIAYGLDKKATSSGEKNVLIFDLGGGTFDVSLLTIEEGIFEVKATAGDTHLGGEDFDNRMVNHFVLEFKRKNKKDISGNPRALRRLRTACERAKRTLSSTAQTTIEIDSLYEGIDFYSTITRARFEELNMDLFRKCMEPVEKCLRDAKMDKSSVHDVVLVGGSTRIPKVQQLLQDFFNGKELCKSINPDEAVAYGAAVQAAILSGEGNEKVQDLLLLDVTPLSLGLETAGGVMTVLIPRNTTIPTKKEQVFSTYSDNQPGVLIQVYEGERARTKDNNLLGKFELSGIPPAPRGVPQITVCFDIDANGILNVSAEDKTTGQKNKITITNDKGRLSKEEIEKMVQEAEKYKAEDEEHKKKVDAKNALENYAYNMRNTIKDDKIASKLSADDKKKIEDAIDGAINWLDSNQLAEADEFEDKMKELESICNPIIAKMYQGAGADMGGAAGMDEDAPAGGSGAGPKIEEVD

SEQ ID NO: 48154 - DNA, 2040 bp, Oryza sativa (japonica cultivar-group)
  CDS (1)..(2040)
atggcggcgtcgctgcttctccgagccgcccgccggcgagacctcgcctcgcccctcggaacgttgaccgccaatgctcaatcggcatattctgcgaatatttgttcacaatggggtagttttgcaagagctttcagtgtaaaaccaactggaaacgaggttattggaattgatttgggaacaactaattcttgtgtttctgttatggagggaaagaaccccaaagtgatagagaattcagaaggcaccaggacaacaccatcagttgtggcctttaatcagaagggagagcgacttgttggaactccagccaagcgtcaagcagtgaccaacccacaaaacactttctttggcacaaaacgtctgattgggagacgctttgaggatccacaaacacagaaagagatgaaaatggtaccatacaaaattgtgaaggctccaaatggtgatgcttgggtggaaacaacagatggcaagcagtactcaccaagtcagattggcgcatttgttttgaccaagatgaaggagactgctgaatcttaccttggtaaaactgtttcaaaggccgtgattacagttccagcttattttaatgatgctcagcgtcaggcaaccaaggatgctggtcgcattgctggacttgatgtccagaggatcatcaatgaaccaactgctgctgctttgtcttatggaacaaacaacaaggagggtttgatagctgtgtttgacctgggaggaggtacctttgatgtctcaattcttgaaatctccaatggggtgttcgaggtcaaagcaacaaatggtgacacttttctgggaggagaagactttgataacactcttttggagttcttggtgagtgaattcaagaggagtgaagctattgatctggcaaaggacaggctggctctgcagaggttacgtgaagctgctgagaaggctaaaattgaactctcatcgactgcccagaccgagattaaccttccattcatcacagctgatgcttctggagctaaacatttgaacattacacttacaagatcaaagtttgaatctttggtgaatagcctcatcgagaggaccagagagccatgcaagaattgcttgaaggatgctggtataactaccaaggaggttgatgaggtccttcttgttggtggaatgacaagagttccaaaagtgcaggaaattgtttcagagatttttggcaagtccccaagcaaaggggtcaacccagatgaagctgtagccatgggtgcagccatacagggtggtattctccgtggagatgtaaaggagctgcttctccttgatgtgacccccctttcacttggtatcgagactcttggtggtatcttcaccagactgattaaccggaacactacaatccccacgaagaaaagtcaggtgttctccactgctgctgacaaccagacacaagtgggcattcgtgtcttgcaaggtgagcgtgagatggcgacagacaacaagcttcttggtgagtttgatcttgttggcattccaccagcgccaagaggtatgccacagatcgaggtcacatttgacatcgatgccaatggaattgtgacggtctctgcaaaagacaagtctaccgggaaggagcagcaaatcaccatccgatcctccggtggcctctcagaagctgagattcagaagatggtccaggaggctgagcttcactctcagaaggatcaggagcggaaagccctcattgacatcagaaacaacgctgacactaccatttacagcgttgagaaaagtctgggagagtacagggacaagattcctgcagaggttgccactgagattgagacagcaatcgccgatctccgctctgtgatgacctcagatgacatcgagaagatcaaggccaatatcgaagcggccaacaaggctgtttcaaagattgggcagcatatgtctggtggtggtggtggcgcaggcggttcagagacaggaggatctcagggcggaggcgagcaggctccagaggctgagtacgaggaggtcaagaagtga

SEQ ID NO: 48155 - protein, 679 aa, Oryza sativa (japonica cultivar-group)
MAASLLLRAARRRDLASPLGTLTANAQSAYSANICSQWGSFARAFSVKPTGNEVIGIDLGTTNSCVSVMEGKNPKVIENSEGTRTTPSVVAFNQKGERLVGTPAKRQAVTNPQNTFFGTKRLIGRRFEDPQTQKEMKMVPYKIVKAPNGDAWVETTDGKQYSPSQIGAFVLTKMKETAESYLGKTVSKAVITVPAYFNDAQRQATKDAGRIAGLDVQRIINEPTAAALSYGTNNKEGLIAVFDLGGGTFDVSILEISNGVFEVKATNGDTFLGGEDFDNTLLEFLVSEFKRSEAIDLAKDRLALQRLREAAEKAKIELSSTAQTEINLPFITADASGAKHLNITLTRSKFESLVNSLIERTREPCKNCLKDAGITTKEVDEVLLVGGMTRVPKVQEIVSEIFGKSPSKGVNPDEAVAMGAAIQGGILRGDVKELLLLDVTPLSLGIETLGGIFTRLINRNTTIPTKKSQVFSTAADNQTQVGIRVLQGEREMATDNKLLGEFDLVGIPPAPRGMPQIEVTFDIDANGIVTVSAKDKSTGKEQQITIRSSGGLSEAEIQKMVQEAELHSQKDQERKALIDIRNNADTTIYSVEKSLGEYRDKIPAEVATEIETAIADLRSVMTSDDIEKIKANIEAANKAVSKIGQHMSGGGGGAGGSETGGSQGGGEQAPEAEYEEVKK

SEQ ID NO: 48156 - DNA, 2031 bp, Oryza sativa (japonica cultivar-group)
  CDS (1)..(2031)
atggcggcgtcgctgcttctccgcgccgtgcgccggcgagacctcgcgtctcctctcgggaccttgaccgcgaacgtccagtcaaagtgtgctgcaaatgtgtgttcaagatgggctggttttgcaagaactttcagtgcaaaagcaactggaaatgaggttattggaattgatttaggaacaactaactcatgtgtttcagttatggaaggaaagaacccaaaagtaatagagaattcagaaggaaccaggacaacaccgtcagtagttgctttcaatcagaagggagagctacttgttggaacaccagccaagcgtcaagcagtgaccaacccacagaacactttctttggtacaaagcgtctgatagggcggcgctttgatgacccgcaaactcagaaagagatgaaaatggtaccatataaaattgtgaaggctctgaatggtgatgcttggctagagacaacagatggcaagcagtactcaccgagccagattggtgcctttgttttgaccaagatgaaggagacagctgaatcttaccttggaaaatctgtttccaaggctgtgattactgttccagcttatttcaatgatgctcagcgtcaggctaccaaggatgctggtcgcatcgctggacttgatgtccaaagaatcatcaatgaacccactgctgctgctctgtcttatggaacaaacaacaaggagggtttgatcgctgtgtttgaccttggaggaggaacatttgatgtgtccattctagaaatatccaatggagtttttgaggtcaaagcaacaaatggtgacacttttctgggtggagaagactttgataatactcttttggagtttttagtaagtgagttcaaaagaactgaaggtattgatctgtcaaaagacagactggctctgcagaggctacgcgaagcagctgagaaagcaaaaattgaactctcatcaacagcccagaccgagattaatcttccattcatcacagctgattcctctggagcaaagcatctaaatatcacattgacaagatcgaagtttgaaagtttggtgaatagtctgattgagaggactagagacccatgcaagagctgcttgaaggatgctggtataactactaaagatgttgatgaggtccttcttgttggtggcatgacaagggttccaaaagtgcaggaagttgtttctgaaatctttggtaaggcccctagcaaaggagtaaacccagatgaagctgtggccatgggtgctgctattcagggcggcattctccgtggagatgtaaaggatcttctcctccttgatgtaacccctctatcgcttggtatcgagactcttggtggtatcttcaccagactaatcaacaggaacactacagtccccacgaagaaaagtcaggtgttctcaactgctgctgacaaccagacgcaagtgggtattaaggtgttgcaaggtgagcgtgagatggcagcagacaacaaacttcttggtgagtttgaccttgttggcattccaccagcgccaagaggtatgccacagattgaggtcacattcgacatcgatgccaatggaatcgtgacggtctcagcaaaggataaggcaactggaaaggagcagcagatcacaattcgatcctctggtgggctttctgaggctgagatccagaagatggtccatgaggctgagctgcactcccagaaggatcaagaacggaaagccctcatcgacatcagaaacaccgcagacacaaccatctacagcatagagaaaagtctgggtgagtacagggacaagatacctgcagaggttgcctccgagatcgagacggcgattgccgatctccgcaatgagatggcctcggatgacattgagaagataaagagcaagatcgaagcggccaacaaggctgtctcaaagattgggcaacacatgtctggtggtgggtctggtggctcgcaagcaggatcacagggcggaggtgaccaggctcctgaggctgagtatgaggaggtcaagaagtga

SEQ ID NO: 48157 - protein, 676 aa, Oryza sativa (japonica cultivar-group)
MAASLLLRAVRRRDLASPLGTLTANVQSKCAANVCSRWAGFARTFSAKATGNEVIGIDLGTTNSCVSVMEGKNPKVIENSEGTRTTPSVVAFNQKGELLVGTPAKRQAVTNPQNTFFGTKRLIGRRFDDPQTQKEMKMVPYKIVKALNGDAWLETTDGKQYSPSQIGAFVLTKMKETAESYLGKSVSKAVITVPAYFNDAQRQATKDAGRIAGLDVQRIINEPTAAALSYGTNNKEGLIAVFDLGGGTFDVSILEISNGVFEVKATNGDTFLGGEDFDNTLLEFLVSEFKRTEGIDLSKDRLALQRLREAAEKAKIELSSTAQTEINLPFITADSSGAKHLNITLTRSKFESLVNSLIERTRDPCKSCLKDAGITTKDVDEVLLVGGMTRVPKVQEVVSEIFGKAPSKGVNPDEAVAMGAAIQGGILRGDVKDLLLLDVTPLSLGIETLGGIFTRLINRNTTVPTKKSQVFSTAADNQTQVGIKVLQGEREMAADNKLLGEFDLVGIPPAPRGMPQIEVTFDIDANGIVTVSAKDKATGKEQQITIRSSGGLSEAEIQKMVHEAELHSQKDQERKALIDIRNTADTTIYSIEKSLGEYRDKIPAEVASEIETAIADLRNEMASDDIEKIKSKIEAANKAVSKIGQHMSGGGSGGSQAGSQGGGDQAPEAEYEEVKK

SEQ ID NO: 48158 - DNA, 2010 bp, Oryza sativa (japonica cultivar-group)
  CDS (1)..(2010)
atggcgagagataagcaatctgctttaatcgtcgcagcgttcgtactcctctgttcagggtgtttgtgcggagttgcagatggggcgaagggagggaggaagacgaaagggccggtgatcggcatcgacctcgggacgacctactcgtgcgtgggggtgtaccggaacggccacgtggacatcgtcgccaacgaccagggcaaccggatcacgccgtcgtgggtggcgttcaccgacgacgagcgcctcgtcggcgaggccgccaagaaccaggcggcgctcaacccggaccgcaccatcttcgacatcaagcgcctcatcggccgtaggttcgacgacgaggaggtgcagcgagacgtgaagtatctcccgtacaaggtggtggacaagggcgggaagccgtacgtcgaggtgcgggtcaaggccggcgaggtgaaggtgttcagccccgaggagatcagcgccatgatcctcgccaagatgaaggagacagccgagtcctacctcggccagcgcgtcaccgacgccgtcgtcaccgtgcctgcgtacttcaacgacgcgcagaggcaggcgaccaaggacgccggcacgatcgccgggctgaacgtgccgcggatcatcaacgagccgacggcggcggcgatcgcgtacgggctcgacaggaagggggcgggggagatgacgaacgtgctggtgtacgacctcggcggcgggacgttcgacgtgagcgtgctgagcctcgaccacggcgtgttcgaggtgctcgccaccagcggcgacacgcacctcggcggcgaggacttcgaccgccgcgtcatggaccacttcatccgcctcgtcaagcggcagcacggcagggacatcggcggcgacggccgcgcgctcggcaagctccgccgcgagtgcgagcgcgccaagcgcgcgctcagcagacagcaccaggtccgcgtcgagatcgaggcgctgttcgtcggcgtcgacttctcggagacgctgacgagggccaagttcgaggagctcaacatggacctgttcaagaagacgctgggacctgtccggaaggccatcgccgacgccaagctcaagaagtccgacatcgacgagatcgtcctcgtcggcggcagcaccaggatccccaaggtgcaggagctcctcaaggagatgttcgacggcaaggagccaaccaaggggatcaaccccgacgaggctgtcgcctatggcgccgccgtccagggcagcatcatcagcggcgagggcggcgccgagaccaaagacatcttgctgctcgacgtgacgccattgacgctcgggatcgagaccgccggcggcgtgatgaccaagctgatcccccggaacacgaggatcccggtgaagaagtcgcaggtcttcacgacctacgaggatcaccagaccacggtctcgatcaaggttttcgagggcgagcggagcttgacgaaggactgccgcgagctggggcggttcgacctgtccgggattgcgccggcgccgcgcggcgtgccgcagatcgaggtgacgttcgaggtcgacgagaacggcatcctgcacgtgacggcgtcggacaaggcggcggggcggtccaagtcgatcaccatcaccaacgacaagggccggctcagccaggaggagatcgaccggatggtgcgcgaggccgaggagttcgcggaggaggaccgccgcgtccgggagcgcgtcgacgcgcgcaaccgcctcgagaactacgtgtaccgcatgcggagcgccgtgcgggacggcggcatggccggcaagatcggcgacgacgacagggagaggatggagtccgccctgacggaggctctggagtggctggaggacaacgacggcggcgcacggacggcggagaaggaggactacgaggagaagctgaaggaggtggagcaggtgtgcggcccgatcatcaagcaggtctacaagaagagcggcgacgcgtcggccggcgccggagacgacgacgacgtgaatgagctgtag

SEQ ID NO: 48159 - protein, 669 aa, Oryza sativa (japonica cultivar-group)
MARDKQSALIVAAFVLLCSGCLCGVADGAKGGRKTKGPVIGIDLGTTYSCVGVYRNGHVDIVANDQGNRITPSWVAFTDDERLVGEAAKNQAALNPDRTIFDIKRLIGRRFDDEEVQRDVKYLPYKVVDKGGKPYVEVRVKAGEVKVFSPEEISAMILAKMKETAESYLGQRVTDAVVTVPAYFNDAQRQATKDAGTIAGLNVPRIINEPTAAAIAYGLDRKGAGEMTNVLVYDLGGGTFDVSVLSLDHGVFEVLATSGDTHLGGEDFDRRVMDHFIRLVKRQHGRDIGGDGRALGKLRRECERAKRALSRQHQVRVEIEALFVGVDFSETLTRAKFEELNMDLFKKTLGPVRKAIADAKLKKSDIDEIVLVGGSTRIPKVQELLKEMFDGKEPTKGINPDEAVAYGAAVQGSIISGEGGAETKDILLLDVTPLTLGIETAGGVMTKLIPRNTRIPVKKSQVFTTYEDHQTTVSIKVFEGERSLTKDCRELGRFDLSGIAPAPRGVPQIEVTFEVDENGILHVTASDKAAGRSKSITITNDKGRLSQEEIDRMVREAEEFAEEDRRVRERVDARNRLENYVYRMRSAVRDGGMAGKIGDDDRERMESALTEALEWLEDNDGGARTAEKEDYEEKLKEVEQVCGPIIKQVYKKSGDASAGAGDDDDVNEL

SEQ ID NO: 48160 - DNA, 1950 bp, Oryza sativa (japonica cultivar-group)
  CDS (1)..(1950)
atggcgccgaccaagggggaggggccagcgatcggcatcgacctcgggacgacctactcgtgcgtgggggtgtggcagcacgaccgcgtcgagatcatcgccaacgaccaggggaaccgcaccaccccctcctacgtcgggttcacggacaccgagcgcctcatcggggatgccgccaagaaccaggtcgccatgaaccccatcaacaccgtcttcgatgccaagcgtcttatcggcagacggttttctgatgcctctgtccagagcgatatcaagatgtggccttacaaggttattcctggcccaggggataagcctatgattgtagtgcagtacaagggtgaggagaagcaattctctgccgaagaaatttcatccatggttcttatcaagatgcgtgagatcgctgaagcttacctagggtcaactgtgaagaatgctgttgtcactgttcctgcatacttcaatgattcccagaggcaggcaactaaagatgcaggtgttattgcgggtcttaatgttatgcgtatcatcaatgagccaacagctgctgcaattgcttatggtcttgacaagaaggcgactagtgttggtgagaagaacgtgctcatttttgaccttggtggtggtacttttgatgtctccctccttaccattgaggagggtatttttgaggtgaaagcaacagctggtgacactcaccttggtggggaggactttgacaaccgcctggtgaaccactttgtccaagagttcaagagaaagcataagaaggatatcagcgggaaccccagggctttgaggaggctcagaacatcatgtgaaagggcaaagaggaccctctcctccactgcccaaactactattgaaattgattccctctttgagggtgttgatttctattccaccatcaccagagccaggtttgaggagcttaacatggacctcttcaggaaatgtatggagcctgtggagaagtgcctgagggatgcaaagatggacaagagcactgtccatgatgttgtccttgttggtggttcaactagaatccctagggttcagcagcttctgcaggatttcttcaatgggaaggaactctgcaagagcattaaccctgatgaagctgtggcatacggtgctgccgtccaggctgctatccttagtggagaggggaacgagaaggtgcaggatcttcttctccttgatgtgactccactgtctcttggtctcgagacagcgggaggtgtgatgacagtgctcatcccaaggaacaccaccattcctaccaagaaggagcaggtcttctccacctactccgataaccagcctggtgtgttgattcaggtctatgagggtgagaggacacggaccagggacaacaatctccttggcaaatttgagctgtctggaatccctcctgcccctaggggagtccctcagatcactgtctgctttgacattgatgccaacggtatcctgaatgtgtctgccgaagacaagacaactggccagaagaacaagataaccatcacaaatgacaagggaaggctgagcaaagaggagatagagaagatggttcaggacgccgagaagtacaagtccgaggatgaagagcacaaaaagaaagttgacgccaagaattccctggagaactatgcttacaacatgaggaacactatccaagacgagaagattgcttccaagctgccagctgacgacaagaaaaagattgaggacgcggtcgagcaggcgatccagtggctggacaacaaccagctcgctgaggttgaagagttcgaagacaagatgaaggagctggagggcctgtgcaacccaattattgccaagatgtaccagggtgctggtgccgacatgggtggtggaatggacgatgatgctccggctgctggtgggagtggtgctggccctaagattgaggaggtcgactaa

SEQ ID NO: 48161 - protein, 649 aa, Oryza sativa (japonica cultivar-group)
MAPTKGEGPAIGIDLGTTYSCVGVWQHDRVEIIANDQGNRTTPSYVGFTDTERLIGDAAKNQVAMNPINTVFDAKRLIGRRFSDASVQSDIKMWPYKVIPGPGDKPMIVVQYKGEEKQFSAEEISSMVLIKMREIAEAYLGSTVKNAVVTVPAYFNDSQRQATKDAGVIAGLNVMRIINEPTAAAIAYGLDKKATSVGEKNVLIFDLGGGTFDVSLLTIEEGIFEVKATAGDTHLGGEDFDNRLVNHFVQEFKRKHKKDISGNPRALRRLRTSCERAKRTLSSTAQTTIEIDSLFEGVDFYSTITRARFEELNMDLFRKCMEPVEKCLRDAKMDKSTVHDVVLVGGSTRIPRVQQLLQDFFNGKELCKSINPDEAVAYGAAVQAAILSGEGNEKVQDLLLLDVTPLSLGLETAGGVMTVLIPRNTTIPTKKEQVFSTYSDNQPGVLIQVYEGERTRTRDNNLLGKFELSGIPPAPRGVPQITVCFDIDANGILNVSAEDKTTGQKNKITITNDKGRLSKEEIEKMVQDAEKYKSEDEEHKKKVDAKNSLENYAYNMRNTIQDEKIASKLPADDKKKIEDAVEQAIQWLDNNQLAEVEEFEDKMKELEGLCNPIIAKMYQGAGADMGGGMDDDAPAAGGSGAGPKIEEVD

SEQ ID NO: 48162 - DNA, 2010 bp, Oryza sativa (japonica cultivar-group)
  CDS (1)..(2010)
atggcgcgcggcgcaacgtggacgcggcggctgcacctgcacggcctcttcctcgccgtgctcctcctcctcacgttgccggcgggctccaccgcggccgccggcggcggcggcggcaccgtgatcgggatcgacctcggcaccacctactcgtgcgttggtgtctaccggaatggccacgtcgagatcatcgccaacgaccaggggaaccggatcacaccctcgtgggtcgccttcaccggcggcggcgagcggctcatcggcgaggccgccaagaaccaggcggcggcgaacccggggcggacggtgtacgacgccaagcgcctcatcggccgccggttcgccgacgccgaggtgcagcgcgacatgaggctgctgccgttcgctgtcgtcgacaagggcggcaagccgcacgtccgcgtcgaggtgaggggcggcgacgtgcggctgctcagccccgaggaggtgagcgccatggtgctcgccaggatgaaggagacggcggaggcctacctcggggaggaggtcacccgcgccgtcgtcaccgtgccggcctacttcaacgacgcgcagcggcaggccaccaaggacgccgccaccatcgccggcctcgccgtcgagcgcatcctcaacgagcccaccgccgccgcgctcgcctatggcgtcggcaaggagggcgccggcgggaagaacgtcctcgtcttcgacctcggcggcggcacgttcgacgtcagcgtcctcgccatcgacggcggcgtgtacgaggtcctcgccaccaacggcgacacccacctcggcggcgaggacttcgaccagcgcgtcatggagcacttcgtggagctcgtcaggcgcaagcacggccgcgacatcgccggcgacgcgcgcgcgctcggcaagctccgccgcgagtgcgagcgcgccaagcgcgcgctcagcatccagcaccaggtgcgcgtcgaggtggagtctctgttcgacggcgtcgacctgtcggagccgctgtccagggcgcggttcgaggagctcaacaacgacctgttccggaagacgatggcgccggtgaggaaggccatggcggacgccaggctgagcaatgccgacatcgacgagatcgtcctcgtcggcggcagcacgaggatccccaaggtgaggcagctgctcagggactacttcggcggcaagcagcccaaccagggcgtcaaccccgacgaggccgtggcctacggcgccgccatccaggccaacatcgtcggcggcgacaccgacaacaaaacccgcgacatggtcgtcctcgacgtcacgccgctcaccctcggcctcgagaccgccggcggcgtcatggccaccctgatcccgcgcaacacgccggtgccgacgaagagggcgcagctgttctccacctacaaggacaagcagacgacggtgaccgtcaaggtgttcgagggcgagcggagcatgacgcgggacaaccggctgctcggcaggttcgacctcgccggcatcgcgccggcgccgcgcggcgcgccgcagatcgaggtggcgttcgaggtggacgcggacggcatcctcagcgtgagcgccgccgacagggccaccggcaggtcggagaggatcaccatctccggcgacgaccgcaagaccagccgggaggagatcgaccggatgctgggcgaggcggaggagttcgccgacgaggaccgccgccacagggagcgcgccggcgcccggaacagcctggaagcctacgtctacggcgtcaagaacgccgtggtgggcggcgagatggcgggcgccatggacggcggcgagaaggagaaggtggaggcggcggtgatggaggcgtacgagtggctcgacggcaaccaggacgtcggcaaggaggagtacgaggagaagctccgggagctggaggacgtgtgcaacccggtcatgtcggcggtgtaccagaggtccggcggctcacggcgagatggcgacggcggcggcgacgacgatcacgatgagctttag

SEQ ID NO: 48163 - protein, 669 aa, Oryza sativa (japonica cultivar-group)
MARGATWTRRLHLHGLFLAVLLLLTLPAGSTAAAGGGGGTVIGIDLGTTYSCVGVYRNGHVEIIANDQGNRITPSWVAFTGGGERLIGEAAKNQAAANPGRTVYDAKRLIGRRFADAEVQRDMRLLPFAVVDKGGKPHVRVEVRGGDVRLLSPEEVSAMVLARMKETAEAYLGEEVTRAVVTVPAYFNDAQRQATKDAATIAGLAVERILNEPTAAALAYGVGKEGAGGKNVLVFDLGGGTFDVSVLAIDGGVYEVLATNGDTHLGGEDFDQRVMEHFVELVRRKHGRDIAGDARALGKLRRECERAKRALSIQHQVRVEVESLFDGVDLSEPLSRARFEELNNDLFRKTMAPVRKAMADARLSNADIDEIVLVGGSTRIPKVRQLLRDYFGGKQPNQGVNPDEAVAYGAAIQANIVGGDTDNKTRDMVVLDVTPLTLGLETAGGVMATLIPRNTPVPTKRAQLFSTYKDKQTTVTVKVFEGERSMTRDNRLLGRFDLAGIAPAPRGAPQIEVAFEVDADGILSVSAADRATGRSERITISGDDRKTSREEIDRMLGEAEEFADEDRRHRERAGARNSLEAYVYGVKNAVVGGEMAGAMDGGEKEKVEAAVMEAYEWLDGNQDVGKEEYEEKLRELEDVCNPVMSAVYQRSGGSRRDGDGGGDDDHDEL

SEQ ID NO: 48164 - DNA, 1941 bp, Oryza sativa (japonica cultivar-group)
  CDS (1)..(1941)
atgtcgaagggggaagggccggcgatcgggatcgacctggggacgacctactcgtgcgtgggcgtgtggcagcacgaccgcgtggagatcatcgccaacgaccaggggaaccggaccacgccgtcgtacgtcgccttcaccgacaccgagcggctcatcggcgacgccgccaagaaccaggtcgccatgaacccaaccaacaccgtcttcgatgcgaagcggttgattggtaggaggttctccgacccgtccgtgcagagtgacatgaagctatggccgttcaaggtggtgcctggccccggcgacaagccgatgatcgtcgtccagtacaagggcgaggagaagcagttcgccgcggaggagatctcgtccatggtgctgatcaagatgagggagatcgcggaggcctacctcggctcgtccatcaagaacgccgtggtcaccgtcccggcctacttcaacgactcgcagaggcaggccaccaaggacgccggcgtcatcgccgggctcaacgtgatgcgcatcatcaacgagcccaccgccgccgccatcgcgtacggcctcgacaagaaggcgacgagcagcggcgagaagaacgtgctcatctttgacctcggcggcggcacgttcgacgtgtcgctgctcaccatcgaggagggcatcttcgaggtcaaggccaccgccggcgacacccacctcggcggcgaggacttcgacaaccgcatggtgaaccacttcgtgcaggagttcaagcgcaagaacaagaaggacatcagcggcaacccgcgcgcgctgcggcggctcaggacggcgtgcgagcgcgccaagcgcacgctgtcgtcgacggcgcagaccaccattgagatcgactcgctgtacgagggcatcgacttctacacgacgatcaccagggcgcggttcgaggagctcaacatggacctgttccgcaagtgcatggagcccgtggagaagtgcctccgcgacgccaagatggacaagagcagcgtgcacgacgtcgtgctcgtcggcggctccacccgcatccccaaggtgcagcaactgctccaggacttcttcaacggcaaggagctctgcaagagcatcaaccccgacgaggccgtggcgtacggcgccgccgtccaggccgccatcctgagcggcgagggcaacgagaaggtgcaggacctgctcctgctcgacgtcaccccgctgtccctcggcctcgagaccgccggcggcgtcatgaccgtgctcatcccgaggaacaccaccatcccgaccaagaaggagcaggtcttctccacctactccgacaaccagcccggcgtcctgatccaggtgtacgagggcgagcgcgccaggaccaaggacaacaacctcctcggcaagttcgagctctccggcatcccaccggcgccgcgcggcgtgccccagatcaacgtctgcttcgacatcgacgccaacggcatcctgaacgtgtccgcggaggacaagacgacggggcagaagaacaagatcaccatcaccaacgacaaggggcggctgagcaaggaggagatcgagaagatggtgcaggaggcggagaagtacaaggccgaggacgaggagcacaagaagaaggtggacgccaagaacgccctcgagaactacgcctacaacatgcgcaacaccatcaaggacgagaagatcgcctccaagctcgccgccgacgacaagaagaggatcgaggacgccatcgatggcgccatcagctggctcgacaccaaccagctcgccgaggccgacgagttcgaggacaagatgaaggagctggagggcatctgcaacccgatcatcgccaagatgtaccagggccccggcgccgacatggccggaggcatggacgaggacgcgccggcgggcggcagcggcgcaggccccaagatcgaggaggtcgactaa

SEQ ID NO: 48165 - protein, 646 aa, Oryza sativa (japonica cultivar-group)
MSKGEGPAIGIDLGTTYSCVGVWQHDRVEIIANDQGNRTTPSYVAFTDTERLIGDAAKNQVAMNPTNTVFDAKRLIGRRFSDPSVQSDMKLWPFKVVPGPGDKPMIVVQYKGEEKQFAAEEISSMVLIKMREIAEAYLGSSIKNAVVTVPAYFNDSQRQATKDAGVIAGLNVMRIINEPTAAAIAYGLDKKATSSGEKNVLIFDLGGGTFDVSLLTIEEGIFEVKATAGDTHLGGEDFDNRMVNHFVQEFKRKNKKDISGNPRALRRLRTACERAKRTLSSTAQTTIEIDSLYEGIDFYTTITRARFEELNMDLFRKCMEPVEKCLRDAKMDKSSVHDVVLVGGSTRIPKVQQLLQDFFNGKELCKSINPDEAVAYGAAVQAAILSGEGNEKVQDLLLLDVTPLSLGLETAGGVMTVLIPRNTTIPTKKEQVFSTYSDNQPGVLIQVYEGERARTKDNNLLGKFELSGIPPAPRGVPQINVCFDIDANGILNVSAEDKTTGQKNKITITNDKGRLSKEEIEKMVQEAEKYKAEDEEHKKKVDAKNALENYAYNMRNTIKDEKIASKLAADDKKRIEDAIDGAISWLDTNQLAEADEFEDKMKELEGICNPIIAKMYQGPGADMAGGMDEDAPAGGSGAGPKIEEVD

SEQ ID NO: 48166 - DNA, 2031 bp, Oryza sativa (japonica cultivar-group)
  CDS (1)..(2031)
atggcgcggccgcggcgcgcgtcgacgatgcagctggggctgttcctcgccgcgcttctcctcctcacgccgtcgcctgccggctctgtggcggcggccaagggtggcggtgccaagagcggcggcggcggcaccgtgatcgggatcgacctcggcacgacgtactcgtgcgtcggagtctaccggaacggccatgtcgagatcatcgccaacgaccaggggaaccggatcacgccctcgtgggtcgccttcaccgacggcggcgagcggctcatcggtgaggccgccaagaaccaggcggcggccaacccggagcggaccatctacgacgccaagcggctcatcggccggcagttctccgacgccgaggtgcagcgcgacatgaagctgctgccgttcgccgtcgtcgaccggaacggcaagccgcacgtgcgcgtcgaggtgaaggacggcgacgtgcgcgtgttcagcccggaggaggtgagcgccatggtgctcacgcggatgaaggagacggccgaggcctacctcggcgagaaggtcacccgcgccgtcgtcaccgtcccggcctacttcaacgacgcgcagcggcaggccaccaaggacgccggcgtcatcgccgggctcaccgtcgaccgcatcatcaacgagcccaccgccgccgccatcgcctacggcatcgacaagaagggcgccgagaagaacgtcctcgtcttcgacctcggcggcggcacgttcgacgtcagcatcctcgccatcgacaacggcgtgttcgaggtccttgccaccaacggcgacacccacctcggcggcgaggacttcgaccaacgcctcatggaccacttcgtcaaggtcatccgccggaagcacggccgcgacatcaccggcgacgcgcgcgcgctgggcaagctccgccgcgagtgcgagcgcgccaagcgcgcgctcagcaaccagcaccaggtgcgcgtcgaggtcgagtccctgttcgacggcgtcgacttgtcggagccgctctcccgggcgcggttcgaggagctcaacagcgacctcttcaagaagacgatggtgccggtgaggaaggccatggcggacgcccggctgagcaagggcgacatcgacgagatcgtcctcgtcggcggcagcaccaggatccccaaggtgcagcagctgctcaaggactacttcggtggcaaggagcccaaccgcggcgtcaaccccgacgaggccgtggcgtacggcgccgccgtgcaggccagcatcatcagcggccacgtcgacgagaacacggagagcatgatcctcctcgacgtcgcgccgctcaccctcggcctggagacggccggcggcgtgatggccaagctgatcccgcgcaacacggtggtgccgacgaagaagacgcaggtgttcaccacgtacaaggacaagcagacgacggtgaccatccaggtgttcgagggcgagcggagcatgacgagggacaaccggctgctcggcaggttcgacctcgccggcatcgcgccggcgccgaggggggcgccgcagatcgaggtgacgttcgaggtggacgcgaacggcatcctcagcgtgctggccgccgacaaggccaccggcaggtcggagaagatcaccatctccggcgacgaccgcaagatcagccaggaggagatcgaccggatggtgcgcgaggcggaggagttcgccgaggaggaccgccggcacagggagcaggtggacgcccggaacagcctggaggcgtacgtctacaacatcaagaacacgctcggcggcaagatggcggacgccatggagggcgaggagaaggacaaggtggaggaggcggtgagggaggcgtacgagtggctggacggcaacccggacgccggcaaggaggagtacgaggagaagctgagggagctggaggacgtgtgcaaccccgtcatgtcggcggtctaccagaggtccggcggcggcggcggcggcgcaccggaagatggcaacgtcgacgacgaggatgaccacgatgagctttag

SEQ ID NO: 48167 - protein, 676 aa, Oryza sativa (japonica cultivar-group)
MARPRRASTMQLGLFLAALLLLTPSPAGSVAAAKGGGAKSGGGGTVIGIDLGTTYSCVGVYRNGHVEIIANDQGNRITPSWVAFTDGGERLIGEAAKNQAAANPERTIYDAKRLIGRQFSDAEVQRDMKLLPFAVVDRNGKPHVRVEVKDGDVRVFSPEEVSAMVLTRMKETAEAYLGEKVTRAVVTVPAYFNDAQRQATKDAGVIAGLTVDRIINEPTAAAIAYGIDKKGAEKNVLVFDLGGGTFDVSILAIDNGVFEVLATNGDTHLGGEDFDQRLMDHFVKVIRRKHGRDITGDARALGKLRRECERAKRALSNQHQVRVEVESLFDGVDLSEPLSRARFEELNSDLFKKTMVPVRKAMADARLSKGDIDEIVLVGGSTRIPKVQQLLKDYFGGKEPNRGVNPDEAVAYGAAVQASIISGHVDENTESMILLDVAPLTLGLETAGGVMAKLIPRNTVVPTKKTQVFTTYKDKQTTVTIQVFEGERSMTRDNRLLGRFDLAGIAPAPRGAPQIEVTFEVDANGILSVLAADKATGRSEKITISGDDRKISQEEIDRMVREAEEFAEEDRRHREQVDARNSLEAYVYNIKNTLGGKMADAMEGEEKDKVEEAVREAYEWLDGNPDAGKEEYEEKLRELEDVCNPVMSAVYQRSGGGGGGAPEDGNVDDEDDHDEL

SEQ ID NO: 48168 - DNA, 2097 bp, Oryza sativa (japonica cultivar-group)
  CDS (1)..(2097)
atggcctccttcacctcccagctcggcgccatggcgtgcggcgccgccccctccacctcgcccctcgcggcccggaggagcgggcagctgttcgtggggcggaagcccgcggcggcgtcggtgcagatgcgggtgccgcgggcggggcgggcgcggggggtggcgatgcgggtggcgtgcgagaaggtggtggggatcgacctcgggacgaccaactccgcggtggcggcgatggagggcgggaagccgacggtcatcaccaacgccgagggccagcggacgacgccctccgtggtggcgtacaccaagggcggggagcggctggtcgggcagatcgccaagcggcaggccgtcgtcaacccggagaacaccttcttctccgtcaagcgcttcatcggccgcaagatggccgaggtcgacgacgaggccaagcaggtctcctaccacgtcgtccgcgacgacaacggcaacgtcaagctcgactgccccgccatcggcaagcagttcgccgccgaggagatttccgcgcaggtcttgaggaagttggtggacgatgcatctaagtttttgaatgacaaaattaccaaagcagtggttactgttcctgcatacttcaatgactcacagaggacagcaacaaaagatgctggacgtattgcaggattggaagttctccgcattataaatgagccgactgctgcatcccttgcttatggttttgagaagaaaaacaacgaaacgattcttgtgtttgacttgggaggcggtacctttgatgtctctgtattggaggttggagatggtgtgtttgaggtgctttccacatctggtgacacacaccttggtggcgatgacttcgataagaaagttgtggattggcttgctagcaactttaagaaagatgaaggcattgatcttctgaaagacaaacaagccctgcagcgactcactgaggcagcagagaaagcgaagatggaactgtctacgctgtctcagacaaacattagcttgcctttcataactgctactgctgatgggcctaaacacatcgagacaactctctccagagccaaatttgaggagctatgttcggacctcattgataggcttaaaactcctgtcactaatgccttgagagatgccaaactgtctgttgataacctggacgaagtgattcttgttggtggatccactcgtatcccttccgtgcaagagcttgtgaagaagatcactggcaaggatcccaatgtcacagtcaaccctgatgaggttgtttctcttggggcagctgtacagggtggagttttggccggagatgtgaaagatgtcgttcttcttgatgttactccattgtctcttggtctggagacgttgggtggagtgatgaccaagattattcccagaaacacaacactgcccacctcaaaatcagaggtattctccacagctgcagatggacagacaagtgttgagataaatgttcttcagggagagagagagtttgtccgggacaacaagtctcttggaagcttccgcttggatggaatccctcctgcaccacgtggtgttccacaaattgaagtcaagtttgatattgatgccaatggtattctctctgttgctgctattgataagggtactgggaagaaacaggatatcaccatcaccggcgctagtacactgccaaaggatgaggttgagagaatggtggaagaggctgacaagtttgctcaggaggacaaagagaaaagagatgccattgataccaaaaaccaggcagactctgtggtctaccagactgagaagcaactgaaggagctaggtgacaaggtacctgcacctgtgaaagagaaggtggatgcaaagctcaacgagctcaaagaggccattgcgggtggatcaacacagagcatgaaggatgccatggctgctttaaacgaggaagttatgcagatcggccaggccatgtacaaccagcagcctaatgctggtgctgctggacctactcctggtgccgatgctggaccgacaagctcaggcggtaagggaccgaatgatggagatgttattgatgcggatttcactgacagcaattga

SEQ ID NO: 48169 - protein, 698 aa, Oryza sativa (japonica cultivar-group)
MASFTSQLGAMACGAAPSTSPLAARRSGQLFVGRKPAAASVQMRVPRAGRARGVAMRVACEKVVGIDLGTTNSAVAAMEGGKPTVITNAEGQRTTPSVVAYTKGGERLVGQIAKRQAVVNPENTFFSVKRFIGRKMAEVDDEAKQVSYHVVRDDNGNVKLDCPAIGKQFAAEEISAQVLRKLVDDASKFLNDKITKAVVTVPAYFNDSQRTATKDAGRIAGLEVLRIINEPTAASLAYGFEKKNNETILVFDLGGGTFDVSVLEVGDGVFEVLSTSGDTHLGGDDFDKKVVDWLASNFKKDEGIDLLKDKQALQRLTEAAEKAKMELSTLSQTNISLPFITATADGPKHIETTLSRAKFEELCSDLIDRLKTPVTNALRDAKLSVDNLDEVILVGGSTRIPSVQELVKKITGKDPNVTVNPDEVVSLGAAVQGGVLAGDVKDVVLLDVTPLSLGLETLGGVMTKIIPRNTTLPTSKSEVFSTAADGQTSVEINVLQGEREFVRDNKSLGSFRLDGIPPAPRGVPQIEVKFDIDANGILSVAAIDKGTGKKQDITITGASTLPKDEVERMVEEADKFAQEDKEKRDAIDTKNQADSVVYQTEKQLKELGDKVPAPVKEKVDAKLNELKEAIAGGSTQSMKDAMAALNEEVMQIGQAMYNQQPNAGAAGPTPGADAGPTSSGGKGPNDGDVIDADFTDSN

SEQ ID NO: 48170 - DNA, 1950 bp, Oryza sativa (japonica cultivar-group)
  CDS (1)..(1950)
atggcgggcaagggcgagggtccggccatcggcatcgaccttggcacgacctactcgtgcgtgggcgtttggcagcacgaccgcgtggagatcatcgccaacgaccagggcaaccgcaccaccccctcctacgtcggcttcaccgactccgagaggctcatcggagatgctgccaagaaccaggtcgccatgaaccccatcaacaccgtctttgatgccaagcgtctcattggcaggaggtttagcgatgcttctgttcagagtgacattaagctctggcccttcaaggtgattgctggacctggtgacaagcctatgattgttgtccagtacaagggtgaggagaagcagtttgctgcagaagagatctcctccatggtcctcatcaagatgcgtgagattgctgaggcctaccttggcaccaccatcaagaatgccgttgtcactgttcctgcctacttcaatgactcccagaggcaggccaccaaggatgctggagtgattgctggtctcaatgtcatgcgtatcatcaacgagccgactgctgcagctattgcctatggtcttgataagaaggccaccagcgttggtgagaagaatgtcctcatctttgaccttggaggtggtacctttgatgtctccctccttaccattgaggagggtatctttgaggtcaaggccacagctggtgacacccatcttggtggtgaagattttgacaatcgtatggtcaaccactttgtgcaagaattcaagaggaagaacaagaaggatatcactggcaaccccagggctctcaggaggttgaggacagcttgtgagagggcaaagaggaccctgtcctccactgcccagaccaccattgagatcgattccctgtatgagggcatcgacttctactcaaccatcacccgtgccaggtttgaggagctcaacatggatctcttcaggaagtgtatggagcctgtggagaagtgcctcagggatgctaagatggacaagagctctgttcatgatgttgtccttgttggtggctccactaggatcccgagggtgcagcagctcctgcaggatttcttcaacggcaaggagctttgcaagaacatcaacccagatgaggctgttgcttatggtgctgctgtccaggctgccatcttgagtggtgagggcaacgagaaggtccaggacctcctcctgttggatgttacccctctctctctcggtttggagactgctggtggtgtcatgaccgttttgatcccaaggaacaccaccattcccaccaagaaggagcaggtcttctccacctactccgacaaccagcctggtgtgctcatccaggtttatgagggtgagaggaccaggacacgtgacaacaacctgctggggaagtttgagctctctggaatccctcctgctcccaggggtgttccacagatcactgtttgcttcgacattgatgccaatggtatcctgaacgtgtctgctgaggacaagaccaccgggcagaagaacaagatcaccattaccaacgacaagggcaggcttagcaaggaggagattgagaagatggtccaggaggccgagaagtacaagtcagaggatgaggagcacaagaagaaggtggagtccaagaacgcgctggagaactacgcctacaacatgcgcaacaccatcaaggatgagaagatcgcctcgaagctcccggcagcggacaagaagaagatcgaggatgccatcgaccaggccatccagtggctggacggcaaccagctcgctgaggctgatgagttcgatgacaagatgaaggagctggagggcatctgcaaccccatcatcgccaagatgtaccagggcgctggcgcggacatggccggcggcatggacgaggacgatgctcccccggctggcggcagcggtgctggccccaagatcgaggaggtcgactaa

SEQ ID NO: 48171 - protein, 649 aa, Oryza sativa (japonica cultivar-group)
MAGKGEGPAIGIDLGTTYSCVGVWQHDRVEIIANDQGNRTTPSYVGFTDSERLIGDAAKNQVAMNPINTVFDAKRLIGRRFSDASVQSDIKLWPFKVIAGPGDKPMIVVQYKGEEKQFAAEEISSMVLIKMREIAEAYLGTTIKNAVVTVPAYFNDSQRQATKDAGVIAGLNVMRIINEPTAAAIAYGLDKKATSVGEKNVLIFDLGGGTFDVSLLTIEEGIFEVKATAGDTHLGGEDFDNRMVNHFVQEFKRKNKKDITGNPRALRRLRTACERAKRTLSSTAQTTIEIDSLYEGIDFYSTITRARFEELNMDLFRKCMEPVEKCLRDAKMDKSSVHDVVLVGGSTRIPRVQQLLQDFFNGKELCKNINPDEAVAYGAAVQAAILSGEGNEKVQDLLLLDVTPLSLGLETAGGVMTVLIPRNTTIPTKKEQVFSTYSDNQPGVLIQVYEGERTRTRDNNLLGKFELSGIPPAPRGVPQITVCFDIDANGILNVSAEDKTTGQKNKITITNDKGRLSKEEIEKMVQEAEKYKSEDEEHKKKVESKNALENYAYNMRNTIKDEKIASKLPAADKKKIEDAIDQAIQWLDGNQLAEADEFDDKMKELEGICNPIIAKMYQGAGADMAGGMDEDDAPPAGGSGAGPKIEEVD

SEQ ID NO: 48172 - DNA, 1941 bp, Arabidopsis thaliana
  CDS (1)..(1941)
atggcgacgaaatcagagaaagctattggtatcgatctcggcactacatacagttgtgtcggagtttggatgaatgatcgtgtggagatcattccgaacgatcagggaaaccgtacgacgccgtcgtacgtcgccttcactgatactgagcggctgatcggagacgcggcaaagaatcaagtggctttgaatcctcagaacactgtattcgatgcgaaacgtctcatcggaaggaagttctctgatccttctgttcagagtgacatactccactggccgttcaaggttgtttccggccccggtgagaagccgatgatagtcgtttcgtataagaatgaagagaagcagttttctcctgaggaaatatcttccatggtgttggtgaagatgaaggaagtcgctgaggctttcttaggtcgcacagttaaaaacgccgttgtaacggttccggcgtattttaacgattcgcagagacaggctacgaaggacgccggagctatctctgggcttaatgttttgaggataatcaatgagccgactgctgcagctatagcttatggtttggataagaagggtacgaaggccggtgagaagaacgttttgattttcgatctcggtggtggaacttttgatgtttcgctgttgacgattgaagaaggtgtctttgaagtgaaagctactgctggagatactcatcttggtggtgaagactttgacaacagacttgtgaaccatttcgttgcggagtttaggaggaaacacaagaaggatattgctgggaatgcgagagctcttaggaggctaaggacagcttgtgagagagcaaagagaacactttcgtccacggctcagacgactattgagattgattctctgcacgagggtattgacttctatgcgacgatatcacgtgcaaggtttgaggagatgaacatggatttgttcaggaaatgtatggatcctgtggagaaagttcttaaagacgccaagctcgacaagagcagtgtgcacgatgttgttctggttggagggtcgacgaggattccgaaaattcaacagcttttgcaagatttctttaatgggaaggagttatgcaagagcataaaccctgatgaagctgttgcctatggagctgcggttcaggctgcgattcttacaggtgaaggaagtgaaaaggtccaggatcttctgcttcttgatgttgctccgcttagccttggacttgagacagcaggtggggtcatgactgtgttaattccaagaaacacgacggttccttgtaagaaggagcaagtgttctctacgtatgcagacaatcaaccaggcgttctgatccaagtctacgaaggagaacgtgcaaggaccagagataacaaccttctcggaactttcgagctcaagggcattcctcctgctccacgtggggttcctcaaatcaatgtttgcttcgacattgacgcgaatgggatcttaaatgtgtcggctgaggataaaaccgctggtgtgaagaaccagatcacgatcaccaacgacaaaggaaggttgagtaaagaggagatagagaagatggtgcaagatgctgagaagtacaaggctgaggatgagcaagtgaagaagaaggtggaggccaagaattcgcttgagaactatgcttacaacatgagaaacactatcaaggatgagaaactcgcacagaaactaactcaagaggataagcagaagattgagaaggcgattgatgaaacaattgaatggatcgaaggaaaccagctggcggaagttgatgagtttgagtacaagttgaaagagttagaaggtatttgcaacccaatcatctcaaagatgtatcagggtggtgctgctgctggaggtatgccgacagatggtgatttcagtagctcaggtgctgctggaggtcccaagatcgaagaggtggattag

SEQ ID NO: 48173 - protein, 646 aa, Arabidopsis thaliana
MATKSEKAIGIDLGTTYSCVGVWMNDRVEIIPNDQGNRTTPSYVAFTDTERLIGDAAKNQVALNPQNTVFDAKRLIGRKFSDPSVQSDILHWPFKVVSGPGEKPMIVVSYKNEEKQFSPEEISSMVLVKMKEVAEAFLGRTVKNAVVTVPAYFNDSQRQATKDAGAISGLNVLRIINEPTAAAIAYGLDKKGTKAGEKNVLIFDLGGGTFDVSLLTIEEGVFEVKATAGDTHLGGEDFDNRLVNHFVAEFRRKHKKDIAGNARALRRLRTACERAKRTLSSTAQTTIEIDSLHEGIDFYATISRARFEEMNMDLFRKCMDPVEKVLKDAKLDKSSVHDVVLVGGSTRIPKIQQLLQDFFNGKELCKSINPDEAVAYGAAVQAAILTGEGSEKVQDLLLLDVAPLSLGLETAGGVMTVLIPRNTTVPCKKEQVFSTYADNQPGVLIQVYEGERARTRDNNLLGTFELKGIPPAPRGVPQINVCFDIDANGILNVSAEDKTAGVKNQITITNDKGRLSKEEIEKMVQDAEKYKAEDEQVKKKVEAKNSLENYAYNMRNTIKDEKLAQKLTQEDKQKIEKAIDETIEWIEGNQLAEVDEFEYKLKELEGICNPIISKMYQGGAAAGGMPTDGDFSSSGAAGGPKIEEVD

SEQ ID NO: 48174 - DNA, 2049 bp, Arabidopsis thaliana
  CDS (1)..(2049)
atggctaccgcagctctcctccgctctattcgacgccgtgaagtcgtttcctctcctttctcagcttacagatgcctttcaagcagtgggaaagcatcattgaacagttcctatctgggtcagaattttagaagcttttccagagcctttagctcgaagcctgctggaaacgatgtcattggtattgatttgggtactactaattcatgtgttgccgtcatggaggggaagaatccgaaagtcattgaaaatgctgaaggtgctcgaaccactccatcagttgtagcattcaacacgaaaggagaacttcttgtgggtacaccagccaagcgacaagctgtcactaatcctacaaacacagtatctggaacgaaacgtttgattgggagaaagttcgacgatccacaaactcagaaagaaatgaagatggtgccttacaagattgtgcgtgcacctaatggcgatgcgtgggttgaagccaatggtcagcagtattctcctagtcagattggagcgtttatcttgacgaagatgaaagagacggccgaagcttaccttggaaaatctgtcacgaaagctgttgtcactgttccagcttactttaatgatgctcagagacaagcaacaaaagatgctggtagaattgctggtcttgatgttgagagaatcataaatgaaccgacggctgctgctctgtcctatggaatgaccaacaaggaggggttgattgctgtgtttgatcttggtggtgggacatttgatgtatctgttttggagatttctaatggggtattcgaggtgaaagccaccaatggtgataccttcttgggaggtgaggatttcgacaatgctctgctagacttcttggttaatgagttcaagaccactgagggaatagacctagccaaagacagacttgctctgcagaggcttagagaagccgctgagaaagcgaagattgaactgtcatctacttctcaaactgaaattaatctcccatttatcacagccgatgcatctggagcaaagcatttcaacatcaccctaacaaggtcaaggtttgaaactcttgtgaatcacttgattgagaggacccgcgatccttgcaagaactgtctcaaggatgctggtataagtgctaaggaagttgatgaggttcttctagttggaggaatgacgcgtgtccccaaggttcagtctattgttgcggagatctttggaaagagtccaagcaaaggtgtcaatcctgatgaggctgttgctatgggagctgcacttcaaggtggtatcctccgcggtgatgtcaaagaattgttgcttctggatgtcacacctctatcgctcggtattgaaacacttggtggtgtctttacgagactgatcacccgaaatacaaccatccccacaaagaagagtcaggtgttctcaactgcagccgataatcagactcaagttgggatcagggtgcttcaaggtgagcgtgaaatggcaacagacaacaagctcttgggagaatttgatctagttggcattccaccatctccaagaggagtccctcagatcgaagtgacatttgacattgatgccaatggcattgtcactgtttccgccaaggacaagacgactggtaaagtacaacagatcacaatccgatcctctggtgggctctcagaggatgatatccagaagatggtgagagaagcagagttgcatgctcagaaagacaaagaaagaaaagaattgatcgacaccaagaacacagctgacacaacaatttacagcatagagaagagtcttggtgaatacagagagaagatcccaagtgaaatcgccaaggagattgaagatgctgtggcagatctaaggagcgcttcctctggggatgatctcaacgagatcaaggccaagattgaggcggcaaacaaagctgtttctaagattggggagcacatgtctggtggttctggtggaggctctgcaccaggaggaggatctgagggaggcagtgatcaagctccagaagcagagtacgaggaagtgaaaaagtga

SEQ ID NO: 48175 - protein, 682 aa, Arabidopsis thaliana
MATAALLRSIRRREVVSSPFSAYRCLSSSGKASLNSSYLGQNFRSFSRAFSSKPAGNDVIGIDLGTTNSCVAVMEGKNPKVIENAEGARTTPSVVAFNTKGELLVGTPAKRQAVTNPTNTVSGTKRLIGRKFDDPQTQKEMKMVPYKIVRAPNGDAWVEANGQQYSPSQIGAFILTKMKETAEAYLGKSVTKAVVTVPAYFNDAQRQATKDAGRIAGLDVERIINEPTAAALSYGMTNKEGLIAVFDLGGGTFDVSVLEISNGVFEVKATNGDTFLGGEDFDNALLDFLVNEFKTTEGIDLAKDRLALQRLREAAEKAKIELSSTSQTEINLPFITADASGAKHFNITLTRSRFETLVNHLIERTRDPCKNCLKDAGISAKEVDEVLLVGGMTRVPKVQSIVAEIFGKSPSKGVNPDEAVAMGAALQGGILRGDVKELLLLDVTPLSLGIETLGGVFTRLITRNTTIPTKKSQVFSTAADNQTQVGIRVLQGEREMATDNKLLGEFDLVGIPPSPRGVPQIEVTFDIDANGIVTVSAKDKTTGKVQQITIRSSGGLSEDDIQKMVREAELHAQKDKERKELIDTKNTADTTIYSIEKSLGEYREKIPSEIAKEIEDAVADLRSASSGDDLNEIKAKIEAANKAVSKIGEHMSGGSGGGSAPGGGSEGGSDQAPEAEYEEVKK

SEQ ID NO: 48176 - DNA, 2157 bp, Arabidopsis thaliana
  CDS (1)..(2157)
atggcttcctccgccgcccaaattcacatcctcggcggaatcggattccctacttcgtcttcttcctcctccaccaaaaacctcgacaacaaaaccaattccattccacgaagcgtcttcttcggcaacagaacaagtcctttcactactccaacctccgccttccttcgtatgggacgaagaaacaacaacgcttcccgatacaccgttggtccagtccgtgtggttaacgagaaagtcgtcggaatcgatttaggcacgacgaattcagctgttgctgctatggaaggaggtaaaccaacgattgtgactaacgctgaaggtcaaagaactacaccttctgttgtggcttatactaagagtaaagatagacttgttggtcagattgctaaacgtcaagctgttgttaatccggagaatactttcttctctgttaagaggtttattggtagaagaatgaatgaagttgctgaagagtctaagcaggtttcttatagagttattaaagatgagaatggtaatgttaagcttgattgtcctgctattggtaaacaatttgctgctgaggagatttctgctcaggttttgaggaagcttgtggatgatgcttcgagatttttgaatgataaagtaacgaaagctgtcatcactgtgcctgcttacttcaatgattcacaaaggacggctactaaagatgctggtcgtattgctggattggaagttcttaggattattaatgagcctactgctgcttctttggcttatgggtttgagaggaaaagcaatgaaactattcttgtttttgatcttggtggtggtacttttgatgtctcagtccttgaggttggtgacggtgtttttgaagtgctttcgacttctggtgatacacatttgggaggtgatgactttgacaagagagtcgttgattggcttgcttcaaccttcaagaaggatgaaggtatagatcttctcaaagacaagcaagcgcttcagaggttgacggaggcagctgaaaaagctaaaattgagctttcctcactgactcagacaaacatgagtttgccttttatcactgcaacggctgatgggcctaagcacattgaaaccactctcaccaggggcaagtttgaagaattgtgctctgacttactcgacagggtcaggacacctgtggagaattccctgagggatgcaaaactcagcttcaaagatattgatgaggtgatccttgttggtggatccacacgtatccctgctgttcaggatcttgtaaggaagctgacaggaaaagaacccaatgtctcagtcaatcctgatgaagttgtagctttaggtgctgcagttcaggccggtgttctatcaggagatgtgagtgacattgttcttcttgatgtgacgccgctatcgcttggtttggaaactcttggtggtgtcatgaccaagatcattccaagaaacaccacacttccaacttctaagtcagaagtcttctcaactgctgcagatggacagacaagcgttgagattaatgtgttacagggtgagagagagttcgtaagagataacaagtctattggtagcttccgtcttgatggtattccacctgcaccacgtggagttccacaaatcgaggtcaaattcgacattgatgccaatggaattctatctgtcagtgcttcggacaaaggtacaggaaagaagcaggacatcaccattactggtgctagtaccttaccaaaggatgaggtagacacaatggtgcaagaagcagagaggtttgcaaaggaagacaaagaaaagagagatgcgattgacacaaagaaccaggctgactccgtcgtttaccagacagagaagcagcttaaagaacttggagagaaaattccaggtccagtgaaagaaaaggttgaggctaagctccaagagctgaaggagaagatagcaagcggatcaactcaagaaatcaaagacaccatggcagctcttaaccaagaagtgatgcagattggccagtctctgtacaaccaaccccaaccaggtggtgctgattctcctcctggaggtgaagcttcctcgtcgtctgacacatcatcctcagccaaaggtggagacaacggcggtgatgtgattgacgctgacttcacagacagcaattaa

SEQ ID NO: 48177 - protein, 718 aa, Arabidopsis thaliana
MASSAAQIHILGGIGFPTSSSSSSTKNLDNKTNSIPRSVFFGNRTSPFTTPTSAFLRMGRRNNNASRYTVGPVRVVNEKVVGIDLGTTNSAVAAMEGGKPTIVTNAEGQRTTPSVVAYTKSKDRLVGQIAKRQAVVNPENTFFSVKRFIGRRMNEVAEESKQVSYRVIKDENGNVKLDCPAIGKQFAAEEISAQVLRKLVDDASRFLNDKVTKAVITVPAYFNDSQRTATKDAGRIAGLEVLRIINEPTAASLAYGFERKSNETILVFDLGGGTFDVSVLEVGDGVFEVLSTSGDTHLGGDDFDKRVVDWLASTFKKDEGIDLLKDKQALQRLTEAAEKAKIELSSLTQTNMSLPFITATADGPKHIETTLTRGKFEELCSDLLDRVRTPVENSLRDAKLSFKDIDEVILVGGSTRIPAVQDLVRKLTGKEPNVSVNPDEVVALGAAVQAGVLSGDVSDIVLLDVTPLSLGLETLGGVMTKIIPRNTTLPTSKSEVFSTAADGQTSVEINVLQGEREFVRDNKSIGSFRLDGIPPAPRGVPQIEVKFDIDANGILSVSASDKGTGKKQDITITGASTLPKDEVDTMVQEAERFAKEDKEKRDAIDTKNQADSVVYQTEKQLKELGEKIPGPVKEKVEAKLQELKEKIASGSTQEIKDTMAALNQEVMQIGQSLYNQPQPGGADSPPGGEASSSSDTSSSAKGGDNGGDVIDADFTDSN

SEQ ID NO: 48178 - DNA, 1977 bp, Chlamydia muridarum Nigg
  CDS (1)..(1977): transl_table=11
gtgttcaatatgagcgaaaaaagaaagtctaacaaaatcattggtatcgacctagggacgactaactcttgcgtctctgtaatggaaggtggccaacctaaagttattgcctcctctgaggggactcgcactactccttctatcgttgcttttaaaggtagcgaaactctcgtggggatccctgcaaaacgtcaagcagtaacgaacccagaaaaaacattagcttctactaaacgattcattggcagaaaattctctgaagtcgaatctgaaatcaaaacagttccctataaagtagctcctaactccaaaggagacgctgtttttgaagtagaaaacaagctgtacactccagaagaaattggagctcaaatcctcatgaaaatgaaggaaacagcagaagcttatcttggagagactgtaactgaagctgtcatcactgtacctgcttattttaacgactctcaaagagcctctacaaaagatgctggacgcattgcaggactcgatgttaaacgcattattcctgagccaacagctgctgctcttgcttatggtattgacaaagagggagataaaaaaattgccgtctttgacttgggaggaggaactttcgatatctctatcttagaaattggtgatggagtctttgaagttctctcaacaaatggtgacactcacttgggtggagatgatttcgatgaagtaatcatcaactggatgttaggtgaattcaaaaaacaagaaggcattgatctaagcaaagacaacatggctttgcaaagattaaaagatgctgctgaaaaagcaaaaatcgaattatccggtgtatcttctacagaaatcaatcagccattcatcacaattgatgctaatggtcctaaacacttagctttgactctaactcgtgctcaattcgagcatctagcttcttctctcattgagcgaacaaaacagccttgtgctcaagctttgaaagatgctaagttgtccgcatctgatatcgatgatgttcttcttgttggaggaatgtctagaatgcctgcagtacaagcagttgtaaaagagatttttggtaaggagcctaataaaggcgtcaatccagatgaagtagtggcaattggagcagccattcaaggaggagttcttggtggagaagtgaaagatgttcttctgcttgatgtcattcccctctccttaggaattgaaactctaggaggagtcatgactcccctcgtagagagaaacacaacgatccctacgcagaaaaaacaaattttctctacagcagctgacaaccagccagcagtaactattgttgtgcttcaaggtgagcggcctatggctaaagacaataaggaaattggacgttttgatctaacagacattcctccagctcctcgtggccatcctcaaattgaagtaaccttcgatattgatgctaacggaatcttacatgtatctgctaaggatgctgctagtggacgtgaacagaaaatccgtattgaagcaagctccggattaaaagaagaagaaattcaacaaatgatccgagatgctgaactcaataaggaagaagataagaaacgcagagaagcttcggatatcaaaaatgaagccgatggaatgatctttagagcagaaaaagcgattaaagactaccaagataaaattcctgcagatcttgttaaagaaattgaagagcaaattgagaaagtacgtcaagctgtaaaagaagatgcttcaacaacagctattaaagcagcttctgatgaactaagtgctcgcatgcaaaaaatcggggaagctatgcaggctcaatcagcctctgctgcaaatgctcagggagggccaaatattaactccgaggatctgaaaaaacatagtttcagcacgcgacctcctgcaggagacaactcgtcttctacagataacattgaagacgcagatgttgaaattgttgataaacctgaataa

SEQ ID NO: 48179 - protein, 658 aa, Chlamydia muridarum Nigg
MFNMSEKRKSNKIIGIDLGTTNSCVSVMEGGQPKVIASSEGTRTTPSIVAFKGSETLVGIPAKRQAVTNPEKTLASTKRFIGRKFSEVESEIKTVPYKVAPNSKGDAVFEVENKLYTPEEIGAQILMKMKETAEAYLGETVTEAVITVPAYFNDSQRASTKDAGRIAGLDVKRIIPEPTAAALAYGIDKEGDKKIAVFDLGGGTFDISILEIGDGVFEVLSTNGDTHLGGDDFDEVIINWMLGEFKKQEGIDLSKDNMALQRLKDAAEKAKIELSGVSSTEINQPFITIDANGPKHLALTLTRAQFEHLASSLIERTKQPCAQALKDAKLSASDIDDVLLVGGMSRMPAVQAVVKEIFGKEPNKGVNPDEVVAIGAAIQGGVLGGEVKDVLLLDVIPLSLGIETLGGVMTPLVERNTTIPTQKKQIFSTAADNQPAVTIVVLQGERPMAKDNKEIGRFDLTDIPPAPRGHPQIEVTFDIDANGILHVSAKDAASGREQKIRIEASSGLKEEEIQQMIRDAELNKEEDKKRREASDIKNEADGMIFRAEKAIKDYQDKIPADLVKEIEEQIEKVRQAVKEDASTTAIKAASDELSARMQKIGEAMQAQSASAANAQGGPNINSEDLKKHSFSTRPPAGDNSSSTDNIEDADVEIVDKPE

SEQ ID NO: 48180 - DNA, 1896 bp, Caulobacter crescentus CB15
  CDS (1)..(1896): transl_table=11
atgagcaagattatcggtatcgaccttggcaccacgaactcgtgcgtcgccatcatggacggcaagaccccgaaggtgatcgagaacgccgagggcgctcgcaccaccccgtcggtcgtcgccttcctcgaggacggtgagcgcctgatcggccagcccgccaagcgccaggccgtcaccaacccgaccaacacgctgttcgcgatcaagcgcctgattggccgcaccgccagcgacccggtggtcgagaaggacaagggcatggtgccctacgagatcgtcaagggcccgaccggcgacgcctgggtcaaggcccacggcaaggactacagcccgcaggaagtctcggccttcattctgcagaagatgaaggaagccgccgaagcccaccttggcgagccggtgaccaaggcggtcatcacggttccggcctactttaatgacgctcagcgtcaggccaccaaggacgccggcaagatcgccggcctggaagtcctgcgcatcatcaacgagccgacggccgctgcgctggcctacggtctcgacaagaacgacggcaagaagatcgccgtctatgacctgggtggcggcaccttcgacgtgtcgatcctggaaatcggcgatggcgtcttcgaggtgaagtcgaccaacggcgacaccttcctgggcggcgaggacttcgacctgcggatcgtcgactacctggccgacgagttcaagaaggagcagggcgtcgacctgcgcaaggacaagctggctctgcagcgcctgcgcgaagaggcggaaaaggccaagaaggagctgtcgtcgacggctcagtacgaggtcaacctgccgttcatcagcatgaacgcctcgggtccgctgcacctgaacatcaagctgtcgcgcgccaagctggaagccctggtcgacgacctgatcgcccgcaccatcggtccgtgcgaacaggctctgaaggacgctggcctgaagaagagcgacatcgacgaagtgatcctggtcggcggcatgagccgcatgcccaaggtccagcaggcggtgcaggacttcttcggccgcgagccgcacaagggcgtgaaccctgacgaagtcgtggctctgggcgcggccgttcaggccggggtgctgcaaggcgacgtcaaggacgtgctgctgctggacgtgaccccgctgaccctgggcatcgagaccctgggcggtgtgttcaccccgctgatcgaacgcaacaccaccatcccgaccaagcgctcgcagaccttctccaccgccgacgacaaccagtcggccgtgacgatccgggtgttccagggcgaacgcccgatggcgcaggacaacaagatgctgggccagttcgacctggtcggcatccccccggcgccgcgcggcgtgccgcagatcgaggtcacgttcgacatcgacgccaacggcattgtccaggtccacgccaaggacaaggcgaccaacaaggagcactcgatccgcatccaggccaatggcggcctttcggacagcgacatcgagcgcatggtcaaggaagccgaggccaacaaggctgcggacgaaaagaagaagcagctggtcgaggccaagaaccagggcgaggcgatcctgcactcgaccgagaaggccctggccgagcatggcgacaaggtcggcgcggctgagaagaccgcgatcgaaaccgggatcaccgagctgaagaccgccctggaaggcgaagacgtcgaggccatccaggccaagacccaggcccttatccaggcttcgatgaagctgggcgaggccatgtacgccgcccagcaaggctcggccgagggcggcgacgccaaggctgacgacggcgtggtcgacgccgagttcgaggaagtcgacgacaacaagccggcggcttaa

SEQ ID NO: 48181 - protein, 631 aa, Caulobacter crescentus CB15
MSKIIGIDLGTTNSCVAIMDGKTPKVIENAEGARTTPSVVAFLEDGERLIGQPAKRQAVTNPTNTLFAIKRLIGRTASDPVVEKDKGMVPYEIVKGPTGDAWVKAHGKDYSPQEVSAFILQKMKEAAEAHLGEPVTKAVITVPAYFNDAQRQATKDAGKIAGLEVLRIINEPTAAALAYGLDKNDGKKIAVYDLGGGTFDVSILEIGDGVFEVKSTNGDTFLGGEDFDLRIVDYLADEFKKEQGVDLRKDKLALQRLREEAEKAKKELSSTAQYEVNLPFISMNASGPLHLNIKLSRAKLEALVDDLIARTIGPCEQALKDAGLKKSDIDEVILVGGMSRMPKVQQAVQDFFGREPHKGVNPDEVVALGAAVQAGVLQGDVKDVLLLDVTPLTLGIETLGGVFTPLIERNTTIPTKRSQTFSTADDNQSAVTIRVFQGERPMAQDNKMLGQFDLVGIPPAPRGVPQIEVTFDIDANGIVQVHAKDKATNKEHSIRIQANGGLSDSDIERMVKEAEANKAADEKKKQLVEAKNQGEAILHSTEKALAEHGDKVGAAEKTAIETGITELKTALEGEDVEAIQAKTQALIQASMKLGEAMYAAQQGSAEGGDAKADDGVVDAEFEEVDDNKPAA

SEQ ID NO: 48182 - DNA, 2067 bp, Ralstonia solanacearum GMI1000
  CDS (1)..(2067): transl_table=11
atgctcaacttttcaaaaatcgatcttgaaaaggccgggaggcactcccacatccgagccaagtttgtattcagtgcagtcctgagaccagattcgaggagcaagaacatgggcaaaatcatcggtatcgacctgggtaccaccaacagctgcgtgtccatcatggagggcaacacgcccaaggtgatcgagaacgcggaaggcgcgcgcaccacgccgtcgatcatcgcttacatggaagacggcgagatcctggtcggcgcccccgccaagcgccaggccgtcaccaacccgaggaacacgctgtacgccgtcaagcgcctgatcggccgcaagttcgaagagaaggaagtccagaaggacatcggcctgatgccgtacaccatctccaaggccgacaacggcgacgcctgggtggaagtgcgcgacaagaagatggcgccgccgcagatttcggccgaagtcctgcgcaagatgaagaagaccgccgaggactacctgggcgaggaagtgaccgaagccgtgatcacggtgccggcctacttcaacgattcgcagcgccaggcgaccaaggacgccggccgcatcgcgggcctggacgtcaagcgcatcatcaacgagccgaccgcggccgcgctggccttcggcctggacaagaacgagaagggcgaccgcaagatcgcggtgtatgacctgggcggcggcacgttcgacatctcgatcatcgagatcgccgacgtggacggcgagaagcagttcgaagtgctgtcgaccaacggcgacaccttcctgggcggcgaagacttcgaccagcgcatcatcgattacatcatcggcgagttcaagaaggagtcgggcgtcgacctgtcgaaggacgtgcttgcgctgcaacgcctgaaggatgccgccgagaaggccaagatcgagctgtcgtcgacgcaacagaccgagatcaacctgccgtacatcacggccgatgcctcgggcccgaagcacttgaacctgaagatcacgcgcgccaagctcgaagcgctggtcgaagacctgatcgctcgcacgatcgagccgtgccgcaccgccatcaaggacgccggcgtgaaggtgtcggacatccatgacgtgatcctggtcggcggcatgacgcgcatgccgaaggtgcaggagaaggtgaaggagttcttcggcaaggaagcccgcaaggacgtgaacccggacgaggctgttgccgtgggcgccgccatccagggccaggtgctgggcggcgaccgcaaggacgtgctgctgctggacgtgacgccgctgtcgctgggcatcgagacgctgggcggcgtgatgaccaagatgatcggcaagaacacgaccatcccgaccaagttctcgcagaccttctcgaccgccgacgacaaccagccggccgtgacgatcaaggtctaccagggcgagcgcgagatggcctccggcaacaagatgctgggcgagttcaacctcgagggcattccgccggcaccgcgcggcacgccgcagatcgaggtgtcgttcgacatcgacgccaacggcatcctgcacgtcggtgccaaggacaaggccaccggcaaggaaaacaagatcaccatcaaggcgagctcgggcctgagcgaggccgagatcgagcgtatggtgaaggacgccgaggccaacgccgaggaagacaagaagctgcgcgaactggtcgactcccgcaaccagggcgaagcgctggtgcactcgaccaggaaggcgctgggcgaatacggcgacaagctggaagcgggcgagaaggacaagatcgaagccgcgatcaaggaccttgaagacgtcctcaagggcagcgacaaggccgcgatcgacgccaaggtcgaagcgctggcgaccgcctcgcagaagctgggcgagaaggtctacgccgacatgcaggccaagggcggcgcggaagccggcgccgagcaggctgccgccggtgcccacgcaggcgcacaggccggacacggcgcgccgcaggacgacaacgtcgtggacgccgagttcaaggaagtgaacgacaagaagtaa

SEQ ID NO: 48183 - protein, 688 aa, Ralstonia solanacearum GMI1000
MLNFSKIDLEKAGRHSHIRAKFVFSAVLRPDSRSKNMGKIIGIDLGTTNSCVSIMEGNTPKVIENAEGARTTPSIIAYMEDGEILVGAPAKRQAVTNPRNTLYAVKRLIGRKFEEKEVQKDIGLMPYTISKADNGDAWVEVRDKKMAPPQISAEVLRKMKKTAEDYLGEEVTEAVITVPAYFNDSQRQATKDAGRIAGLDVKRIINEPTAAALAFGLDKNEKGDRKIAVYDLGGGTFDISIIEIADVDGEKQFEVLSTNGDTFLGGEDFDQRIIDYIIGEFKKESGVDLSKDVLALQRLKDAAEKAKIELSSTQQTEINLPYITADASGPKHLNLKITRAKLEALVEDLIARTIEPCRTAIKDAGVKVSDIHDVILVGGMTRMPKVQEKVKEFFGKEARKDVNPDEAVAVGAAIQGQVLGGDRKDVLLLDVTPLSLGIETLGGVMTKMIGKNTTIPTKFSQTFSTADDNQPAVTIKVYQGEREMASGNKMLGEFNLEGIPPAPRGTPQIEVSFDIDANGILHVGAKDKATGKENKITIKASSGLSEAEIERMVKDAEANAEEDKKLRELVDSRNQGEALVHSTRKALGEYGDKLEAGEKDKIEAAIKDLEDVLKGSDKAAIDAKVEALATASQKLGEKVYADMQAKGGAEAGAEQAAAGAHAGAQAGHGAPQDDNVVDAEFKEVNDKK

SEQ ID NO: 48184 - DNA, 1926 bp, Brucella melitensis 16M
  CDS (1)..(1926): transl_table=11
atggagagaaatatggctaaagttattggtatcgatatgggaacgaccaactcctgcgttgccgtcatggacggaaagaacgcgaaggtcattgaaaatgcagaaggtgcacgcaccaccccttcgatcatcgccttcaccgatggtgacgaacgcctcgctggtcagcctgcgaagcgtcaggccgtcaccaacccggaaggcaccctttttgccgtcaagcgcctgattggccgtcgctatgacgatccgatggtcaccaaggacaaggatcttgttccttacaagatcgtcaagggcgacaatggcgatgcctgggtcgaggtgcacggcaagaaatattctccgtcgcagatctccgccatgatccttcagaagatgaaggaaacggctgaatcctaccttggcgaaaccgttacgcaggccgtcatcacggttccggcctacttcaacgacgcccagcgtcaggccaccaaggatgccggcaagatcgccggtctggaagttctgcgcatcatcaacgagccgaccgcggctgcgcttgcctatggtctcgacaagagcgaaggcaagaccatcgctgtctatgaccttggcggcggtactttcgacgtgtcggttctggaaatcggcgacggcgtttttgaagtgaagtccaccaatggcgacacgttccttggcggtgaagacttcgatattcgtctggtcgaatatctggttgccgagttcaagaaggaaagtggcatcgacctgaagaacgacaagcttgccctgcagcgcctcaaggaagctgccgaaaaggccaagatcgaactgtcgtcctcgcagcagaccgaaatcaacctgccgttcatcacggctgaccagactggcccgaagcatctggcgatcaagctgtcgcgcgccaagtttgaaagcctggtcgatgatctcgtgcagcgcacggtcgagccgtgcaaggcggcgctcaaggatgccggcctcaaggctggcgaaattgacgaagtggttctggtcggcggcatgacccgcatgcccaagattcaggaagtcgtgaaggccttcttcggcaaggaaccgcacaagggcgtgaacccggatgaagtcgtggccatgggcgcggcgatccagggcggcgttttgcagggcgacgtcaaggacgtgctgctgctcgacgtgaccccgctttcgctcggcattgaaacgctgggcggcgtgttcacccgcctgatcgaacgcaacaccactatcccgaccaagaagtcgcagaccttctccacggctgaggacaaccagtcggccgtgacgatccgcgtcttccagggcgagcgtgaaatggcagccgataacaagctgcttggacagttcgacctcgttggcattccgcccgcaccgcgcggtgtgccgcagatcgaagtgaccttcgacatcgacgccaacggcatcgtcaacgtttcggccaaggataagggtaccggcaaggagcaccagatccgcattcaggcttcgggcggcctgagcgatgccgacatcgaaaagatggtcaaggacgccgaagccaatgccgaggccgacaagaagcgtcgtgagagcgtcgaagccaagaatcaggccgaaagcctggtccattcgaccgaaaagtcgctggccgaatatggcgacaaggtttcggccgatgacaagaaggccattgaggatgcgatcgcagccctcaagacctcgcttgaaggtgaagacgccgaggatatcaaggcgaagacccaggcccttgccgaagtttccatgaagcttggtcaggccatgtacgaagcagcgcaggctgccgaaggtgcgggtgccgagggcggtgaacaggcctcttcgtccaaggacgatgtggtcgatgccgactacgaagaaatcgacgacaacaagaagtcgtcgtaa

SEQ ID NO: 48185 - protein, 641 aa, Brucella melitensis 16M
MERNMAKVIGIDMGTTNSCVAVMDGKNAKVIENAEGARTTPSIIAFTDGDERLAGQPAKRQAVTNPEGTLFAVKRLIGRRYDDPMVTKDKDLVPYKIVKGDNGDAWVEVHGKKYSPSQISAMILQKMKETAESYLGETVTQAVITVPAYFNDAQRQATKDAGKIAGLEVLRIINEPTAAALAYGLDKSEGKTIAVYDLGGGTFDVSVLEIGDGVFEVKSTNGDTFLGGEDFDIRLVEYLVAEFKKESGIDLKNDKLALQRLKEAAEKAKIELSSSQQTEINLPFITADQTGPKHLAIKLSRAKFESLVDDLVQRTVEPCKAALKDAGLKAGEIDEVVLVGGMTRMPKIQEVVKAFFGKEPHKGVNPDEVVAMGAAIQGGVLQGDVKDVLLLDVTPLSLGIETLGGVFTRLIERNTTIPTKKSQTFSTAEDNQSAVTIRVFQGEREMAADNKLLGQFDLVGIPPAPRGVPQIEVTFDIDANGIVNVSAKDKGTGKEHQIRIQASGGLSDADIEKMVKDAEANAEADKKRRESVEAKNQAESLVHSTEKSLAEYGDKVSADDKKAIEDAIAALKTSLEGEDAEDIKAKTQALAEVSMKLGQAMYEAAQAAEGAGAEGGEQASSSKDDVVDADYEEIDDNKKSS

SEQ ID NO: 48186 - DNA, 1869 bp, Strongylocentrotus purpuratus
  CDS (1)..(1869)
atggcaccaggaaaagcaccagcgattggaatcgatttgggtaccacctattcttgtgttggggtctttcagaatgggaaggtggagatcattgctaacgatcaaggaaaccggaccacacccagttatgttgccttcacagatacagaaagattgatcggtgatgcagccaagaaccaggtggcaatgaatcccaagaacacaatctttgatgccaaacgtcttattgggaggagattcacagacgacaacgtgcaatcagacatgaagcactggcctttcaccgtcatcaaccaaggaggcaagccggtgctacaggcagagtacataggagaaaagaagacaatggcaccagaggaaatcagctccatggtcttgaccaagatgaaggaaacagctgaagcttatcttggccagcagatcaccgatgccgtcatcactgttcccgcttacttcaacgatgcacagcgacaggcaacgaaggacgcaggtgtgatcgcagggctcaacgtcctcagaatcatcaacgagcccaccgctgccgccctcgcctacggactcgataagaagctgaagggggagcaacgtgtcctcatcttcgatctcggtggtggtacgttcgatgtctcgatcctggtcattggtgatgatatcttcgaagtgaagtcgacagccggtgacactcatctcggaggagaagacttcgatgatagactagtccattatcttgccgaggagttcaagcgaaagcataagaaagacatgaggtccaacccaagatcgctccgtcgcctccgcacagcagcggagcgagcaaagagaacactgtcaagcagtactacagcaaacatccaagttgactcactccacgaaggtatcgacttctacaccaatgtcagcagagcacgattcgaggagatgtgttcagatctcttcaaaaagtgtctgcagccagtggagagggccatcagtgatgctaaaatcgacaagaataagattgacaccgtggtaattgtaggtggatcaacacggatcccgaagattcagaagcttctccaggaatacctcaacggcaaggatctcaacaagtctatcaatcctgatgaagctgttgcctatggtgctgctgtccaagctgccatcctatcaaatgacccaagcgaagaaatcaaagacgttattctagtcgatgtggctcctctctctcttggcattgaaaaaataggaggtgtgatgtcaaagctcattgataggaacacaacaatccctacaaaggcaaccaaaaacttcgttactgttgatgacaaccagtctgccatggatatcatagtgttcgaaggagaaagagctttgaccaaagacaataatcgacttggccagtttgagttttccggtatccctcctgcacctcggggcgtccctaagatcaaagtcactttcgacatcgacgccaacggcatcatggacgtcactgccgaggacaggagcacgggtcgtagcaaaaagatcaccatcaccaacgacagcggaaggatatcgaaagacgaaatcgagcgtatgatcaacgatgccgcgagattcaaggccgaagatgatgctcaccgggaacgcatcgcagccagcaaccaactcgagtgctatgcctacaaagtcaagtccgcaatcagagacgcatcagtagggagcaagcttagctccaacgacaaggaagtcgttacaaaagcagttgatgtcgtcattacttggatggatgacaactctttggcaaagaaggaagaactgtcgttcaagttgaatgagttgcagaagacatgctctcccatcatggctaaaatacacgcaggtagtagctcaggttattttacctga

SEQ ID NO: 48187 - protein, 622 aa, Strongylocentrotus purpuratus
MAPGKAPAIGIDLGTTYSCVGVFQNGKVEIIANDQGNRTTPSYVAFTDTERLIGDAAKNQVAMNPKNTIFDAKRLIGRRFTDDNVQSDMKHWPFTVINQGGKPVLQAEYIGEKKTMAPEEISSMVLTKMKETAEAYLGQQITDAVITVPAYFNDAQRQATKDAGVIAGLNVLRIINEPTAAALAYGLDKKLKGEQRVLIFDLGGGTFDVSILVIGDDIFEVKSTAGDTHLGGEDFDDRLVHYLAEEFKRKHKKDMRSNPRSLRRLRTAAERAKRTLSSSTTANIQVDSLHEGIDFYTNVSRARFEEMCSDLFKKCLQPVERAISDAKIDKNKIDTVVIVGGSTRIPKIQKLLQEYLNGKDLNKSINPDEAVAYGAAVQAAILSNDPSEEIKDVILVDVAPLSLGIEKIGGVMSKLIDRNTTIPTKATKNFVTVDDNQSAMDIIVFEGERALTKDNNRLGQFEFSGIPPAPRGVPKIKVTFDIDANGIMDVTAEDRSTGRSKKITITNDSGRISKDEIERMINDAARFKAEDDAHRERIAASNQLECYAYKVKSAIRDASVGSKLSSNDKEVVTKAVDVVITWMDDNSLAKKEELSFKLNELQKTCSPIMAKIHAGSSSGYFT

SEQ ID NO: 48188 - DNA, 2019 bp, Nasonia vitripennis
  CDS (1)..(2019)
atggcatcagctatgtccttggaattcaagtattcacacgaggggcgacagccaccggctgcgacgtcgccaggagacagcagttccatagcatcctcaagaaccttgtcggaaggagttaagggagcagtcatcggtatcgatcttggaaccacattctcgtgtgttgccgttatggaaggaaagcaacctaaagtcattgaaaatgcagaaggctcaagaaccacaccttcttacgttgcttttacaaaagagggagaacggttagttggtatgccagctaaacgacaggccgttacaaattcagcaaatactttttatgctaccaagcgtcttattggtagaaaatttgaagatccagaagttaagaaagacatgaaaaccgtgtcttacaaaatcgtacgtgcatcaaacggagatgcatgggtacaaggaagcgatggaaaaatgtactctccgagtcaaattggagcatttgttcttatgaaaatgaaagaaactgctgagggttatttgagcacgcccgttaaaaatgccgttatcaccgtcccagcttacttcaacgactctcagaggcaggccactaaggatgccggacaaattgctggattaaacgttcttagagtaataaacgaacctacagcagctgctcttgcctatggaatggataaaactgaagatagaattattgccgtctacgatttgggtggtggtaccttcgatatctccattttggaaatccagaaaggagtctttgaagtcaagtctaccaacggagacacgttcttgggaggtgaagatttcgacaatgcattggtcaactaccttgctaacgaattcaagaaagaccaaggtattgatgtagccaaggatgcaatggctatgcagcgtttgaaggaagctgctgagaaggcaaagatcgaattgtccagctctcagcagactgatatcaaccttccttacctcacaatggatgctagtggtcccaaacatcttaaccttaagctctctagaagtaaatttgaggccctcgtctctgatctcatcaagcgtacgattcagccttgccagaaagctcttactgacgccgaggtatcgaagtccgatatcggggaagttttgctcgtcggtggaatgacccgtgtacccaaggtacagcaaactgtacaggaaatctttggtcgccagccatcgagagctgtgaatcccgatgaagctgttgccgttggcgctgctgtccaaggtggagtcttggctggagatgttactgatgtgctactgctcgatgttactccactttctcttggtatcgaaaccttgggtggagtgttcacaagactgatcacacgtaacacaaccattcctacaaagaaaagtcaagtattctcgaccgctgctgatgggcagactcaggtcgaaattaaggtccaccagggtgagcgtgaaatggccaatgacaacaagcttttgggacagttcactcttgttggaatcccacctgcacctagaggagttccacaaatcgaagttacattcgacatcgacgccaacggaattgtacatgtatctgccagagataaaggaactggaaaggaacaacaaatcgttatccagtccagcggtggtttgagcaaggacgagattgaaaacatggtcaagaacgccgaacaatacgccaaggaagacaggataaagaaagaaagagtagaggcggttaaccaagctgaaggtattgttcatgacactgaagctaagatggaagagttcaaggctcagcttccacaaggcgagtgtgacaagctgagggaacaagtttctaaaatgaaggaaactttggccaagaaagatgaaaccgaccccgaggagatcaagaaacagacaaacgaactccaacaggccagcctgaagctcttcgagatggcttacaagaagatggctgctgagcgtgaaggaaatcaacaacaaacgcaggagcagcaacctgagggtgaagaaaagaagaaggaagagaagaactaa

SEQ ID NO: 48189 - protein, 672 aa, Nasonia vitripennis
MASAMSLEFKYSHEGRQPPAATSPGDSSSIASSRTLSEGVKGAVIGIDLGTTFSCVAVMEGKQPKVIENAEGSRTTPSYVAFTKEGERLVGMPAKRQAVTNSANTFYATKRLIGRKFEDPEVKKDMKTVSYKIVRASNGDAWVQGSDGKMYSPSQIGAFVLMKMKETAEGYLSTPVKNAVITVPAYFNDSQRQATKDAGQIAGLNVLRVINEPTAAALAYGMDKTEDRIIAVYDLGGGTFDISILEIQKGVFEVKSTNGDTFLGGEDFDNALVNYLANEFKKDQGIDVAKDAMAMQRLKEAAEKAKIELSSSQQTDINLPYLTMDASGPKHLNLKLSRSKFEALVSDLIKRTIQPCQKALTDAEVSKSDIGEVLLVGGMTRVPKVQQTVQEIFGRQPSRAVNPDEAVAVGAAVQGGVLAGDVTDVLLLDVTPLSLGIETLGGVFTRLITRNTTIPTKKSQVFSTAADGQTQVEIKVHQGEREMANDNKLLGQFTLVGIPPAPRGVPQIEVTFDIDANGIVHVSARDKGTGKEQQIVIQSSGGLSKDEIENMVKNAEQYAKEDRIKKERVEAVNQAEGIVHDTEAKMEEFKAQLPQGECDKLREQVSKMKETLAKKDETDPEEIKKQTNELQQASLKLFEMAYKKMAAEREGNQQQTQEQQPEGEEKKKEEKN

SEQ ID NO: 48190 - DNA, 1923 bp, Nasonia vitripennis
  CDS (1)..(1923)
atgcctgccattggtattgacttgggaaccacctactcctgcgtgggagtctggcaacaaggaaaggtcgagatcatcgccaacgaccagggcaacagaacgacacccagctatgttgccttcacggacacggagcgtctcatcggagacgccgccaagaaccaagtagcgatgaaccctgccaacacagtgttcgacgccaagaggcttatcggacgaaggttcgacgacgagaagatccagggcgacctgaaacactggccgttcagagtcgtcaacgagggaggcaaaccgaagatcgaggttgaattccgcggcgagagaaaaaggttcaatccggaggagatcagctcgatggtcctgacaaagatgaaggaaacagcggaagcgtacttgggatcgaaggtgaaggacgcggtcatcacggtgcccgcttacttcaacgactcgcagcgccaggccaccaaggatgctggagcgatagccggtctcaacgtactcaggatcatcaacgagcccacagccgcggccctcgcctacggcctcgataagaacctcaaaggggagaagaacgtcctcatcttcgatcttggcggtggaaccttcgacgtatccatccttaccatcgacgagggctcgctcttcgaggtgaaagccacggcgggcgacacccatctcggaggtgaagatttcgactcgagactggtcgaccacctgtgcaaggagttcgaacggaaatacagaaagaacatcaagactaacccgagggcccttaggcgtctgagaaccgcggcggagagagccaagcgcaccctgtcctcgagcaccgaggcttccatcgagatcgatgcactcttcgagggcattgacttctacaccaagatctccagggcgcgattcgaggagctctgcgctgacctgttcagatcaactctggagcccgttgagaaggctcttgccgacgccaagttggacaaacgctccatccacgacgtcgtgctcgtcggtggctcaactcgcatcccgaagatccagtcgatgctgcagaacttcttctgcggcaagcagttgaatctctccatcaaccccgacgaggccgtcgcctacggcgcggctgtgcaggctgccattctcaccggcgaaggcgacaagaactctgccctccaggacgtcctgctggtcgacgtagcacctctctcgctcggcattgaaaccgccggcggagtcatgaccaacatcatcgagcgcaacgcccgcattccttgcaaacagacgcaaaccttcacgacctacgccgacaaccaacccggcgtcaccatccaggtatacgagggtgagcgcgctatgaccaaggacaacaacctacttggccgcttcgagctgagcaacatcgcaccggcgccccgtggcgttccaaagatcgacgtcaccttcgacatggacgccaacggtattctgcatgtcaccgccaaggacacggctagcggtcgcagcaacaacattcgaatcaccaacgacaagggacgcctgtcgcgtgaggagatcgaccgtatgctgaacgacgccgagaagtaccgcgaacaagaccaagagcagcgtgagaaggtctcggcgcgtaaccagatcgagagctacgtgttctcggtcaaacaagcggtccaggattgcggcgacaagctcacgcagtccgacaaagacagcgtgctgaacctgtgcgaagacaccatccgctggctcgacaacaacaccctggccgagaaggacgaatacaagcacaaactcgaggagttgcagcgtcaattcgccccgatcatgaccaagatccacacgggaggcgcggcgggaccgcaagattgcggcaatcagtacagacaaggtgcggagaacaactactcgggacccactgtggaggaggtggattaa

SEQ ID NO: 48191 - protein, 640 aa, Nasonia vitripennis
MPAIGIDLGTTYSCVGVWQQGKVEIIANDQGNRTTPSYVAFTDTERLIGDAAKNQVAMNPANTVFDAKRLIGRRFDDEKIQGDLKHWPFRVVNEGGKPKIEVEFRGERKRFNPEEISSMVLTKMKETAEAYLGSKVKDAVITVPAYFNDSQRQATKDAGAIAGLNVLRIINEPTAAALAYGLDKNLKGEKNVLIFDLGGGTFDVSILTIDEGSLFEVKATAGDTHLGGEDFDSRLVDHLCKEFERKYRKNIKTNPRALRRLRTAAERAKRTLSSSTEASIEIDALFEGIDFYTKISRARFEELCADLFRSTLEPVEKALADAKLDKRSIHDVVLVGGSTRIPKIQSMLQNFFCGKQLNLSINPDEAVAYGAAVQAAILTGEGDKNSALQDVLLVDVAPLSLGIETAGGVMTNIIERNARIPCKQTQTFTTYADNQPGVTIQVYEGERAMTKDNNLLGRFELSNIAPAPRGVPKIDVTFDMDANGILHVTAKDTASGRSNNIRITNDKGRLSREEIDRMLNDAEKYREQDQEQREKVSARNQIESYVFSVKQAVQDCGDKLTQSDKDSVLNLCEDTIRWLDNNTLAEKDEYKHKLEELQRQFAPIMTKIHTGGAAGPQDCGNQYRQGAENNYSGPTVEEVD

SEQ ID NO: 48192 - DNA, 1980 bp, Anopheles gambiae str. PEST
  CDS (1)..(1980)
atgaagctattgaaacagacggccctggtggtcgtgctggccgtgttggcctgttcggcggaggaaaagaaggaaaaggacaaggatatcggcacggtggtcggtatcgatctcggcaccacctactcctgcgtcggtgtgtacaagaacgggcgcgtggaaatcattgccaacgaccagggtaaccgcatcacgccgtcctacgtggcattcacggccgacggtgagcgtctgatcggagacgccgccaagaaccagctgacgaccaatccggagaacaccgtgttcgatgcgaagcgtctgattggccgcgagttcaccgaccacacggtgcagcacgacatcaagctgctgccgttcaaggtgatcgaaaagaactccaagccgcacatcagggtgtcgaccggccagggcgataaggtgttcgcgccggaggagatttccgcgatggtgctgggcaagatgaaggaaacggccgaagcgtacctgggcaagaaggtgacccatgccgtcgttaccgtgccggcgtacttcaacgatgcgcagcgccaggcgacgaaggacgccggaacgatcgccggtctggtggtgatgcgcatcatcaacgagccgactgcggccgccatcgcttacggactggacaagaaggacggtgagaagaacgtgctggtgttcgatctgggcggcggtaccttcgacgtctcgctgctgaccatcgacaacggcgtgttcgaggtggtggccacgaacggtgacacccatctgggcggcgaagatttcgaccagcgcgtcatggaccacttcatcaagatgtacaagaagaagaagggcaaggacatccgcaaggacaaccgcgccgtccagaagctgcgtcgcgaggtggagaaggcgaagcgtgccctgtcggccagccaccaggtgcgcatcgagattgaatcgttcttcgagggcgatgacttcagcgagacgctgacccgtgccaagttcgaggagctgaacatggacctgttccgctcgacgatgaagcccgtgcacaaggtgctggaggacgccgacatgaccaagaacgacgtggacgagattgtgctggtcggcggatcgacccgtatcccgaaggtgcagcagctggtgaaggagttcttcaacggcaaggaaccgtcccgcggcatcaacccggacgaggccgtcgcgtacggtgcggccgtgcaggcgggcgtgctgtccggtgaacaggacaccgatgcgatcgtgctgctcgacgtgaacccgctcaccatgggcatcgagacggtcggcggagtgatgaccaagctgatcccgcgcaacaccgtcatcccgacgaagaagtcgcagatcttctcgaccgcctcggacaaccagcacaccgttacgatccaggtgtacgagggcgagcgcccgatgaccaaggacaaccatctgctcggcaagttcgacctgaccggcattccgccggcgccgcgcggcatcccgcagatcgaggtgtcgttcgagatcgacgccaacggcatcctgcaggtgtcggccgaggacaagggcacgggcaaccgggaaaagatcgtcatcaccaacgaccagaaccgcctgacgccggacgacatcgagcgcatgatcaaggatgcggagcggttcgccgacgacgacaagaagctgaaggagcgcgtggaggcccgcaacgagctcgagagctacgcgtacagcctgaagaaccagctcagctcgaaggacaagctgggcgcgagcgtgtccgacgacgacaaggccaagatggaggaggcgatcgacgagaagatcaagtggctggacgagaaccaggacaccgaggcggaagagtacaagaagcagaagaaggagctggaggacatcgtgcagcccatcattgccaagctgtacgcgagcagtggcggtgccccaccgccggccggcggcgacgaggacgacgagctgaaggatgagctgtaa

SEQ ID NO: 48193 - protein, 659 aa, Anopheles gambiae str. PEST
MKLLKQTALVVVLAVLACSAEEKKEKDKDIGTVVGIDLGTTYSCVGVYKNGRVEIIANDQGNRITPSYVAFTADGERLIGDAAKNQLTTNPENTVFDAKRLIGREFTDHTVQHDIKLLPFKVIEKNSKPHIRVSTGQGDKVFAPEEISAMVLGKMKETAEAYLGKKVTHAVVTVPAYFNDAQRQATKDAGTIAGLVVMRIINEPTAAAIAYGLDKKDGEKNVLVFDLGGGTFDVSLLTIDNGVFEVVATNGDTHLGGEDFDQRVMDHFIKMYKKKKGKDIRKDNRAVQKLRREVEKAKRALSASHQVRIEIESFFEGDDFSETLTRAKFEELNMDLFRSTMKPVHKVLEDADMTKNDVDEIVLVGGSTRIPKVQQLVKEFFNGKEPSRGINPDEAVAYGAAVQAGVLSGEQDTDAIVLLDVNPLTMGIETVGGVMTKLIPRNTVIPTKKSQIFSTASDNQHTVTIQVYEGERPMTKDNHLLGKFDLTGIPPAPRGIPQIEVSFEIDANGILQVSAEDKGTGNREKIVITNDQNRLTPDDIERMIKDAERFADDDKKLKERVEARNELESYAYSLKNQLSSKDKLGASVSDDDKAKMEEAIDEKIKWLDENQDTEAEEYKKQKKELEDIVQPIIAKLYASSGGAPPPAGGDEDDELKDEL

SEQ ID NO: 48194 - DNA, 1944 bp, Anopheles gambiae str. PEST
  CDS (1)..(1944)
atggcaaagacaccagctgtcggtatagatcttggcactacctactcgtgcgtcggtgtgttccagcatggcaaggtggacattatcgcgaacgatcagggcaaccggaccaccccgtcgtacgtggcgttcactgattcggaacggttgattggagatgctgccaagaaccaggtggcgatgaatcccaacaacaccatttttgatgccaaacgcttgatcggtcgcaagtttgacgatgccacagtacaggccgacatgaagcactggccattcgatgtgatcagtgacggcggcaaaccgaagctgcaggtcgagtacaagggcgagaagaagtcgttcttcccggaggaggtgtcctcgatggtgttgaccaagatgaaggaaacggccgaagcgtacctcggcaagagcattgccaacgccgtcatcaccgtgccggcgtacttcaacgactcgcagcgccaggccacgaaggatgccggtgcgatcgccgggttgaacgtgctgcgcatcatcaacgagccgacggcggccgccattgcgtacgggctggacaagaagggggccggcgagcggaacgtgctgatcttcgatctcggcggcggcaccttcgacgtgtcgatcctcacgatcgaggacggtatctttgaggtgaagtcgacggccggcgacacccatctcggcggcgaggactttgacaaccgcatggtgtcgcactttgtcgaggagttcaagcgcaagcacaagaaggacattacgagcaacaagcgcgcgctgcgccgattgcgcacggcttgcgagcgggcaaagcgcacgctgtccgcgtccacccaggcaagcatcgagatcgactcgctgtacgagggcatcgatttctacacctcgatcacgagggcccggttcgaggagctcaattcggacctgttccgcgacacgatggagccggtgtcgaaggcgctgcgcgatgccaagatggacaaggccagcatccacgacatcgtgctcgtcggtggatcgacccgcattcccaaggtgcagaagctgctgcaggacttcttcaacggcaaggagctgaacaaatcgatcaacccggacgaggccgtcgcgtacggggccgccgtgcaggccgccatcctgcagggcgacacgtcggaagcggttcaggatctgctgctgctggatgtgacgcccctgtcgctgggcatcgaaacggccggtggcgtgatgacggtgctgatcaagcgcaacaccacgatcccaacgaagcagacgcaaacgttcaccacctactcggacaaccagccgggcgtgctgattcaggtgtttgagggtgagcgcgccatgaccaaggacaacaatctgctgggcaagttcgagctgagcggcatcccgccggcaccgcgcggtgtgccccagatcgaggtgacgttcgatatcgacgcgaacggtatcatgaacgtgtcggcgatcgagaagtccaccaacaaggagaaccgcatcacgatcacgaacgacaagggccgcctgagcaaggaggacatcgatcggatggtgaatgaggcggagaagttccgcaacgaggacgagaagcagcgggaaaagatcagcgcgaagaattcgctcgaggcgtactgcttcaacatgaagtcgacgatggaggacgcgaacattaaggacaaaatcccggacgctgacaagacgctcatcatggacaagtgtaacgcgacgattgcctggctcgatggcaaccagacggcggagaaggaagagttcgagcacaagcagaaggagctggaggccgtttgcaatccgatcattcagaagctgtaccagggagcgggtggtatgcccggtggtggcatgcccggtggcggtatgcccggtgccggtggagctccgccaacctccggcgctggcccaacgatagaggaggtggattaa

SEQ ID NO: 48195 - protein, 647 aa, Anopheles gambiae str. PEST
MAKTPAVGIDLGTTYSCVGVFQHGKVDIIANDQGNRTTPSYVAFTDSERLIGDAAKNQVAMNPNNTIFDAKRLIGRKFDDATVQADMKHWPFDVISDGGKPKLQVEYKGEKKSFFPEEVSSMVLTKMKETAEAYLGKSIANAVITVPAYFNDSQRQATKDAGAIAGLNVLRIINEPTAAAIAYGLDKKGAGERNVLIFDLGGGTFDVSILTIEDGIFEVKSTAGDTHLGGEDFDNRMVSHFVEEFKRKHKKDITSNKRALRRLRTACERAKRTLSASTQASIEIDSLYEGIDFYTSITRARFEELNSDLFRDTMEPVSKALRDAKMDKASIHDIVLVGGSTRIPKVQKLLQDFFNGKELNKSINPDEAVAYGAAVQAAILQGDTSEAVQDLLLLDVTPLSLGIETAGGVMTVLIKRNTTIPTKQTQTFTTYSDNQPGVLIQVFEGERAMTKDNNLLGKFELSGIPPAPRGVPQIEVTFDIDANGIMNVSAIEKSTNKENRITITNDKGRLSKEDIDRMVNEAEKFRNEDEKQREKISAKNSLEAYCFNMKSTMEDANIKDKIPDADKTLIMDKCNATIAWLDGNQTAEKEEFEHKQKELEAVCNPIIQKLYQGAGGMPGGGMPGGGMPGAGGAPPTSGAGPTIEEVD

SEQ ID NO: 48196 - DNA, 1950 bp, Anopheles gambiae str. PEST
  CDS (1)..(1950)
atggcagccgcaaaagcaccagcagtcggtattgatctgggtacgacctacagctgtgtcggagtgttccagcacggcaaggtcgagatcatcgccaacgaccagggcaaccgaaccacgccatcgtatgtggccttcactgatacggagcgtctgattggcgatgctgccaagaaccaggtggccatgaacccgaccaacaccatcttcgacgcgaagcgtctgatcggccgcaagttcgacgatcccgcgatccaggccgacatgaagcactggccgttcgaggtggagtcgatcgagggcaagccaaagatcgcggtcgagtacaagggcgagaagaagtgcttcttcccggaggaggtcagctcgatggtgctgaccaagatgaaggaaacggccgaagcctacctgggcaagacggtgacgaacgccgtcatcaccgtgccagcctacttcaacgactcgcagcgccaggcgacgaaggatgccggtaccatctcgggactgaacgtgctgcgcatcatcaacgagccgaccgcggccgccatcgcgtacggtctggacaagaagaccgccggtgagcgcaacgtactgatcttcgatctcggcggcggcaccttcgacgtgtcgatcctgtccatcgacgatggcatcttcgaggtcaagtcgaccgccggagacacccatctgggcggtgaggacttcgacaaccgtctggtgaaccacttcgcacaggaattcaagcgcaagcacaagaaggatctgtccaccaacaagcgcgccctgcgccgactgcgcacggcgtgcgagcgcgcgaagcgcacgctctcgtcgtcgacgcaggcgagcattgagatcgattcgctgttcgagggaaccgatttctacacctcgatcacgcgcgcccgcttcgaggagctgaacgccgacctgttccgctcgacgatggagccggtcgagaaggcgctgcgcgacgccaagatggacaaggcgagcatccacgacatcgtgctggtgggtggatcgacgcgcatcccgaaggtgcagaagctgctgcaggacttcttcaacggcaaggagttgaacaagtctatcaacccggacgaggccgtcgcgtacggtgccgccgtccaggccgccatcctgcacggcgacaagtcggaggaggtgcaggatctgctgctgctcgacgtgaccccgctgtcgctcggtatcgagacggcgggcggcgtgatgtcggtgctgatcaagcgcaacacgaccatcccgaccaagcagacgcagacgttcaccacgtactcggacaaccagccgggcgtgctgatccaggtgttcgagggcgagcgcgccatgacgaaggacaacaacctgctcggcaagttcgagctgagcggcatcccgccggcaccgcgcggcgtgccccagatcgaggtgacgttcgacatcgacgcgaacggtatcctgaacgtgacggcgctcgagaagtcgaccaacaaggagaacaagatcaccatcacgaacgacaagggccgcctgagcaaggaggacatcgagcgcatggtgaacgaggccgagaagtaccgcactgaggacgagaagcagaaggagaccatctccgcgaagaacgcgctggagtcgtactgcttcaacatgaaggccaccatggaggacgacaagctgaaggacaagatcaccgacagcgacaagaccctggtgctggacaagtgcaacgacacgatcaagtggctcgatgccaaccagctggccgacaaggaggagtacgagcaccgccagaaggagctcgagtcggtgtgcaacccgatcatcagcaagctgtaccagggcgccggtggtgccccgggaggcatgcccggattcccgggcgcggccggcggtgctgccggtggtgccggttccggctcgggaccgaccatcgaggaggtcgactaa

SEQ ID NO: 48197 - protein, 649 aa, Anopheles gambiae str. PEST
MAAAKAPAVGIDLGTTYSCVGVFQHGKVEIIANDQGNRTTPSYVAFTDTERLIGDAAKNQVAMNPTNTIFDAKRLIGRKFDDPAIQADMKHWPFEVESIEGKPKIAVEYKGEKKCFFPEEVSSMVLTKMKETAEAYLGKTVTNAVITVPAYFNDSQRQATKDAGTISGLNVLRIINEPTAAAIAYGLDKKTAGERNVLIFDLGGGTFDVSILSIDDGIFEVKSTAGDTHLGGEDFDNRLVNHFAQEFKRKHKKDLSTNKRALRRLRTACERAKRTLSSSTQASIEIDSLFEGTDFYTSITRARFEELNADLFRSTMEPVEKALRDAKMDKASIHDIVLVGGSTRIPKVQKLLQDFFNGKELNKSINPDEAVAYGAAVQAAILHGDKSEEVQDLLLLDVTPLSLGIETAGGVMSVLIKRNTTIPTKQTQTFTTYSDNQPGVLIQVFEGERAMTKDNNLLGKFELSGIPPAPRGVPQIEVTFDIDANGILNVTALEKSTNKENKITITNDKGRLSKEDIERMVNEAEKYRTEDEKQKETISAKNALESYCFNMKATMEDDKLKDKITDSDKTLVLDKCNDTIKWLDANQLADKEEYEHRQKELESVCNPIISKLYQGAGGAPGGMPGFPGAAGGAAGGAGSGSGPTIEEVD

SEQ ID NO: 48198 - DNA, 1956 bp, Magnaporthe grisea 70-15
  CDS (1)..(1956)
atggcgcccgctgttggtatcgacttgggtacaacctactcttgcgtcggaatcttccgtgacgaccgcattgagattatcgccaatgaccagggtaaccgaacaaccccgtccttcgtggcgttcacggataccgagcgtctgatcggagatgcggccaagaaccaggtcgctatgaacccccacaacaccgtcttcgacgcgaagaggttgattggtcgcaagttctccgacgctgaggtccaggccgacatgaagcacttccccttcaaggtcgtcgagaggtctggcaagcctgtcattgaggtcgagttcaagggagagtcaaagcagttcactcctgaggagatctcatccatggtcttgaccaagatgcgtgagactgctgagtcttaccttggtggcaccgtcaacaacgctgtcgtcaccgtccccgcctacttcaacgactcgcagcgtcaggctaccaaggatgccggtctcattgctggtctgaacgtcctccgtatcatcaacgagcctactgccgccgccatcgcctacggtcttgacaagaaggtcgagggtgagcgcaacgtgcttattttcgatcttggtggtggtactttcgatgtgtcgctccttaccattgaggagggtatcttcgaggtcaagtccaccgctggtgacacccacttgggtggtgaggactttgacaaccgtttggttactcacttcgccaacgagttcaagaggaagcacaagaaggatctcaccaccaacgcccgtgccctccgtcgtctgcgcactgcttgcgagcgtgcgaagcgcactctttcttcctctgcccagacctccatcgagatcgactcgctgtacgagggtattgacttctacacctcgatcactcgtgcccgtttcgaggagctttgccaggacctgttccgctccaccctgcagcctgttgaccgtgtcttgaccgatgccaagatcgacaaggcccaggttcacgagatcgtcttggtcggcggttccacccgtattccccgtatccagaagctcattaccgactacttcaacggcaaggagcccaacaagtccatcaaccctgacgaggctgtcgcctacggtgctgccgtccaggctgccatcctttcgggtgacaccagctccaagtccaccaacgagattctgctgctcgacgttgcaccgctctcgctcggtatcgagactgctggtggtatgatgaccaagctcattccccgtaacaccaccatccccaccaagaaatccgaggtcttctccaccttctcggacaaccagcctggtgtgcttatccaggtctacgagggtgagcgccagcgcaccaaggacaacaacctgctgggcaagttcgagcttaccggcattcccccggctcctcgcggtgttccccagatcgaggttaccttcgacctggacgccaacggaatcatgaacgtctccgctgttgagaagggcactggcaagaccaaccagattaccatcaccaacgacaagggccgtctttccaaggaggacatcgagcgcatgcttgctgaggccgagaagttcaaggaggaggatgaggctgaggccgcccgtgtctctgccaagaacggccttgagtcgtacgcctactccctgcgtaacaccctgcaggactccaaggtcgacgagaagcttgatgctgccgacaaggagaagctcaacgctgagatcaacaagattgtcagctggcttgacgagagccagcaggctaccaaggaggagtacgaggagcaccagaaggagcttgaggctgttgccaaccccatcatgatgaaattctacggtgctggtggcgctcccggtggcatgcccggtgcacccggtggtgcccctggtggcttccctggtgccggtggtgctcctggcgccggcggcgacgatggccccactgtcgaggaggtcgactaa

SEQ ID NO: 48199 - protein, 651 aa, Magnaporthe grisea 70-15
MAPAVGIDLGTTYSCVGIFRDDRIEIIANDQGNRTTPSFVAFTDTERLIGDAAKNQVAMNPHNTVFDAKRLIGRKFSDAEVQADMKHFPFKVVERSGKPVIEVEFKGESKQFTPEEISSMVLTKMRETAESYLGGTVNNAVVTVPAYFNDSQRQATKDAGLIAGLNVLRIINEPTAAAIAYGLDKKVEGERNVLIFDLGGGTFDVSLLTIEEGIFEVKSTAGDTHLGGEDFDNRLVTHFANEFKRKHKKDLTTNARALRRLRTACERAKRTLSSSAQTSIEIDSLYEGIDFYTSITRARFEELCQDLFRSTLQPVDRVLTDAKIDKAQVHEIVLVGGSTRIPRIQKLITDYFNGKEPNKSINPDEAVAYGAAVQAAILSGDTSSKSTNEILLLDVAPLSLGIETAGGMMTKLIPRNTTIPTKKSEVFSTFSDNQPGVLIQVYEGERQRTKDNNLLGKFELTGIPPAPRGVPQIEVTFDLDANGIMNVSAVEKGTGKTNQITITNDKGRLSKEDIERMLAEAEKFKEEDEAEAARVSAKNGLESYAYSLRNTLQDSKVDEKLDAADKEKLNAEINKIVSWLDESQQATKEEYEEHQKELEAVANPIMMKFYGAGGAPGGMPGAPGGAPGGFPGAGGAPGAGGDDGPTVEEVD

SEQ ID NO: 48200 - DNA, 1962 bp, Gibberella zeae PH-1
  CDS (1)..(1962)
atgggtcccgccgtcggtatcgatttgggtaccacgtactcttgcgtgggtatcttccgtgaggatcgatgtgatatcatcgccaacgaccagggtaaccgaactaccccctcattcgtcggtttcaccgacaccgagcgtctgattggtgatgccgccaagaaccaggtcgccatgaacccccagaacaccgtcttcgacgccaagcgattgatcggccgcaagttcgccgatgctgaggtccaggccgatatgaagcacttccccttcacaatcatcgacaaggctggcaagcccgccatcgaggttgagttcaagggtgagaagaagaccttcacccccgaggagatctccgccatgatcctcaccaagatgcgtgagactgctgagtcttacctcggtgagactgtcaacaacgccgttgtcaccgtccctgcctacttcaacgactctcagcgtcaggctaccaaggatgcgggtctcatcgccggtctcaacgttctccgaatcatcaacgagcctaccgctgccgccattgcctacggtcttgacaagaaggttgagggtgagcgcaacgtcctcatcttcgatcttggtggtggtaccttcgatgtctctctccttaccattgaggagggtatcttcgaggtcaagtctactgccggtgacactcacttgggtggtgaagatttcgacaaccgcctcgttaaccacttcgttaacgagttcaagcgaaagcataagaaggatctaagcaccaacgtccgtgctcttcgacgtctccgaaccgcttgtgagcgcgccaagcgaactctctcttcttccgctcagacctccattgagatcgactctctcttcgagggtattgatttctacacttccatcacccgtgctcgtttcgaggagctctgccaggatctcttccgatccaccatccagcccgtcgaccgtgtccttaccgacgccaagatcgacaagtccctcgtccacgagatcgtcctcgtcggtggatctacccgtatcccccgtgtccagaagctcatcaccgactacttcaacggaaaggagcccaacaagtccatcaatcctgatgaggctgttgcctacggtgccgctgtccaggctgctattctctctggtgacacctctagcaaggccaccaacgagattctgctcctcgacgtcgcccccctctctctcggtatcgagaccgctggtggtatgatgaccaagctcatcccccgcaacaccaccattcccaccaagaagtccgaggtcttctctaccttctccgacaaccagcctggtgtccttatccaggtctacgagggtgagcgccagcgcaccaaggacaacaacctcatgggcaagttcgagctcactggtatcccccctgctccccgtggtgttccccagattgaggtcaccttcgatctcgatgccaacggtatcatgaacgtttccgccgtcgagaagggtaccggcaagtccaacaagatcgtcatcaccaacgacaagggccgcctgtccaaggaggagatcgagcgcatgctcaacgatgctgagaagtacaaggaggaggatgaggccgagggcaagcgtgtcgctgccaagaacggtcttgagtcttacgcttactctctccgcaacactctctccgaccccaaggtcgaggagaagattgaggcttccgacaaggagaccctcactgctgagattgacaaggtcgtccagtggctcgatgacaaccagcaggctactcgtgaggagtatgaggagcaccagaaggagctcgagggcaaggctaaccccatcatgatgaagttctacggagctggtggtgagggtgctcccggtggcatgcccggcatgcccggcggccctggtggcttccctggtgctggtggccccgcccccggtgccggtggtgacgatggtcccaccgtcgaggaggtcgactaa

SEQ ID NO: 48201 - protein, 653 aa, Gibberella zeae PH-1
MGPAVGIDLGTTYSCVGIFREDRCDIIANDQGNRTTPSFVGFTDTERLIGDAAKNQVAMNPQNTVFDAKRLIGRKFADAEVQADMKHFPFTIIDKAGKPAIEVEFKGEKKTFTPEEISAMILTKMRETAESYLGETVNNAVVTVPAYFNDSQRQATKDAGLIAGLNVLRIINEPTAAAIAYGLDKKVEGERNVLIFDLGGGTFDVSLLTIEEGIFEVKSTAGDTHLGGEDFDNRLVNHFVNEFKRKHKKDLSTNVRALRRLRTACERAKRTLSSSAQTSIEIDSLFEGIDFYTSITRARFEELCQDLFRSTIQPVDRVLTDAKIDKSLVHEIVLVGGSTRIPRVQKLITDYFNGKEPNKSINPDEAVAYGAAVQAAILSGDTSSKATNEILLLDVAPLSLGIETAGGMMTKLIPRNTTIPTKKSEVFSTFSDNQPGVLIQVYEGERQRTKDNNLMGKFELTGIPPAPRGVPQIEVTFDLDANGIMNVSAVEKGTGKSNKIVITNDKGRLSKEEIERMLNDAEKYKEEDEAEGKRVAAKNGLESYAYSLRNTLSDPKVEEKIEASDKETLTAEIDKVVQWLDDNQQATREEYEEHQKELEGKANPIMMKFYGAGGEGAPGGMPGMPGGPGGFPGAGGPAPGAGGDDGPTVEEVD

SEQ ID NO: 48202 - DNA, 2031 bp, Gibberella zeae PH-1
  CDS (1)..(2031)
atgttggcttcgcgtttgtcgagggctcttccccgagcttcccctcttgccgctcgatcggctgccttcacccgatctcctctggcctccaggttcgctcgttatgagtccactgagtccgatggcaaggtccagggtgccgtgatcggtatcgatcttggcaccaccaactctgccgtcgccatcatggagggcaaggttcctcgcatcattgagaacgctgaaggtgcccgaactaccccttcagtcgttgctttcgccgaggatggtgagcgactcgtcggtgtcgctgctaagcgtcaggccgtcgttaacccagagaacaccctcttcgctaccaagcgattaataggacgaaagttcaaggatgctgaggttcagcgcgatatcaaggaggttccttacaagattgttcagcacaccaacggcgacgcctgggtcgctgcccgtggccagaactactctccctctcagatcggtggtttcgtcctcaacaagatgaaggagaccgccgaggcgtacctctctaagcctatcaagaacgccgtcgtcaccgtccccgcctacttcaacgactctcagcgacagagcaccaaggacgctggtcaaattgccggcctcaacgtcctccgtgtcgtcaacgagcctactgccgccgctcttgcctacggtctcgagaaggaggctgacagcattgtcgctgtctacgatcttggtggtggtaccttcgatatctccatccttgagatccagaacggtgttttcgaggtcaagtccaccaacggtgatacccatctcggtggtgaagatttcgatatccaccttgttcgacaccttgtccaggacttcaagaagacttccggcattgacctgtctggcgaccgcatggctatccagcgtatccgtgaggctgctgagaaggccaagatcgagctttcttcttctctctccaccgatatcaaccttcccttcatcactgccgactcttctggccccaagcacattaacatgaagctcagccgagctcagcttgagaagatggtcgaccctcttatcagccgcaccatcgagcctgtccgcaaggctcttaaggatgctggcctctccgctaaggagatccaggaggttatcctcgttggtggtatgacccgtatgcccaaggtcgctgagtccgttaagggcattttcggccgagaccccgccaagtccgtcaaccccgatgaggctgtcgccattggtgccgctatccagggtgctgttctctctggtgaggtcaaggaccttctcctcctcgatgttactcctctgtccctcggtattgagaccctcggtggtgtcttcacccgtttgatcaaccgtaacactactatccccaccaagaagtcccaggtcttctctactgccgccgacttccagaccgccgtcgagatcaaggtctaccagggtgagcgtgagctcgtcaaggacaacaagatgctcggaaacttccagcttgttggtatcccccctgctcaccgtggtgttcctcaagtcgaggttaccttcgacattgacgctgattccatcgtccacgtccacgccaaggacaagtccaccaacaaggaccagtccatcaccattgcctccggttccggtctctctgagagcgagatcgagcagatggttgaggactctgagaagtacgctgaggctgataaggagcgcaagggtgccatcgaggctgccaaccgcgccgacagcgtcttgaacgacactgagcgtgctctcaacgagtatgccgacaagctcgacaagaccgaggctgactccatcaaggagaagctcaccactctccgcgagttcgtcgccaagaacctctctggtgagggtaccgctaccgctgccgagatcaaggagaagaccgatgagctccaggttgccagcttgaacctcttcgacaagatgcacaaggcccgcaacgacaacagcggcgagcagtcctcttccgagcaatctcaggagggtgagaagaaggatgagaccaagccttaa

SEQ ID NO: 48203 - protein, 676 aa, Gibberella zeae PH-1
MLASRLSRALPRASPLAARSAAFTRSPLASRFARYESTESDGKVQGAVIGIDLGTTNSAVAIMEGKVPRIIENAEGARTTPSVVAFAEDGERLVGVAAKRQAVVNPENTLFATKRLIGRKFKDAEVQRDIKEVPYKIVQHTNGDAWVAARGQNYSPSQIGGFVLNKMKETAEAYLSKPIKNAVVTVPAYFNDSQRQSTKDAGQIAGLNVLRVVNEPTAAALAYGLEKEADSIVAVYDLGGGTFDISILEIQNGVFEVKSTNGDTHLGGEDFDIHLVRHLVQDFKKTSGIDLSGDRMAIQRIREAAEKAKIELSSSLSTDINLPFITADSSGPKHINMKLSRAQLEKMVDPLISRTIEPVRKALKDAGLSAKEIQEVILVGGMTRMPKVAESVKGIFGRDPAKSVNPDEAVAIGAAIQGAVLSGEVKDLLLLDVTPLSLGIETLGGVFTRLINRNTTIPTKKSQVFSTAADFQTAVEIKVYQGERELVKDNKMLGNFQLVGIPPAHRGVPQVEVTFDIDADSIVHVHAKDKSTNKDQSITIASGSGLSESEIEQMVEDSEKYAEADKERKGAIEAANRADSVLNDTERALNEYADKLDKTEADSIKEKLTTLREFVAKNLSGEGTATAAEIKEKTDELQVASLNLFDKMHKARNDNSGEQSSSEQSQEGEKKDETKP

SEQ ID NO: 48204 - DNA, 2064 bp, Apis mellifera
  CDS (1)..(2064)
atgctgactgctgcaagattattaactcgtagttgtagcaatataacctgcgatattactagaaaacaacaattcagcacaattcttaaaaatgttgtggctcctactttgaacatgccccaacgatttacagatttgcaacaatacagatacaaatccgaaggtgtaaaaggagcagtcattggtattgatctgggaacaacattttcatgtgtagcagttatggaaggaaaacaacctaaagttatagaaaatgcagaaggatcacgaacgactccatcttatgtagcatttagtaaagaaggagaacgtttagttggtatgccagctaaacgtcaagcagttactaattcatcaaacacattttatgctacaaaacgactaattggacgaagatttgatgatcctgaagtaaaaaaagatatgaaaagtgtatcttacaaaattgtccgtgcctctaatggagatgcatgggtacaaggaggtgatagtaaaatgtattctcctagtcaaattggtgcatttgtactcatgaaaatgaaagaaacagcagaatcatatttaaatacgtcagtaaaaaatgccgtaattactgttcctgcatactttaatgattctcaaagacaagctaccaaggatgctggtcaaattgctggacttaacgtacttagagtaattaatgaaccaacagcagctgctcttgcatatggcatggacaaaacagaagatagaattattgcagtgtatgatttaggaggcggtacttttgatatttcgattttggaaattcagaaaggagtttttgaggttaaatctacaaatggggatactttcttaggaggagaagactttgataatgcattggttaatcaccttgtatcagaatttaaaaaagatcaaggtatagatgtaactaaagatgcaatggccatgcaacggttgaaagaagctgctgaaaaagcaaagattgaattgtctagttctttgcaaactgatataaatttaccttatttaactatggattctagtgggccaaaacatttaaatcttaaactttcaagaagtaaatttgaaaaccttgttgctgatttaattaaacgtactattcagccatgtcaaaaggcactttctgatgccgaagtaacgagatctgatattggtgaagtattattggttggtggtatgacaagagtaccaaaagttcaacaaactgtgcaagaaatttttggtcgacaaccatcaaaggctgtaaatcctgatgaagctgtagctgtaggtgctgcagttcaaggtggtgtccttgctggagatgttacagatgttcttcttttggatgttacacctttgtcacttggaattgaaacattgggtggagtattcacacgattaatttctcggaatacaactattcccacgaaaaaaagtcaagtattttctacagctgctgatggtcagactcaagtagaaattaaagtacaccagggtgaacgggaaatggctagcgataataaacttttaggacaatttactcttgttggaattccacctgcacctagaggtgtgccacaaatagaagtcacatttgacattgatgctaatggcattgttcatgtatctgctagagataaaggaactggaaaagaacaacaaattgttattcagtcaagtggcggtcttagtaaagatgaaattgaaaatatggtgaaaaatgcagaacaatatgctaaacaagataaaataaagaaagaaagagttgaagctgtgaatcaagctgaaggaattattcacgacacggaatctaaactagaagaatttaaagcacaattaccacaagatgaatgtgacaaactcagagatttggtcgggaaaatgcgaggaacattagctaaaaaagatgacacggaaccagaagaaattaaaagacaaacaaacgaattacaacaagcgagtctcaaattattcgaaatggcatataagaaaatggccgcagaacgagaaggacaaagccaaagtcaaagtcaacaacaagaagagaaacctgaaaagaaagaggagaagaattaa

SEQ ID NO: 48205 - protein, 687 aa, Apis mellifera
MLTAARLLTRSCSNITCDITRKQQFSTILKNVVAPTLNMPQRFTDLQQYRYKSEGVKGAVIGIDLGTTFSCVAVMEGKQPKVIENAEGSRTTPSYVAFSKEGERLVGMPAKRQAVTNSSNTFYATKRLIGRRFDDPEVKKDMKSVSYKIVRASNGDAWVQGGDSKMYSPSQIGAFVLMKMKETAESYLNTSVKNAVITVPAYFNDSQRQATKDAGQIAGLNVLRVINEPTAAALAYGMDKTEDRIIAVYDLGGGTFDISILEIQKGVFEVKSTNGDTFLGGEDFDNALVNHLVSEFKKDQGIDVTKDAMAMQRLKEAAEKAKIELSSSLQTDINLPYLTMDSSGPKHLNLKLSRSKFENLVADLIKRTIQPCQKALSDAEVTRSDIGEVLLVGGMTRVPKVQQTVQEIFGRQPSKAVNPDEAVAVGAAVQGGVLAGDVTDVLLLDVTPLSLGIETLGGVFTRLISRNTTIPTKKSQVFSTAADGQTQVEIKVHQGEREMASDNKLLGQFTLVGIPPAPRGVPQIEVTFDIDANGIVHVSARDKGTGKEQQIVIQSSGGLSKDEIENMVKNAEQYAKQDKIKKERVEAVNQAEGIIHDTESKLEEFKAQLPQDECDKLRDLVGKMRGTLAKKDDTEPEEIKRQTNELQQASLKLFEMAYKKMAAEREGQSQSQSQQQEEKPEKKEEKN

SEQ ID NO: 48206 - DNA, 1977 bp, Apis mellifera
  CDS (1)..(1977)
atggctaaagcacctgcagttggtattgatcttggcactacttattcctgtgttggtgtattccagcatggaaaagtagaaatcatcgctaatgatcaaggaaatcgtacaacacctagctatgttgcatttacggaaactgaacgattaatcggcgatgctgccaagaaccaagttgccatgaaccccaacaacaccattttcgatgccaaacgtcttattggtcgtcgttttgaagatcccactgttcaggctgatatgaagcattggccctttactgttgtaaatgatggtggcaagcctaaaattcaagtatattacaaaggagaggcgaagactttcttccccgaagaagtgagttcaatggtcctggtaaagatgaaggaaacagctgaagcatatctgggaaaaactgtcagtaatgccgtgatcactgtacctgcttacttcaacgactcgcagcgtcaggcaactaaggacgctggtaccatctcgggcttaaatgttttacgtattattaacgagcccaccgctgctgccattgcttatggcttggataaaaaaactaccagcgaacgcaacgtccttatctttgatcttggtggtggcacctttgatgtctcaattctgaccattgaagatggcattttcgaggtcaagtcaacagcaggagatacccatcttggcggcgaagattttgataaccgtatggttaatcactttgtacaagaattcaaacggaaatataaaaaagatttaactgcaaataaacgcgctcttcgtcgtttgagaacagcttgtgagcgtgcgaaacgcactctgtcttcgtctactcaagctagcattgaaattgattcgctctatgagggaatcgatttttatacatcgatcaccagagctcgatttgaagaactctgtgctgatctcttcagaggaacactcgagccagtagaaaaatcattacgcgatgctaaaatggataaagctcagattcacgatatcgttctggttggtggatccacgcgaattcctaagattcaaaaacttctgcaagacttcttcaatggaaaggaattgaataaatctatcaatcctgatgaggctgtggcatatggagctgctgtgcaagctgccattcttcatggtgataaatctgaagaagtacaagatctattacttcttgatgtaacacctctatctcttggtattgaaactgctggtggtgttatgactgctcttattaagagaaatactaccattccaacaaagcaaactcaaaccttcactacatatgctgataatcaaccaggtgtattgattcaagtctatgaaggagaacgtgctatgacgaaagataacaatctgttaggtaaatttgagctcagcggcattcctccagctcctcgaggagttcctcaaattgaagtcacctttgatatcgatgccaatggtattctcaatgtctctgcagttgataaatctactggtaaagagaacaaaatcactattaccaacgataaaggtcgtctcagcaaagaagatatcgaaaggatggtcaacgaagctgagaaatatcgtagcgaagacgaaaaacaaaaagaaactatcgctgctaagaatggtcttgagtcttactgcttcaacatgaagagtacagtggaagacgagaagttgaaggataaaatcagcgccagtgacaaacaagttgtactggataaatgcaacgatatcattaaatggctcgatgctaaccaattagctgataaagaagaatacgaacataaacagaaagaattagaagctatatgcaatcctattgtcacaaaattgtatcagggcactggtgggatgcctggtgggatgcctggtgggatgcctggtggaatgcctggtggaatgcctggtggcttcccaggagctggtggcggtgctcctggtggtggtgcatctggacctaccatcgaagaagtcgattaa

SEQ ID NO: 48207 - protein, 658 aa, Apis mellifera
MAKAPAVGIDLGTTYSCVGVFQHGKVEIIANDQGNRTTPSYVAFTETERLIGDAAKNQVAMNPNNTIFDAKRLIGRRFEDPTVQADMKHWPFTVVNDGGKPKIQVYYKGEAKTFFPEEVSSMVLVKMKETAEAYLGKTVSNAVITVPAYFNDSQRQATKDAGTISGLNVLRIINEPTAAAIAYGLDKKTTSERNVLIFDLGGGTFDVSILTIEDGIFEVKSTAGDTHLGGEDFDNRMVNHFVQEFKRKYKKDLTANKRALRRLRTACERAKRTLSSSTQASIEIDSLYEGIDFYTSITRARFEELCADLFRGTLEPVEKSLRDAKMDKAQIHDIVLVGGSTRIPKIQKLLQDFFNGKELNKSINPDEAVAYGAAVQAAILHGDKSEEVQDLLLLDVTPLSLGIETAGGVMTALIKRNTTIPTKQTQTFTTYADNQPGVLIQVYEGERAMTKDNNLLGKFELSGIPPAPRGVPQIEVTFDIDANGILNVSAVDKSTGKENKITITNDKGRLSKEDIERMVNEAEKYRSEDEKQKETIAAKNGLESYCFNMKSTVEDEKLKDKISASDKQVVLDKCNDIIKWLDANQLADKEEYEHKQKELEAICNPIVTKLYQGTGGMPGGMPGGMPGGMPGGMPGGFPGAGGGAPGGGASGPTIEEVD

SEQ ID NO: 48208 - DNA, 1968 bp, Apis mellifera
  CDS (1)..(1968)
atgaaaggagttaaagctctatttttattaggcttaataacttttgcttttgcaaaagaagaaaaacagaaagaagatattggaactgtcattggaattgatttaggcacaacatattcttgtgttggagtttataaaaatggaagagcagaaattatagctaatgatcaaggaaatagaattacaccatcatatgtggcatttactgctgatggtgaacgattaattggagatgctgcaaagaatcaattgactacaaatcctgaaaatacagtttttgatgccaaacgattaattggcagagaatggtcagatcctactgtacaacgtgatattaaatcctttccatttaaagtaattgaaaaaaatagcaaaccgcatataagaatggtaattaatggtgaagaaaaggtatttgcacctgaagaaatttctgctatggtacttggtaaaatgaaagaaacagcagaagcatatttaggcaaaaaagttactcatgctgtagtcactgtaccagcttattttaatgatgcacaaagacaagctactaaagatgcaggaactatttctggacttgttgttatgagaattattaatgaacctacagctgctgcaattgcttatggtttagataaaaaagatggagaaaaaaatgtattagtttttgatttaggtggtggtacttttgatgtcagtttacttacaattgataatggagtatttgaagttgtggcaacgaatggtgatactcatttaggtggtgaagatttcgatttacgcgtgatggatcattttacgaaactatataaaaagaaaaaaggcaaagatattcgtaaagatagtagaacattacaaaaattacgtcgtgaagttgagaaagctaaaagagcactcagtgttagccaccaagtgaggatcgaaattgaatctttctttgaaggtgaagacttttctgagactttaacacgtgccaaatttgaagagttgaatatggatcttttccgtagtactttgaaacctgtacagaaagttttggaagattctgatatgaataaaaaagatgtagatgaaattgtactcgttggaggttctactagaattcctaaagttcaacaattagttaaagaattctttggcggtaaagaaccatcacgaggtattaatcctgacgaggctgttgcatatggtgctgctgtgcaagcaggtgtactttctggggaacaagatacagatgctattgtacttctggatgtcaatccacttactatgggtattgaaacagttggaggtgtaatgactaagcttattccaagaaatactgtaattccgacgaaaaaatcgcaaatcttttctactgcatcagacaaccaacatacagtaaccattcaagtatatgaaggtgaacgtccaatgacaaaagataatcatcctcttggtaaatttgatcttactggcattccaccagcaccacgaggaataccacaaattgaagttactttcgaaatcgatgctaatggaattcttcaagtatctgctgaggataaaggaactggaaatcgtgaaaaaattgttattaccaacgatcaaaaccgccttacacccgatgatatagaaagaatgataaaggatgcagagaaatttgcagatgatgataaaaaattaaaagaacgagtagaagcacgtaacgaactcgaatcgtatgcatattccttgaaaaatcaattggccgataaagaaaaacttggctcaaaagtcagcgattccgacaaggcaaaaatggaagaagctattgatgaaaaaattaaatggctagaagaaaatgcagatactgatccagaagaatataagaaacaaaaaaaagagctaacagatattgttcagcctattattgccaaattgtatcaaggtgcaggtggtggagttccaccaactggtggagatgatgaagatctgaaagatgagctttaa

SEQ ID NO: 48209 - protein, 655 aa, Apis mellifera
MKGVKALFLLGLITFAFAKEEKQKEDIGTVIGIDLGTTYSCVGVYKNGRAEIIANDQGNRITPSYVAFTADGERLIGDAAKNQLTTNPENTVFDAKRLIGREWSDPTVQRDIKSFPFKVIEKNSKPHIRMVINGEEKVFAPEEISAMVLGKMKETAEAYLGKKVTHAVVTVPAYFNDAQRQATKDAGTISGLVVMRIINEPTAAAIAYGLDKKDGEKNVLVFDLGGGTFDVSLLTIDNGVFEVVATNGDTHLGGEDFDLRVMDHFTKLYKKKKGKDIRKDSRTLQKLRREVEKAKRALSVSHQVRIEIESFFEGEDFSETLTRAKFEELNMDLFRSTLKPVQKVLEDSDMNKKDVDEIVLVGGSTRIPKVQQLVKEFFGGKEPSRGINPDEAVAYGAAVQAGVLSGEQDTDAIVLLDVNPLTMGIETVGGVMTKLIPRNTVIPTKKSQIFSTASDNQHTVTIQVYEGERPMTKDNHPLGKFDLTGIPPAPRGIPQIEVTFEIDANGILQVSAEDKGTGNREKIVITNDQNRLTPDDIERMIKDAEKFADDDKKLKERVEARNELESYAYSLKNQLADKEKLGSKVSDSDKAKMEEAIDEKIKWLEENADTDPEEYKKQKKELTDIVQPIIAKLYQGAGGGVPPTGGDDEDLKDEL

SEQ ID NO: 48210 - DNA, 1923 bp, Candida glabrata CBS 138
  CDS (1)..(1923)
atgtctaaggctgttggtattgatttgggtactacttactcatgtgttgcacacttcgctaacgatcgtgttgaaattattgctaacgatcaaggtaacagaaccactccatcctatgttgctttcactgacactgagagattgattggtgatgctgctaagaaccaagctgctatgaacccacacaacactgtctttgacgctaagagacttatcggtagaaacttcaacgacaacgaagtccagactgatgccaagcacttcccattcaagttggttgatgttgatggtaagcctcagatcgaggttgagttcaagggtgagaccaagaagttcactccagaacaaatctcctccatggtcttgggtaagatgaaggaaaccgctgagcaattcttgggttccgccgtcaacgatgctgtcgtcaccgtcccagcttacttcaacgactctcaaagacaagccaccaaggatgctggtaccatcgctggtctaaacgtcttgcgtatcattaacgaaccaaccgctgccgctatcgcttacggtttggacaagaagggcggtgaagaaaacgtcctaatcttcgacttgggtggtggtactttcgatgtctccctattgtccatcgaagacggtatcttcgaagtcaaggccaccgctggtgacactcacttgggtggtgaagatttcgacaacagattggttaaccacttcgtccaagaattcaagagaaagaacaagaaggacttgtcctccaaccaaagagctatgagaagactaagaaccgcttgtgaaagagccaagagaactttgtcctcctccgctcaaacctccatcgaaatcgactccttgttcgaaggtatcgacttctacacctccatcaccagagctagattcgaagaattgtgtgctgacttgttcagatccactttggacccagtcgaaaaggttttgagagactctaagttggacaagtccgctgtccacgaaatcgtcttggtcggtggttccaccagaattccaaaggtccaaaagttggtcactgacttcttcaacggtaaggagccaaacagatccatcaacccagatgaagccgtcgcttacggtgctgctgtccaagccgctatcttgactggtgaccaatcctccaagacccaagacctattgttgttggatgtcgctccattgtcccttggtattgaaactgctggtggtgtcatgaccaagttgatcccaagaaactccactatcccaaccaagaagtccgagatcttctctacttacgctgacaaccaaccaggtgtcttgattcaagtcttcgaaggtgaaagagctaagacaaaggacaacaacttgctaggtaagttcgaattgtccggtatcccacctgccccaagaggtgtcccacaaatcgaagttaccttcgacgtcgactccaacggtatcttgaacgtctccgctgtcgaaaagggtactggtaagtctaacaagattaccatcaccaacgacaagggtagattgtccaaggaagatatcgaaagaatggttgctgaagccgaaaagttcaaggaagaagatgaaaaggaatctgaaagaattgcttccaagaaccaattggaatctatcgcttactccttgaagagctccatctccgaagccggtgacaagttggaagaagctgacaaggaagccgtctccaagaaggctgaagaagtcatccaatggttggacaacaacaccactgctactaaggaagaatacgacgaccaattgaaggaattgcaagaaattgctaacccaatcatgactaagttgtaccaagctggtggtgctccaggtggtgccggtgccgctggtggtttcccaggtggtgctcctccagctccagaagctgaaggtccaaccgtcgaagaagttgattaa

SEQ ID NO: 48211 - protein, 640 aa, Candida glabrata CBS 138
MSKAVGIDLGTTYSCVAHFANDRVEIIANDQGNRTTPSYVAFTDTERLIGDAAKNQAAMNPHNTVFDAKRLIGRNFNDNEVQTDAKHFPFKLVDVDGKPQIEVEFKGETKKFTPEQISSMVLGKMKETAEQFLGSAVNDAVVTVPAYFNDSQRQATKDAGTIAGLNVLRIINEPTAAAIAYGLDKKGGEENVLIFDLGGGTFDVSLLSIEDGIFEVKATAGDTHLGGEDFDNRLVNHFVQEFKRKNKKDLSSNQRAMRRLRTACERAKRTLSSSAQTSIEIDSLFEGIDFYTSITRARFEELCADLFRSTLDPVEKVLRDSKLDKSAVHEIVLVGGSTRIPKVQKLVTDFFNGKEPNRSINPDEAVAYGAAVQAAILTGDQSSKTQDLLLLDVAPLSLGIETAGGVMTKLIPRNSTIPTKKSEIFSTYADNQPGVLIQVFEGERAKTKDNNLLGKFELSGIPPAPRGVPQIEVTFDVDSNGILNVSAVEKGTGKSNKITITNDKGRLSKEDIERMVAEAEKFKEEDEKESERIASKNQLESIAYSLKSSISEAGDKLEEADKEAVSKKAEEVIQWLDNNTTATKEEYDDQLKELQEIANPIMTKLYQAGGAPGGAGAAGGFPGGAPPAPEAEGPTVEEVD

SEQ ID NO: 48212 - DNA, 1923 bp, Kluyveromyces lactis NRRL Y-1140
  CDS (1)..(1923)
atgtctaaggctgttggtattgatttgggtaccacttactcatgtgttgctcacttttctaacgaccgtgtcgaaattttggctaacgaccaaggtaacagaactaccccatcttttgtcgctttcaccgacactgaaagattgattggtgatgctgccaagaaccaagctgctatgaacccagccaacactgttttcgatgctaagcgtttgattggtagaaacttcagtgacgcagaagttcaaggtgatatcaagcacttcccattcaaggtcattgacgttgctggtaagccacaagtcgaagtcgaatacaagggtgaaaacaaggttttcaccccagaagaaatctcctctatgattttgagtaagatgaaggaaactgctgaatcttacttgggttgcaaggttaacgacgctgtcgttaccgttccagcttactttaacgattctcaaagacaagctaccaaggatgctggtaccattgctggtttgaacgttctaagaatcattaacgaacctaccgctgctgccattgcttacggtttggacaagaaagatgaaggcgaaaagaacgtcttgatcttcgatttgggtggtggtaccttcgatgtctccttgttgaccattgaagacggtatcttcgaagttaaggctaccgctggtgacactcacttgggtggtgaagatttcgataacagattagttaatcacttcgttcaagaattcaagagaaagaacaaaaaggacttgaccactaaccaaagagctttgagaagattgagaactgcttgtgaaagagctaagagaactttgtcctcttccgctcaaacttccatcgaaatcgactctttgttcgaaggtatcgatttatacacttctatcacaagagctagattcgaagaattgtgtggtgacttattcagatctactttagacccagttgaaaaggtcttgagagatgctaagttggacaaatctcaagttcatgaaatcgttctagttggtggttctaccagaattccaaaggtccagaagttggtctctgactacttcaacggtaaggaaccaaacagatccatcaacccagatgaagctgtcgcttacggtgctgccgttcaagctgctgttttgacaggtgaccaatcttctaagactcaagatttgttgttgttggatgttgctccattgtccttgggtattgaaactgctggtggtgtcatgaccaagttgattcctagaaactctaccattccaactaagaagtctgaaatcttctccacatacgctgataaccaaccaggtgtcttgatccaagtttacgaaggtgaaagagctagaacaaaggacaacaacttgttaggtaagttcgacttgactggtatcccaccagctccaagaggtgtcccacaaatcgaagttactttcgatgtcgatgctaacggtatcttgaacgtttctgccgttgaaaagggtactggtaaatctgaaaagattaccatcactaacgacaagggtagattgtctaaggaagatatcgaaagaatggtttctgaagctgaaaaatacaaggaagaagatgaaaaggaatcttccagaattgccgctagaaaccaattggaatccacttcttactctttgaagaacactttgtctgaagccgctgacaagatcgaagaagctgacaaggaaactttgactgctaagtgtgacgaagttatcgcttggttggatgccaacactcaagctactaccgaagaattcgaatctcaattgaaggaattgcaagaagtcgcgaacccaatcatgaccaagatgtaccaagccggtggtgctccaggtggtgccgctccaggtggtttcccaggtggtgctcctccagctccagaagctgaaggtccaaccgttgaagaagttgattaa

SEQ ID NO: 48213 - protein, 640 aa, Kluyveromyces lactis NRRL Y-1140
MSKAVGIDLGTTYSCVAHFSNDRVEILANDQGNRTTPSFVAFTDTERLIGDAAKNQAAMNPANTVFDAKRLIGRNFSDAEVQGDIKHFPFKVIDVAGKPQVEVEYKGENKVFTPEEISSMILSKMKETAESYLGCKVNDAVVTVPAYFNDSQRQATKDAGTIAGLNVLRIINEPTAAAIAYGLDKKDEGEKNVLIFDLGGGTFDVSLLTIEDGIFEVKATAGDTHLGGEDFDNRLVNHFVQEFKRKNKKDLTTNQRALRRLRTACERAKRTLSSSAQTSIEIDSLFEGIDLYTSITRARFEELCGDLFRSTLDPVEKVLRDAKLDKSQVHEIVLVGGSTRIPKVQKLVSDYFNGKEPNRSINPDEAVAYGAAVQAAVLTGDQSSKTQDLLLLDVAPLSLGIETAGGVMTKLIPRNSTIPTKKSEIFSTYADNQPGVLIQVYEGERARTKDNNLLGKFDLTGIPPAPRGVPQIEVTFDVDANGILNVSAVEKGTGKSEKITITNDKGRLSKEDIERMVSEAEKYKEEDEKESSRIAARNQLESTSYSLKNTLSEAADKIEEADKETLTAKCDEVIAWLDANTQATTEEFESQLKELQEVANPIMTKMYQAGGAPGGAAPGGFPGGAPPAPEAEGPTVEEVD

SEQ ID NO: 48214 - DNA, 1953 bp, Kluyveromyces lactis NRRL Y-1140
  CDS (1)..(1953)
atgtcaaaagctgttggtattgatttaggtactacttattcgtgtgttgcacatttcaccaacgatcgtgtggaaattattgccaacgatcaaggtaatagaacaactccatcttacgttgcctttaccgatacagaaagattgattggtgatgcagcaaagaaccaagctgctatcaacccatcaaacactgttttcgatgctaagcgtttgattggtcgtaaatatgatgatccagaagtacttaacgatgctaagcatttcccattcaagattgtcaacaaggatggtaagcccaacgttgaagttgaatacaagggtgaaactaaagtgttcagtccagaagaaatttcttctatggtcttaagtaagatgaaggaaaccgctgaagcttacttaggtaccaaagttaatgacgctgttgttaccgttccagcttatttcaacgattctcaaagacaagctaccaaggatgctggtaccattgctggtttgaacgtcttgagaattattaacgaacctactgctgctgccattgcgtacggtctagataagaagggaacttccgaacataacgtcttgatcttcgatttgggtggtggtactttcgatgtctccttgttgactattgaagacggtatcttcgaagttaaggccaccgcaggtgatactcacttaggtggtgaagattttgataacagattggttaatcatttggccaatgaattcaagagaaagaacaagaaggatttgaccaataaccaaagatctttgagaagattgagaactgctgctgaaagggctaagagagctttgtcttcttcatctcaaacatctattgaaatcgattctttattcgaaggtattgatttctacacttctctaacaagagctagatttgaagaattatgtggtgatttgttcagatccaccttagatccggttgaaaaagtcttgaaggattctaagttggacaagtctcaaatcgatgaaattgtccttgttggtggttctactagaattccaaaggtccaaaaattggtttctgatttcttcaacggtaaggaaccaaacagatctatcaatccagatgaggccgttgcctacggtgctgctgtccaagctgctattttgacaggtgatcaatcttcaaagactcaagatttgttgctattggatgttactccattgtctttgggtattgaaaccgccggtggtatcatgacgaagttgattccaagaaactctaccattccaaccaagaagtctgaaatcttctccacttatgctgataaccaacctggtgtgttgattcaagtgtttgaaggtgaaagaacaaagacaaaggataacaacttattgggtaagtttgagttgtctggtatcccaccagcaccaagaggtgtcccacaaatcgaagtcacctttgatatcgatgctaacggtatcttgaacgtttccgctctagagaagggtaccggtaagaccagcaagattactatcactaacgataagggtagattatccaaggaagatattgaaagaatggtgtcagaagccgagaagttcaaggtcgaagatgaagccgaagctgaacgtgtccaaacaagaaactctttggaagcttatgctttcagcttgaagaacactgtcggcgaatctggattcaaggagaaggttgatgctgatgacgtctccaaactacaaactgctgtggaagaaactatcagctggttagatggatctcaagcagcttccacagatgaatacaaggaaagacaaaaagaattggaggatgttgctaacccaatcatgaccaagttctacagcgctggcggtaccccagctggcggtgctccaggtggtgccccaggtggcttcccaggtgctccaggcggtggtgctgctccaggtggcggtgattccggtcctactgtcgaagaagttgattaa

SEQ ID NO: 48215 - protein, 650 aa, Kluyveromyces lactis NRRL Y-1140
MSKAVGIDLGTTYSCVAHFTNDRVEIIANDQGNRTTPSYVAFTDTERLIGDAAKNQAAINPSNTVFDAKRLIGRKYDDPEVLNDAKHFPFKIVNKDGKPNVEVEYKGETKVFSPEEISSMVLSKMKETAEAYLGTKVNDAVVTVPAYFNDSQRQATKDAGTIAGLNVLRIINEPTAAAIAYGLDKKGTSEHNVLIFDLGGGTFDVSLLTIEDGIFEVKATAGDTHLGGEDFDNRLVNHLANEFKRKNKKDLTNNQRSLRRLRTAAERAKRALSSSSQTSIEIDSLFEGIDFYTSLTRARFEELCGDLFRSTLDPVEKVLKDSKLDKSQIDEIVLVGGSTRIPKVQKLVSDFFNGKEPNRSINPDEAVAYGAAVQAAILTGDQSSKTQDLLLLDVTPLSLGIETAGGIMTKLIPRNSTIPTKKSEIFSTYADNQPGVLIQVFEGERTKTKDNNLLGKFELSGIPPAPRGVPQIEVTFDIDANGILNVSALEKGTGKTSKITITNDKGRLSKEDIERMVSEAEKFKVEDEAEAERVQTRNSLEAYAFSLKNTVGESGFKEKVDADDVSKLQTAVEETISWLDGSQAASTDEYKERQKELEDVANPIMTKFYSAGGTPAGGAPGGAPGGFPGAPGGGAAPGGGDSGPTVEEVD

SEQ ID NO: 48216 - DNA, 1926 bp, Kluyveromyces lactis NRRL Y-1140
  CDS (1)..(1926)
atgattgctgctaagagaattttgcaccgtaatgtcggtgttgctagacgtttacagtccactaaggttcaagggtctgtcattggtatcgatttgggtactaccaactcagctgttgctgtgatggaaggtaaggttccaaagattattgaaaatgctgaaggtgccagaactactccatctgttgttgctttcactaaggacggtgaacgtttggttggtattccagctaagcgtcaagctgttgttaacccagaaaacactttgtttgctaccaagagattgattggtcgtagattcgaagatgctgaagtgcaaagagatatcaagcaagttccatacaagattgtcaagcactccaacggtgatgcttggttggaagctagaggtcaaacttactctccagctcaaattggtggtttcgttttgaacaagatgaaggaaaccgctgaagcttacttgggtaagccagctaagaatgctgtcgttaccgtcccagcttacttcaacgattctcaaagacaagccaccaaggacgccggtcaaattgtcggtttgaatgtcttgcgtgttgttaacgaaccaactgccgctgccttggcctacggtttggaaaaatctgactctaaggtcgttgctgtcttcgatttgggtggtggtacctttgatatctctatcttggatatcgacaacggtgtcttcgaagtcaagtccactaacggtgacacccatttaggtggtgaagatttcgatatttacttgctaagagaaatcgttaagcaattcaagcaagaaactggtattgatttggaaaacgaccgtatggccattcaaagaatcagagaagctgctgaaaaggctaagatcgaattgtcttctactgtctccactgaaattaacttgccatttatcactgccgatgcctctggtccaaagcatatcaacattaagttctctagagctcaattcgaagccttgaccgaaccattggtcaagagaaccattgaccctgtcaagaaggctctgaaggatgctaacttggctacttccgatgtctctgacgttatcttggtcggtggtatgtccagaatgccaaaggtcgttgaaactgtcaagtcattgttcggtaaggaaccatccaaggccgtcaacccagatgaagccgtcgctatcggtgccgctattcaaggtgctgtcttggctggtgaagtcactgacgtcttgttattggatgttactccattgtccttgggtattgaaaccttgggtggtgtcttcactagattgattccaagaaacactactattccaaccaagaagtctcaaatcttctccactgctgctgctggtcaaacctccgtggaaatcagagttttccaaggtgaaagagaattggtcagagacaacaagttgatcggtaacttcactttgtctggtatcccaccagctccaaagggtgtcccacaaatcgaagtttctttcgatattgatgccgatggtatcatcaacgtctctgctagagacaaggcttccaacaaggatgcttccatcactgttgctggttcttccggtttgtccgaatctgaaatcgagcaaatggttagcgatgctgaaaagttcagagaacaagatgaaaccagaaagaaggctattgaaaccgccaacaagggtgaccaattggccaacgataccgaagcttctttgaaggaattcgaagaaaaattggacaaggctgaagctcaaaaggttaaggaccaagtcgctgctttgagagaattggtcgctagagttcaagccggtgaagaagtcgacgctgaagagttgaagaccaagactgaagaattacaaaccgcttccatgaagttgttcgaacaaatgtacaagaacgacgcttctaaccaacaaggtggtgaaccaaagcaataa

SEQ ID NO: 48217 - protein, 641 aa, Kluyveromyces lactis NRRL Y-1140
MIAAKRILHRNVGVARRLQSTKVQGSVIGIDLGTTNSAVAVMEGKVPKIIENAEGARTTPSVVAFTKDGERLVGIPAKRQAVVNPENTLFATKRLIGRRFEDAEVQRDIKQVPYKIVKHSNGDAWLEARGQTYSPAQIGGFVLNKMKETAEAYLGKPAKNAVVTVPAYFNDSQRQATKDAGQIVGLNVLRVVNEPTAAALAYGLEKSDSKVVAVFDLGGGTFDISILDIDNGVFEVKSTNGDTHLGGEDFDIYLLREIVKQFKQETGIDLENDRMAIQRIREAAEKAKIELSSTVSTEINLPFITADASGPKHINIKFSRAQFEALTEPLVKRTIDPVKKALKDANLATSDVSDVILVGGMSRMPKVVETVKSLFGKEPSKAVNPDEAVAIGAAIQGAVLAGEVTDVLLLDVTPLSLGIETLGGVFTRLIPRNTTIPTKKSQIFSTAAAGQTSVEIRVFQGERELVRDNKLIGNFTLSGIPPAPKGVPQIEVSFDIDADGIINVSARDKASNKDASITVAGSSGLSESEIEQMVSDAEKFREQDETRKKAIETANKGDQLANDTEASLKEFEEKLDKAEAQKVKDQVAALRELVARVQAGEEVDAEELKTKTEELQTASMKLFEQMYKNDASNQQGGEPKQ

SEQ ID NO: 48218 - DNA, 1962 bp, Debaryomyces hansenii CBS767
  CDS (1)..(1962)
atgacaaacgctattggtattgatttaggaacaacttactcgtgtgttgcacacttcacaaatgatagggtagaaattattgccaacgaccaaggtaatagaaccactccatcatatgttgcattcaccgactcagaaagattaattggtgatgctgctaggaatcaagcagccatgaatccaaccaacactgttttcgatgctaaaagattaattggtagaaaattcgctgatgaagatgttcaaagcgatcttaagcacttcccatttaagatcatagataaggcaggtaagccacaaatccaggttgaatttaagggggaagttaagactttttcaccagaagaaatttcctcaatggttttggttaagatgaaggaaacagccgaaagctacttaggtggtgaagttaaggatgcggtagttacagttccagcttacttcaatgactcgcaaagacaggcgacgaaggatgctggtttaattgcgggtttgaatgttacaagaatcatcaatgagccaactgcagctgcaattgcatacggtttggacaagaagggatcatcggcccacgaaaagaacgttttgattttcgatttgggtggtggtacttttgatgtttctttgttagccattgatgaaggtattttcgaagttaaggccactgctggtgacacacacttgggtggtgaagatttcgataacagattagtaaaccactttgtaaacgaattcaagagaaagaataagaaggatttgtctactaatcaaagagcattgaggagattgagaactgcttgtgaaagggctaagagatctttatcatcttcagctcaaacatcgattgaaatcgactcgttatttgaaggtgtcgacttctacacatctattactagagctagatttgaagaattatgtggtgatttattcagaaccaccatggaccctgttgaaaaggtcttgaaggatgctaaggttgataaatcacagatccatgatatcgttcttgttggtggttctacaagaatcccaaagattcaaaagttagttactgactttttcaacggtaaggaaccaagtaagtctattaacccagatgaggccgttgcgtatggagctgctgttcaggctgccatcttatcaggtgacacttcatctaagactcaagacttgttgttattagacgttgctccattatcattaggtattgaaactgctggtggagttatgactaagttaattccaagaaatgcaacaattccaacaaagaagtctgaaactttctctacttatgctgacaaccaaccaggtgttttgattcaagttttcgaaggtgaaagagccaaaactaaggataacaacttgttaggtaaattcgaattatcgggtatccctcctgctccaagaggtgtaccacaaattgaagttacttttgatattgatgcaaatggtatcttgaatgtttctgccttagaaaagggtaccggtaagactcaaaagattactattactaacgataagggtaggttatccaaggaggaaattgaaagaatggtttcagaggcagaaaaatacaaggaagaagatgaaaaggaagccgcaagaattcaatctaagaacactttggaatcttacacttattctttaaagaacactattgatgatggtgaaatgaaagataagattggggaagaagacaaagaaaaattatcgaagcaaattgaagaaactatcgcatggttggactcatcacaaacagcgacacaggaagagtatgatgataaacataaggagttagaaggaattgctaatccaattatttctgctgcctattctgctgctggtggcgcccctccaggtggtgctcctccaggcggcaaccatccaggaagtttctctacggatgaagccactggtggtggagctggtggtgacggcccaactgtcgaagaagtcgattaa

SEQ ID NO: 48219 - protein, 653 aa, Debaryomyces hansenii CBS767
MTNAIGIDLGTTYSCVAHFTNDRVEIIANDQGNRTTPSYVAFTDSERLIGDAARNQAAMNPTNTVFDAKRLIGRKFADEDVQSDLKHFPFKIIDKAGKPQIQVEFKGEVKTFSPEEISSMVLVKMKETAESYLGGEVKDAVVTVPAYFNDSQRQATKDAGLIAGLNVTRIINEPTAAAIAYGLDKKGSSAHEKNVLIFDLGGGTFDVSLLAIDEGIFEVKATAGDTHLGGEDFDNRLVNHFVNEFKRKNKKDLSTNQRALRRLRTACERAKRSLSSSAQTSIEIDSLFEGVDFYTSITRARFEELCGDLFRTTMDPVEKVLKDAKVDKSQIHDIVLVGGSTRIPKIQKLVTDFFNGKEPSKSINPDEAVAYGAAVQAAILSGDTSSKTQDLLLLDVAPLSLGIETAGGVMTKLIPRNATIPTKKSETFSTYADNQPGVLIQVFEGERAKTKDNNLLGKFELSGIPPAPRGVPQIEVTFDIDANGILNVSALEKGTGKTQKITITNDKGRLSKEEIERMVSEAEKYKEEDEKEAARIQSKNTLESYTYSLKNTIDDGEMKDKIGEEDKEKLSKQIEETIAWLDSSQTATQEEYDDKHKELEGIANPIISAAYSAAGGAPPGGAPPGGNHPGSFSTDEATGGGAGGDGPTVEEVD

SEQ ID NO: 48220 - DNA, 1947 bp, Debaryomyces hansenii CBS767
  CDS (1)..(1947)
atgtcaaaagctgttggtattgatttaggtacaacctactcttgtgttgctcacttcgctaacgatagagtcgaaattatcgctaacgaccaaggtaacagaaccactccatctttcgttgcattcactgactctgaaagattaattggtgatgctgctaagaatcaagctgctatgaacccttctaacaccgttttcgatgctaagagattgatcggtagaaagttcagcgacgctgaagttaccgaagatgctaagcacttcccattcaagatcgttgaaagatctggtaagccacacatcgaagtcgaatacaagggtgaaaacaaggttttcactccagaagaaatttcttctatggtcttaagtaagatgaaggaaaccgctgaaggttacttaggtgaaaaggttaacgacgctgttgttaccgttccagcttacttcaatgactcccaaagacaagctaccaaggatgctggtttgattgctggtttaaacgttatgagaatcattaacgaaccaactgccgctgctatcgcttacggtttagacaagaaggacgccgaagaaaagaacgttttaattttcgatttaggtggtggtactttcgatgtctctttattatctattgaagatggtattttcgaagtcaagtctaccgctggtgacactcacttgggtggtgaagatttcgatcacagattagttaaccactttgttaacgaattcaagagaaagaacaagaaggacttatctactaaccaaagagctttaagaagattgagaaccgcttgtgaaagagctaagagaaccttatcttcttccgctcaaacttccattgaaatcgattccttatacgaaggtgttgacttctacacttctatcaccagagctagattcgaagaattatgtcaagatttattcagatccactatcgacccagtcgaaaaggtcttaagagatgctaaggttgacaagtctttagttcacgaaatcgtcttagtcggtggttctaccagaattccaaaggtccaaaaattagtctctgacttcttcaacggtaaggaaccaaacagatctatcaacccagatgaagccgttgcttacggtgccgctgtccaagctgctatcttatctggtgacacttcatctaagactcaagatttattgttattagatgttgctccattatctatgggtattgaaaccgctggtggtatcatgaccaagttgattccaagaaactctactatcccaaccaagaagtctgaaactttctccacttacgctgacaaccaaccaggtgtcttaattcaagtctttgaaggtgaaagagctaagacccaagataacaacttattaggtaagttcgaattatccggtattcctccagcaccaagaggtgttccacaaattgaagttaccttcgatgttgatgctaatggtatcttaaacgtctccgccttagaaaagggtaccggtaagactcaaaagattactattactaacgacaagggtagattatctaaggaagatatcgaaagaatggtttctgatgccgaaaaattcaaggatgaagatgaaaaggaagctggtagagtccaagccaagaacgctttagaatcttacgcttactccttaaagtctaccttaggtgaagaacaattcaaggaaaagttagatgctgctgaaatcgaagaagtcaccaaggctgctgacgaaaccattgaatggttagactccaacacaactgccactcaagaagaattctctgacaaacaaaaggaattagaaggtaaggccaacccaattatggctaaggcttaccaagccggtgctgctccaggtggtgctgaaggtgccgctccaggtggtttcccaggtgctccaggcggtgctgctccagatgcttctgctgacggtccaactgttgaagaagttgattaa

SEQ ID NO: 48221 - protein, 648 aa, Debaryomyces hansenii CBS767
MSKAVGIDLGTTYSCVAHFANDRVEIIANDQGNRTTPSFVAFTDSERLIGDAAKNQAAMNPSNTVFDAKRLIGRKFSDAEVTEDAKHFPFKIVERSGKPHIEVEYKGENKVFTPEEISSMVLSKMKETAEGYLGEKVNDAVVTVPAYFNDSQRQATKDAGLIAGLNVMRIINEPTAAAIAYGLDKKDAEEKNVLIFDLGGGTFDVSLLSIEDGIFEVKSTAGDTHLGGEDFDHRLVNHFVNEFKRKNKKDLSTNQRALRRLRTACERAKRTLSSSAQTSIEIDSLYEGVDFYTSITRARFEELCQDLFRSTIDPVEKVLRDAKVDKSLVHEIVLVGGSTRIPKVQKLVSDFFNGKEPNRSINPDEAVAYGAAVQAAILSGDTSSKTQDLLLLDVAPLSMGIETAGGIMTKLIPRNSTIPTKKSETFSTYADNQPGVLIQVFEGERAKTQDNNLLGKFELSGIPPAPRGVPQIEVTFDVDANGILNVSALEKGTGKTQKITITNDKGRLSKEDIERMVSDAEKFKDEDEKEAGRVQAKNALESYAYSLKSTLGEEQFKEKLDAAEIEEVTKAADETIEWLDSNTTATQEEFSDKQKELEGKANPIMAKAYQAGAAPGGAEGAAPGGFPGAPGGAAPDASADGPTVEEVD

SEQ ID NO: 48222 - DNA, 1947 bp, Yarrowia lipolytica CLIB122
  CDS (1)..(1947)
atgtccaaagcagtaggaattgatcttggaaccacatactcttgtgtggcccacttcgccaacgaccgggtcgagattatcgccaacgaccagggtaaccgaaccaccccctctttcgttgccttcactgacactgagcgactcattggtgatgctgccaagaaccaggctgccatgaaccccgtcaacaccgtcttcgacgccaagcgactcattggacgaaagttcaccgacgaggaggtccagactgatgccaagcacttccccttcaagattgtcgacaaggccggcaagcccaacattgaggtcgagttcaagggtgagaccaaggtcttcacccccgaggagatctcctccatgatcctcaccaagatgaaggagaccgctgagggctacctcggtggaaaggtcaccgacgctgtcatcaccgtccctgcctacttcaacgactcccagcgacaggccaccaaggacgctggtctgattgccggacttaacgtccagcgaatcatcaacgagcctaccgccgctgccattgcctacggtcttgacaagaaggaggagggtgagcgaaacgttctcatcttcgatcttggtggaggaaccttcgatgtctccctcctctctatcgaggatggtatcttcgaggtcaaggccaccgctggtgacacccatcttggtggtgaggatttcgataaccgactcgtcaaccacttcgtccaggagttcaagcgaaagcagaagaaggacatctccaccaaccagcgagctctgcgacgactgcgaaccgcttgtgagcgagctaagcgaactctgtcttcttccgcccagacctccatcgagatcgactctctctacgagggtattgacttctacacctccattactcgagcccgattcgaggagctgtgtcaggatctcttccgaggaactctcgagcccgtcgagaaggtcctccgagacgccaagatggacaagtcttccgtcaacgagattgtccttgtcggaggttccacccgaatccctaaggtccagaagcttgtttctgactacttcaacggcaaggagcccaaccgatccatcaaccccgatgaggctgttgcttacggagctgctgtccaggctgctatcctgtctggtgacacctcttccaagacccaggatctgctcctgcttgatgttgctcccctctctctcggtatcgagactgccggtggtgtcatgaccaagctcatcccccgaaactccaccatccccaccaagaagtccgagaccttctccacctacgctgacaaccagcccggtgtgctgatccaggtctttgagggtgagcgagcccagaccaaggataacaacattctcggcaagttcgagctgaccggtattccccctgctccccgaggtgtcccccagattgaggtcaccttcgacgttgatgccaacggtatcctgaacgtttccgctgtcgagaagggcaccggaaagacccagcagatcaccatcaccaacgacaagggccgactttccaaggaggacattgagcgaatggtctccgaggccgagaagtacaaggacgaggacgagaaggaggctgctcgaatcgccgccaagaacggtctcgagtcctacgcctactctctcaagaacactctctccgaggagaagttcaaggagaaggtcgacgaggctgaccgagagaagctcgagaaggccatcaacgagaccattgagttccttgactccactcagtccggtgccaccgaggagtactccgacaagcagaaggagctcgagggtgttgctaaccccattctcatgaagttctacggagctgagggtggagctcccggcggaatgcccggtggagcccctggtggattccccggcgccggtgagggtgctgcccctggtggcggcgagggccccaccgttgaggaggttgactaa

SEQ ID NO: 48223 - protein, 648 aa, Yarrowia lipolytica CLIB122
MSKAVGIDLGTTYSCVAHFANDRVEIIANDQGNRTTPSFVAFTDTERLIGDAAKNQAAMNPVNTVFDAKRLIGRKFTDEEVQTDAKHFPFKIVDKAGKPNIEVEFKGETKVFTPEEISSMILTKMKETAEGYLGGKVTDAVITVPAYFNDSQRQATKDAGLIAGLNVQRIINEPTAAAIAYGLDKKEEGERNVLIFDLGGGTFDVSLLSIEDGIFEVKATAGDTHLGGEDFDNRLVNHFVQEFKRKQKKDISTNQRALRRLRTACERAKRTLSSSAQTSIEIDSLYEGIDFYTSITRARFEELCQDLFRGTLEPVEKVLRDAKMDKSSVNEIVLVGGSTRIPKVQKLVSDYFNGKEPNRSINPDEAVAYGAAVQAAILSGDTSSKTQDLLLLDVAPLSLGIETAGGVMTKLIPRNSTIPTKKSETFSTYADNQPGVLIQVFEGERAQTKDNNILGKFELTGIPPAPRGVPQIEVTFDVDANGILNVSAVEKGTGKTQQITITNDKGRLSKEDIERMVSEAEKYKDEDEKEAARIAAKNGLESYAYSLKNTLSEEKFKEKVDEADREKLEKAINETIEFLDSTQSGATEEYSDKQKELEGVANPILMKFYGAEGGAPGGMPGGAPGGFPGAGEGAAPGGGEGPTVEEVD

SEQ ID NO: 48224 - DNA, 1923 bp, Apis mellifera
  CDS (1)..(1923)
atgtcgaaggcaccagcagttggaattgatttaggcactacttattcttgcgtgggtgttttccagcatggaaaagttgaaatcattgcaaatgatcaaggaaatcgaacgacaccgagttatgtcgccttcacggacacagaaagattgattggcgatgcggccaaaaatcaggtcgcaatgaacccgaacaacactatttttgatgcgaaaagattgatcggtcgtcgcttcgatgatacaacagtacaaagtgatatgaaacattggccattcacggtgatgaacgatggaggaaaaccaaagatcaaggtttcgtataaaggtgaaacgaagactttcttccccgaagaagtgtcttcgatggtgctcacgaaaatgaaggaaactgcagaagcctatttaggaaaaatagttaccaatgccgttattaccgtcccagcatatttcaatgattcgcaaaggcaagctaccaaagacgcgggagcgatagcaggcttaaacgttttaagaataattaatgaaccaaccgcggcggcgattgcttatggcttggataaaaaaaccgcaggtgaaaagaatgtactgatcttcgacttgggaggtggcacctttgatgtgtccatattgaccatcgaagatggcatctttgaagtgaagtcaacagcgggcgatacccatcttggtggtgaagacttcgataatcggatggtgaatcacttcgtccaggagttcaagagaaaatacaagaaagacttaagttcgaataagagggcccttagacgattgagaactgcttgcgagagagcgaagagaactttaagctcttcaacacaggccagtattgagatcgattctcttttcgaggggattgatttctacacgtcgatcaccagagcaagatttgaagaactttgcgcggatctattcagaagcactctggaaccggttgaaaaggctttgagagatgccaagatggacaaagctcatgttcacagtatcgtcttagtcggtggttctaccagaataccaaagattcaaaaattactgcaggactttttcaatggaaaagaattgaacaaatcgatcaatcctgatgaagctgttgcttatggcgcagctgtacaggccgctattttgcacggtgacaagtctcaagaagttcaggatctgttgctactggatgtcactccattgtcattgggtatagaaacagctggtggtgtgatgacaactttgatcaagaggaacacgaccataccaaccaagcaaacgcaaaccttcactacctattccgataatcaacctggcgtcttgattcaagtatacgaaggagagagagctatgacaaaagataataatattcttggaaagtttgaacttactggcattccacctgcacctagaggtgtacctcaaattgaggtcacatttgacatcgatgctaatggtattctgaatgtatccgcaattgaaaaatcaactggaaaggagaacaagatcaccatcacaaatgataaaggtcgattgtcaaaagaagatatcgagagaatggtgaacgaagcagaaagataccgtaatgaagatgaacaacaacgcgaaagaataactgccaaaaatgcattagaatcttattgtttcaatatgaagagtacaatggaagatgagaagatcaaagataagatcgattcgacggaaaaagaaaaggtcatcaataagtgcaacgaagtgatttcatggttggatgcaaatcaattggcagagaaggaagaattcactgataagcagaaagaactagaatccgtttgcaatcctgttgtcactaaattatatcagggaggagcaacacctggaggcttccatccaggtgctgctggaggaggcggtggtgctggaggaccaaccatcgaagaagtagactaa

SEQ ID NO: 48225 - protein, 640 aa, Apis mellifera
MSKAPAVGIDLGTTYSCVGVFQHGKVEIIANDQGNRTTPSYVAFTDTERLIGDAAKNQVAMNPNNTIFDAKRLIGRRFDDTTVQSDMKHWPFTVMNDGGKPKIKVSYKGETKTFFPEEVSSMVLTKMKETAEAYLGKIVTNAVITVPAYFNDSQRQATKDAGAIAGLNVLRIINEPTAAAIAYGLDKKTAGEKNVLIFDLGGGTFDVSILTIEDGIFEVKSTAGDTHLGGEDFDNRMVNHFVQEFKRKYKKDLSSNKRALRRLRTACERAKRTLSSSTQASIEIDSLFEGIDFYTSITRARFEELCADLFRSTLEPVEKALRDAKMDKAHVHSIVLVGGSTRIPKIQKLLQDFFNGKELNKSINPDEAVAYGAAVQAAILHGDKSQEVQDLLLLDVTPLSLGIETAGGVMTTLIKRNTTIPTKQTQTFTTYSDNQPGVLIQVYEGERAMTKDNNILGKFELTGIPPAPRGVPQIEVTFDIDANGILNVSAIEKSTGKENKITITNDKGRLSKEDIERMVNEAERYRNEDEQQRERITAKNALESYCFNMKSTMEDEKIKDKIDSTEKEKVINKCNEVISWLDANQLAEKEEFTDKQKELESVCNPVVTKLYQGGATPGGFHPGAAGGGGGAGGPTIEEVD

SEQ ID NO: 48226 - DNA, 2025 bp, Aspergillus nidulans FGSC A4
  CDS (1)..(2025)
atggcgcgtccctcttcaggccgcggtgtggccaagccgttcgcgacttggaccactatcttctaccttctccttgtcttcatcgcgcctctcgcgttctttggatccgcccacgcccaggaagatgattcagtgcaggaaaactatggaacggttattggtattgatttgggaacaacttactcttgtgttggtgtgatgcagaacggaaaagtcgaaattctcgtcaacgaccaaggaaaccgaatcactccttcctacgtcgcctttacagatgaggagcgtctggtcggtgatgctgcgaagaaccaatacgccgccaatcccaagaggacaatctttgatatcaagcgtcttattggtcgcaagtacgacgaggccgatgttcagcgtgatatcaagaactatcctttcaaggttgtcaacaaggatggaaagcccaacgtcaaggttgatgtcaaccagactcccaagacgctcagtcccgaggaggtttctgccatggttcttggcaagatgaaggaaatcgccgagggctaccttggaaagaaggttacccacgctgtcgtcactgtcccggcctacttcaacgacgcccagagacaagctaccaaggatgctggcactattgccggtcttaacgtcctccgtgttgtcaacgaacccaccgccgctgcgattgcctatggtttggacaagggcagcgaggagcgccaggtcatcgtctatgatcttggtggtggtacctttgatgtcagtcttctttcgatcgatgacggtgttttcgaggttctggccacggctggagacgtccatcttggaggtgaggacttcgaccaccgggtcatggaccacttcgtcaagcagtacaacaagaagaacaacgtcgatgtcaccaaggacctaaaagccatgggtaagctcaagcgtgaagtcgagaaggccaagcgtactctgtcttcccagatgtccacccgcattgagattgaggcgttccacaatggtcaggacttctccgagactttgacccgcgccaagtttgaggagctgaacatggacctgttcaagaagaccctgaagcccgttgagcaggtgctcaaggatgccaaggtgtccaaggctgatattgacgacattgtccttgttggtggttccactcgtattcctaaggttcaggctatgctggaggagttcttcgacggcaagaaggctagcaagggtatcaaccccgatgaggctgtcgctttcggtgccgccgttcagggtggtgttctgtctggtgttgagggtaccgaaagcattgttctcatggacgtcaaccctcttactctcggtattgagactaccggtggtgttatgaccaagctcatcccccgcaacactgtcattcctactcgcaagtcgcagatcttctcgactgccgctgacaaccagcctactgttctcatccaagtttacgaaggagagcgtactcttaccaaagctaacaacctccttggcaagttcgaacttaccggcattcctcccgctcctcgcggtgttcctcaaattgaggtttccttcgacttggacgccaacggtatcctgaaggtcggcgctagcgacaagggcactggcaaggccgaatctatcaccatcaccaacgacaagggtcgtcttacccaggaagagattgaccgcatggttgccgaggccgaggagttcgctgaggaagaccgtgctatcaaggccaagattgaggcccgtaacagcctggagaactatgccttcagcctcaagaaccaagttaacgatgagaacggccttggtggccagattgatgaggacgacaagcagaccattctggatgctgtcaaggaagtgaacgactggcttgaggagaacggtgcctcggccactactgaggactttgaggagcagaaggaacagctgtcaaacgtggcgtaccctatcaccagcaagctgtacggctctgctcctcctaccgaggaggacgatgacgagtatggccatgatgaattgtaa

SEQ ID NO: 48227 - protein, 674 aa, Aspergillus nidulans FGSC A4
MARPSSGRGVAKPFATWTTIFYLLLVFIAPLAFFGSAHAQEDDSVQENYGTVIGIDLGTTYSCVGVMQNGKVEILVNDQGNRITPSYVAFTDEERLVGDAAKNQYAANPKRTIFDIKRLIGRKYDEADVQRDIKNYPFKVVNKDGKPNVKVDVNQTPKTLSPEEVSAMVLGKMKEIAEGYLGKKVTHAVVTVPAYFNDAQRQATKDAGTIAGLNVLRVVNEPTAAAIAYGLDKGSEERQVIVYDLGGGTFDVSLLSIDDGVFEVLATAGDVHLGGEDFDHRVMDHFVKQYNKKNNVDVTKDLKAMGKLKREVEKAKRTLSSQMSTRIEIEAFHNGQDFSETLTRAKFEELNMDLFKKTLKPVEQVLKDAKVSKADIDDIVLVGGSTRIPKVQAMLEEFFDGKKASKGINPDEAVAFGAAVQGGVLSGVEGTESIVLMDVNPLTLGIETTGGVMTKLIPRNTVIPTRKSQIFSTAADNQPTVLIQVYEGERTLTKANNLLGKFELTGIPPAPRGVPQIEVSFDLDANGILKVGASDKGTGKAESITITNDKGRLTQEEIDRMVAEAEEFAEEDRAIKAKIEARNSLENYAFSLKNQVNDENGLGGQIDEDDKQTILDAVKEVNDWLEENGASATTEDFEEQKEQLSNVAYPITSKLYGSAPPTEEDDDEYGHDEL

SEQ ID NO: 48228 - DNA, 2001 bp, Aspergillus nidulans FGSC A4
  CDS (1)..(2001)
atgctgtcatcccgtctctcacgcgcgctgccgcgcactgccccctttgctcgtgctcctgctttcagacttcccagcacagctgcccggagatggaactcaacagaggagaaggtgaagggccaggtcatcggtattgacttgggtaccaccaactctgctgttgctgtcatggagggcaagacccccaagatcattgagaacgctgaaggtgcccgcacaacaccctccgttgtcgctttcgcccaggacggcgagcgtctcgtcggtattgccgccaagcgccaggctgttgtcaaccctgaaaacactctgttcgccaccaagcgtcttatcggtcgtaagttcaccgatgctgaggtccagcgtgatatcaaggaggtcccctacaagatcgtccagcacaccaatggtgatgcctgggttgaggctcgcggagagaagtactctcctgcccagatcggtggtttcgttctgggcaagatgaaggagaccgctgagaactacctcagcaagcccgtcaagaatgctgttgttactgtccctgcctacttcaacgactcccagcgtcaggccaccaaggacgccggtcagatcgccggtctcaacgtcctccgtgtcgttaacgaacccaccgccgctgcccttgcttacggtcttgagaaggaggctgaccgcgttgtcgccgtctacgatcttggtggtggtaccttcgatatctccgttctcgaaattcagaagggtgttttcgaggttaagtccacgaacggtgacacccaccttggtggtgaggacttcgatatcagccttgtgcgccacattgttcagcagttcaagaaggagtctggcctcgacctttccaacgaccgcatggctatccagcgtattcgtgaggctgctgagaaggccaagattgagctgtcttcttctctccagactgagatcaaccttcctttcatcactgctgatgccagcggtgctaagcacatcaacctcaagatgacccgtgctcagctcgagtctcttgttgagcctctcatcagccgcactgttgaccccgtgcgcaaggcccttaaggacgccaacctccagtccagcgaggttcaggacatcatcctcgtcggtggtatgacccgtatgcccaaggtcactgagtctgttaagtctctgttcggtcgtgagcccgctaagtccgtcaaccccgatgaggctgttgccattggtgctgcgatccagggtgctgtccttgccggtgaggttactgacgttcttctcctcgacgtcacccctctgtctctcggtattgagactctcggtggtgtcttcactcgtctgatcaaccgcaacactaccatccctaccaagaagtcgcagaccttctctactgctgctgacttccagactgccgtcgagatcaaggtcttccagggtgagcgtgagcttgtcaaggacaacaagctccttggaaacttccagcttgttggcattcctcctgcccaccgtggtgtccctcagatcgaggtcaccttcgacattgacgctgactccattgtccacgtccacgcgaaggacaagtccaccaacaaggaccagtccatcaccattgcctctggctccggtctctccgacgccgagatccagtccatggttgaggatgctgagaagtatggtgctcaggacaaggagcgcaaggcggccattgaggctgccaaccgtgccgacagcgtcctgaacgacactgagaaggctctcaaggaattcgaggaccgtcttgacaaggctgaggctgagcagatccgtgagaagatcaacaccctccgtgaattcgttgccaagaaccagtctggtgaagtcgctgctaccgctgaggagctcaagcagaagaccgatgagctccagactgccagcttgaccctcttcgacaagatgcacaaggcccagtctgagcagcagcagcagcccaaccagggcgagaccggccagggtgagaacaagccctaa

SEQ ID NO: 48229 - protein, 666 aa, Aspergillus nidulans FGSC A4
MLSSRLSRALPRTAPFARAPAFRLPSTAARRWNSTEEKVKGQVIGIDLGTTNSAVAVMEGKTPKIIENAEGARTTPSVVAFAQDGERLVGIAAKRQAVVNPENTLFATKRLIGRKFTDAEVQRDIKEVPYKIVQHTNGDAWVEARGEKYSPAQIGGFVLGKMKETAENYLSKPVKNAVVTVPAYFNDSQRQATKDAGQIAGLNVLRVVNEPTAAALAYGLEKEADRVVAVYDLGGGTFDISVLEIQKGVFEVKSTNGDTHLGGEDFDISLVRHIVQQFKKESGLDLSNDRMAIQRIREAAEKAKIELSSSLQTEINLPFITADASGAKHINLKMTRAQLESLVEPLISRTVDPVRKALKDANLQSSEVQDIILVGGMTRMPKVTESVKSLFGREPAKSVNPDEAVAIGAAIQGAVLAGEVTDVLLLDVTPLSLGIETLGGVFTRLINRNTTIPTKKSQTFSTAADFQTAVEIKVFQGERELVKDNKLLGNFQLVGIPPAHRGVPQIEVTFDIDADSIVHVHAKDKSTNKDQSITIASGSGLSDAEIQSMVEDAEKYGAQDKERKAAIEAANRADSVLNDTEKALKEFEDRLDKAEAEQIREKINTLREFVAKNQSGEVAATAEELKQKTDELQTASLTLFDKMHKAQSEQQQQPNQGETGQGENKP

SEQ ID NO: 48230 - DNA, 1947 bp, Candida albicans SC5314
  CDS (1)..(1947): transl_table=12
atgttatctgctagaaattcattgaagaatattagtcgtcaatttcctaaagcactcactcgtgctcaatccactgctgccgctccaaccggtccagttattggtattgatttaggtaccaccaactcagctgttgctgtgatggaaggtaagaccccaaagattttagaaaactctgaaggtggaagaactactccatccattgttgctttcactaaagatggtgaaagattagttggtattcctgctaaacgtcaagctgttgtcaacccaagtgacactttgtttgccaccaaacgtttgattggtcgtcgttacgaagacccagaagtccaaagagatattaaccaagttccatacaagatcgtcaaacacggtaatggtgatgcttggttagaagctagaggtgaacaatattccccacaacaaattggtggtttcattttgaacaagatgaaagaaactgctgaagctgctttgagcaaaaaagtcaacagtgctgttgtcacttgtcctgcctatttcaatgatgctcaaagacaagccaccaaggatgctggtaaaattgttggtttgaatgttttgagagtcatcaatgaaccaacagctgctgccttagcctatggtttggaaaagaaagatggtgaagttgtcgccgtttttgatttgggtggtggtacttttgatgtttctatcttagatattggagctggtgttttcgaagtcaaatctaccaatggtgacactcatttgggtggtgaagatttcgatattgctttggtcagatacattgttgatgccttcaagaaagaatctggtatcgatttagaaaaagacaagatggccattcaaagaatcagagaagctgctgaaaaagccaagattgaattgtcttctactgtttcaactgagatcaacttgccattcatcactgccgatgcttccggtccaaaacacattaaccaaaaaatttcaagagctcaattcgaacaattagtcgaaccattgatcaagaaaaccatcgaaccatgtaaaaaggctttgaaggatgctggtttatccacctccgatgtttctgaagttatccttgtcggtggtatgtcaagaatgccaaaggttgttgaaactgtcaaatctatttttggtaaagaaccatctaaaggtatcaaccctgatgaagctgttgctatgggtgctgccatccaaggtggtattttagctggtgaagttaaagatgttgttttgttagatgttaccccattgtctttgggtattgaaaccatgggtggtgttttcgccagattgatttctagaaacactactattccagccaagaaatctcaaatcttctctactgctgctgctggtcaaacttctgtcgaaatcagagtgttccaaggtgaaagagaattaaccagagacaacaaattgattggtaactttactttgtctggtattccaccagctccaaaaggtgttccacaaattgaagttacttttgacattgacactgatggtattattaaggtttctgctcgtgataaggctaccaacaaagatgcttctattaccgttgctggttcatctggtttgtccgatgctgaaattgaaaaaatggttaacgatgctgaaaaattcgctgaatcagacaaagccagaagagaagccattgaatttgccaacagagccgatcaattatgtaacgataccgaaaactcattgaatgaacacaaagaaaaattgtctagtgaatcagttcaaaaagtccaagatcaaatccaacaattgagagaaattgtcttgaaagcacaagccggtgaagaagtttcaccagaagaattgaaacaaaagactgaagaattacaaaacgaagccatcaaccttttcaaagacttgtacaaagacggtggtgaatcatctggttcttctgaacaaccaaagaactaa

SEQ ID NO: 48231 - protein, 648 aa, Candida albicans SC5314
MLSARNSLKNISRQFPKALTRAQSTAAAPTGPVIGIDLGTTNSAVAVMEGKTPKILENSEGGRTTPSIVAFTKDGERLVGIPAKRQAVVNPSDTLFATKRLIGRRYEDPEVQRDINQVPYKIVKHGNGDAWLEARGEQYSPQQIGGFILNKMKETAEAALSKKVNSAVVTCPAYFNDAQRQATKDAGKIVGLNVLRVINEPTAAALAYGLEKKDGEVVAVFDLGGGTFDVSILDIGAGVFEVKSTNGDTHLGGEDFDIALVRYIVDAFKKESGIDLEKDKMAIQRIREAAEKAKIELSSTVSTEINLPFITADASGPKHINQKISRAQFEQLVEPLIKKTIEPCKKALKDAGLSTSDVSEVILVGGMSRMPKVVETVKSIFGKEPSKGINPDEAVAMGAAIQGGILAGEVKDVVLLDVTPLSLGIETMGGVFARLISRNTTIPAKKSQIFSTAAAGQTSVEIRVFQGERELTRDNKLIGNFTLSGIPPAPKGVPQIEVTFDIDTDGIIKVSARDKATNKDASITVAGSSGLSDAEIEKMVNDAEKFAESDKARREAIEFANRADQLCNDTENSLNEHKEKLSSESVQKVQDQIQQLREIVLKAQAGEEVSPEELKQKTEELQNEAINLFKDLYKDGGESSGSSEQPKN

SEQ ID NO: 48232 - DNA, 2064 bp, Candida albicans SC5314
  CDS (1)..(2064): transl_table=12
atgagatcatcacaatcttcttggttaccacgtattggtttattatatgtggcgttagttatacttataccatttttggtttcaccgaagcacgcatttgcggttgctgcagtgagcgatgatgaatcctcgacagataattatggtacagtcattggtatagatttgggtaccacttattcctgtgttggtgttatgaaaaacggtaaggttgaaattttggccaacgatcaaggtaatagaatcactccatcatacgtgtcgttcaatggcgatgaaagattggttggagacgctgccaagaatcaagcttcctctaatgtcaacaacactgttttcgatattaaaagattgattggtttgaaatataatgatgacactgtgcaaaaggaacttaaacatttgccttacaaaattgaaaataagggtaacaaaccagttgttaaagttgaataccaaggtgaagaaaaaactttctcccctgaagaaatttcatctatggttttgggtaaaatgaagagtattgctgaagattaccttggcaaaaaagttactcatgccgttgtcactgttccagcttatttcaacgatgctcaaagacaagctactaaagatgccggtactattgctggtttgaacgttttgagaattgtcaatgaacctactgctgccgctattgcctatggattagacaaaggcgaccaagaaaaacaaattattgtttacgatttgggtggtggtacttttgatgtttctttattgtccattgaaggtggtgttttcgaagtcttggctactgctggtgatactcacttgggtggtgaagattttgatttcaagattgtcagatacttggccaaacaattcaagaagaagcacaatattgatatcactgccaatgctaaagccatttccaaattgaagagagaagccgaaaaggccaagagaactttatcttctcaaatgagtactagagttgaaatcgactcctttgttgatggtattgacttttctgaaactctttcaagagccaagtttgaagaattgaacattgctgctttcagaaagactttgaaaccagttgaacaagtgttgaaggatggtggtgtcaagaaatccgatattgatgatattgttttggttggtggttccaccagaattccaaaagttcaagaattattggaaggattctttgatggtaaaaaggcttctaaaggtattaacccagatgaagctgttgcttatggtgccgctgttcaagcaggtgttttgagtggtgaagaaggtgttgatgacattgttttgttggatgttaacccattgactttaggtattgaaacttctggtggggttatgaccactttgatcaagagaaacactgccatcccaaccaagaaatctcaaatcttctcaactgctgctgataaccaaccaactgttttgatccaagtctatgaaggtgaaagaaccatggctaaagacaacaacagattgggcaaattcgaattgactggtattccaccagctccaagaggtgtcccacaaattgaagtcactttctcattggatgccaatggtatcttgaaagttgaagctgctgataagggaactggtaaatctgaatccattactatcaccaacgaaaagggtagattatccaaggatgaaattgatagaatggttgaagaagctgaaaaatacgctcaacaagatcaagaattgaaagaaaagattgaagctagaaactcattagaaaactatgctcatgtcttgagaggtcaattgagtgatacttctgaaaccggtttaggttctaaattggatgacgatgacaaggaaactttggatgacgctatcaaggaaactttagaatttattgaagataactttgatactgctactgctgaagaatttgaagaacaaaaacaaaaattaattgacgttgctaacccaatcacagcaaaattatacggtggagctgctggtgaaggtgctggtggcgccggggatgccaaattcggtgatgatgattcagatgatgaattcgatcacgatgaattgtag

SEQ ID NO: 48233 - protein, 687 aa, Candida albicans SC5314
MRSSQSSWLPRIGLLYVALVILIPFLVSPKHAFAVAAVSDDESSTDNYGTVIGIDLGTTYSCVGVMKNGKVEILANDQGNRITPSYVSFNGDERLVGDAAKNQASSNVNNTVFDIKRLIGLKYNDDTVQKELKHLPYKIENKGNKPVVKVEYQGEEKTFSPEEISSMVLGKMKSIAEDYLGKKVTHAVVTVPAYFNDAQRQATKDAGTIAGLNVLRIVNEPTAAAIAYGLDKGDQEKQIIVYDLGGGTFDVSLLSIEGGVFEVLATAGDTHLGGEDFDFKIVRYLAKQFKKKHNIDITANAKAISKLKREAEKAKRTLSSQMSTRVEIDSFVDGIDFSETLSRAKFEELNIAAFRKTLKPVEQVLKDGGVKKSDIDDIVLVGGSTRIPKVQELLEGFFDGKKASKGINPDEAVAYGAAVQAGVLSGEEGVDDIVLLDVNPLTLGIETSGGVMTTLIKRNTAIPTKKSQIFSTAADNQPTVLIQVYEGERTMAKDNNRLGKFELTGIPPAPRGVPQIEVTFSLDANGILKVEAADKGTGKSESITITNEKGRLSKDEIDRMVEEAEKYAQQDQELKEKIEARNSLENYAHVLRGQLSDTSETGLGSKLDDDDKETLDDAIKETLEFIEDNFDTATAEEFEEQKQKLIDVANPITAKLYGGAAGEGAGGAGDAKFGDDDSDDEFDHDEL

SEQ ID NO: 48234 - DNA, 2019 bp, Ustilago maydis 521
  CDS (1)..(2019)
atgttctctcgtggtctccgtgccgccgccccggcaacaaggctcttgaaccagcctcttcgctctgccgcccctggcgttgcccgtcttgcacctcttggcgcccgcttcaactctggcaaggtttccggtcctgtcatcggtattgatttgggaactaccaactcatgtgtctccgttatggagggccagcaggcccgcgtcattgaaaactcggaaggtggccgaaccacgccatccgtcgttgctttcaccaaggacggcgagcgtctcgttggtcttcccgcgaagcgtcaggctgttgtcaaccccgaggcaaccctttttgccaccaagcgccttattggccgaaaattccaggacaaggaggtccagaaggacttgaacaacgtccccttcaagattgtcccccactccaacggcgatgcctggcttgaggtgcgaggtgagaagtactctccctcgcagatcggcgcctttgtcgtcggaaagatgaaggagaccgcctccggctacctcggcaagacggtcaagcacgccgtcatcactgttcctgcctacttcaacgactcgcagcgccaggctaccaaggatgccggtgccattgctggtcttgacgttctccgtgtcatcaacgagcccaccgccgccgcccttgcctacggtctcgaccgtgacgactcttccgtgattgccgtcttcgacttgggaggaggtaccttcgatatctcgattctcgagatgcagaagggcgtctttgaggtcaagtcgaccaacggtgacacccaccttggtggtgaggactttgacattgttctcgtcgagcaccttgtcaacgaattcaagaaagagtctggcctcgacctttccaaggaccgcatggccatccagcgtatccgcgaggctgccgagaaggccaagatcgagctttccagcacccagcagaccgacatcagccttccttacatcaccgctgatgcctcgggtcccaaacacatcaactccaagatcacccgttcgcagctcgagtcgctcgtcggcaagctcgtcgaccgcactatcgagccatgcaagaaggcgctcgccgatgctggctgcaagccctcggacattcaggaggtcatcatggtcggtggtatgagccgaatgcccaaggtgctcgagactgtcaagaacatcttcaagcgcgaccctagcaagggtgtcaaccccgacgaggctgttgccatcggtgcttccatccagggtggtgttctttccggtcaggttaccgacgttttgctgctcgatgttaccccgctctcgctcggtatccagactcttggtggtgtcttcacgcgcctcatcaaccgcaacaccactatccccaccaagaagtcgcaggtcttctccactgccgctgatggccagactgccgtcgacattcaggtctaccagggtgagcgtgagctcgtccgtgacaacaagctgctcggcaacttccagctcaccggcatcccccctgcgcccaagggcgttcctcagatcgaggtcacctttgacattgacgccgacggtatcatgcacgtctctgcgctcgacaaggccaccaacaaggaccagtccatgaccatctcggccggttcgggtctcagcgacaacgagatcgagaagatggttgccgatgctgaacagtacgccgaggctgacaaggcgcgcaaggccgtcattgaggaggctaaccgtgcccactcggtctgctccgagaccaccaaggccatgcaggagttcagcgagcagctccccgccgaggagaaggagaagctcaacgtgctcatcaaagagaccgaggagctcgcctccaagggtctgaacggtgacgccgacgtcgaggcacagaccatccgcgagaagatcgacgctacccagcaggcttcgctacagctcttcaagctcgtctacgagaagaagggtgcccagtctggcaacaccgagaacgccgagtccaagcccgagggtgaaggggagaagaagaactaa

SEQ ID NO: 48235 - protein, 672 aa, Ustilago maydis 521
MFSRGLRAAAPATRLLNQPLRSAAPGVARLAPLGARFNSGKVSGPVIGIDLGTTNSCVSVMEGQQARVIENSEGGRTTPSVVAFTKDGERLVGLPAKRQAVVNPEATLFATKRLIGRKFQDKEVQKDLNNVPFKIVPHSNGDAWLEVRGEKYSPSQIGAFVVGKMKETASGYLGKTVKHAVITVPAYFNDSQRQATKDAGAIAGLDVLRVINEPTAAALAYGLDRDDSSVIAVFDLGGGTFDISILEMQKGVFEVKSTNGDTHLGGEDFDIVLVEHLVNEFKKESGLDLSKDRMAIQRIREAAEKAKIELSSTQQTDISLPYITADASGPKHINSKITRSQLESLVGKLVDRTIEPCKKALADAGCKPSDIQEVIMVGGMSRMPKVLETVKNIFKRDPSKGVNPDEAVAIGASIQGGVLSGQVTDVLLLDVTPLSLGIQTLGGVFTRLINRNTTIPTKKSQVFSTAADGQTAVDIQVYQGERELVRDNKLLGNFQLTGIPPAPKGVPQIEVTFDIDADGIMHVSALDKATNKDQSMTISAGSGLSDNEIEKMVADAEQYAEADKARKAVIEEANRAHSVCSETTKAMQEFSEQLPAEEKEKLNVLIKETEELASKGLNGDADVEAQTIREKIDATQQASLQLFKLVYEKKGAQSGNTENAESKPEGEGEKKN

SEQ ID NO: 48236 - DNA, 1902 bp, Strongylocentrotus purpuratus
  CDS (1)..(1902)
atgtccaacccgacagcgatcggtattgatctagggaccacgtactcgtgtgtgggcgtcttccagaacggcagggtagagatcatcgcaaatgaccagggtaacaggaccacgcctagttatgtagcatttacggatacagagagattgatcggagatgcggcaaagaaccaagttgctatgaatcctcgaaacacaattttcgacgcgaagcgtctgatagggcgtcggtttgatgatacggctgtccagtctgacatgaaacactggtcatttacggtcaccaacaacggcggcaaacccatgttacaggcggagtacatgggcgagaccaagcgctttgctccagaagaaatcagttccatggtcctcacaaaaatgcgtgaaacagctgaagcttacctcggttacaagatcaacgacgcggttataaccgtcccggcttactttaacgactcgcagcgcaccgcgaccaaagacgcgggtaagatcgctgggttgaacgtcttgcgtattatcaacgagcccaccgcggccgctctagcgtacggcttggataagaagctccgcggagagcagaacgttctgatcttcgacctaggcggtggaactttcgatgtttccatcttaaccattgatgagggaatctttgaagtcaggtcaaccgcaggggatacacatcttggaggagaggacttcgacaaccgattggtgactcatcttgtggaagagttcaagcggaagaacaagaaggatattcgcagcaatccccgtgctttgaggcggttgcgtaccgctgcggaacgtgcaaagcgtacactttccagtagtacccaggcaagtattgaggtggattccctctatgaaggcattgatttctacaccagtgtgaccagggccaggtttgaagaactctgctcggatcagttcagaaagagtcttgagcccgtcgaacgcgccattgtggacgccaaacttgataaaaaccagatcgacaccgtggttctggttggtggctccacgcgtatccccaagatccagaaactcctgcaggattacctgaacggaaaagaactgaacaagtcaatcaatccagacgaggccgttgcctatggtgcggcagtgcaggctgccatcctttcaggggatcagagctcagaggtaaaagacgttcttttggtggatgttgccccgttgtctctcggaattgagaccgctggcggtgtcatgaacaaactgattgaacgcaacacccgcatcccaacaaaagcccaacaaaccttcacaacctacgcagacaaccaaagcgcggtcagcatccaggtctacgaaggcgaacgctccatgaccaaagacaacaacctcctgggcaacttcgaactgtctggaatccctcctgcacctcgcggtgtcccaaagatcgagatcacctacgacattgatgctaatggcatcctaaacgtcacagccaaggacgagagcactggtcgtaccaacaaaatcaccatcagcaatgacaagggaaggttgtccaaggcagatattgacaggatggtcaacgatgcagacaaatacaaagctgaagatgaagcacaattcgctcgcgtttcagctcggaaccaactagagagctacgccttcggcatgaagtctacagtcaacgatcctgcgcttgaaagcaagctgtctgcagaggacaaacagacaatcctcaaggcggtggaagacactatccaatggctggaaagcaactcgttggccgataaggatgagtttaagtttaagacggatgagttgcagaagaagtgttcacccatcatggctaagcttcatcagggaagcggaggaggatcaggacagcagcagccggctggtggaccacgagtcgaagaggtcgattaa

SEQ ID NO: 48237 - protein, 633 aa, Strongylocentrotus purpuratus
MSNPTAIGIDLGTTYSCVGVFQNGRVEIIANDQGNRTTPSYVAFTDTERLIGDAAKNQVAMNPRNTIFDAKRLIGRRFDDTAVQSDMKHWSFTVTNNGGKPMLQAEYMGETKRFAPEEISSMVLTKMRETAEAYLGYKINDAVITVPAYFNDSQRTATKDAGKIAGLNVLRIINEPTAAALAYGLDKKLRGEQNVLIFDLGGGTFDVSILTIDEGIFEVRSTAGDTHLGGEDFDNRLVTHLVEEFKRKNKKDIRSNPRALRRLRTAAERAKRTLSSSTQASIEVDSLYEGIDFYTSVTRARFEELCSDQFRKSLEPVERAIVDAKLDKNQIDTVVLVGGSTRIPKIQKLLQDYLNGKELNKSINPDEAVAYGAAVQAAILSGDQSSEVKDVLLVDVAPLSLGIETAGGVMNKLIERNTRIPTKAQQTFTTYADNQSAVSIQVYEGERSMTKDNNLLGNFELSGIPPAPRGVPKIEITYDIDANGILNVTAKDESTGRTNKITISNDKGRLSKADIDRMVNDADKYKAEDEAQFARVSARNQLESYAFGMKSTVNDPALESKLSAEDKQTILKAVEDTIQWLESNSLADKDEFKFKTDELQKKCSPIMAKLHQGSGGGSGQQQPAGGPRVEEVD

SEQ ID NO: 48238 - DNA, 2106 bp, Strongylocentrotus purpuratus
  CDS (1)..(2106)
atgttgacggcagcaaaaatagcaacgaattgccttcgaggtacatctagctgtgtgaagcagatttctcagcaaagacatttttccagcattttgagatcgagcacatgcagtgtattaaactcagacgccagacatcatcagaggcacccatcaagatgttacgcatcagaaacagtccggggagccgtcattggtatagatctgggaaccacaaactcctgcgttgcaatcatggagggcaaaacgccaaaggtactggagaatgcagaaggagcccgaacgacgccctctgtggtggcatttacaaaggataatgagagactagttggcatgccagccaagaggcaggctgtcacgaatgcagagaacactctttatgccacaaaacgtctaattggaaggagattcgacgatcctgaaacacagaaagacattggaacggtatcatataaaatcgtcaaggcttcaaatggcgatgcttgggtgaaggccaatgaaaaggtctactctcccagtcaagtgggtgcgtttgtccttaccaagatgaaggaaacggcagagaactacctggggacaccagccaagaatgcagtcgtcacagtaccagcttatttcaatgactcacaaagacaggcaactaaagatgcaggtcagatttctggattgaatgtattgagagttatcaatgaacccactgctgcagcccttgcctatggtatggacaaatcaggagacagtgtcatcgttgtgtacgatcttggcggcggaacctttgatgtgtcggttcttgagatccagaagggagtatttgaagtgaaatcaaccaacggagatacattccttggaggagaggactttgacaatacacttgtcaacttccttgtcggagagttcaagaaagattctggcattgacgtgaccaaagacaccatggcattacagagggtgagagaagcagcagagaaagccaagatcgaactctcaagcgctcttcagatatgtaaaaacaagcatattttgttttctggacctaagcacatgaacctgaagctgtccagagccaagtttgaatccctgacagagcacttgatcaagaggaccgtggagccatgtaagaaggccattcaggatgctgagatcaacaagtcggatatcaaggaggttctgctcgtcggtggtatgtccaggatgccaaaggttcaaacgctagtccaggagttgtttggacgtcagcccagtaagtctgtcaaccctgatgaagctgtcgctgtaggagctgctatccaaggcggagtcctcgctggtgatgtcaccgatgttctcctcctggacgtctcgcccctttccctcggtatcgagacccttggaggagtcttcaccaagcttatcaacaggaacaccaccatccccaccaagaaagcacaggtgttctccacagcagccgacggtcagacccaggtcgagatcaaagtatgtcagggagagagagagatggctggagataacaagacacttggacagttccaactgattggtatccctccagcaccacgtggagtcccccagatcgaagtgacctttgacattgatgctaacggtattgtgaatgtatccgccagggacaagggaacaggaaaggaacaacagattgtgatccagtcatcgggtggtcttagcaacgatgagatcgagaacatggtcagagctgcagagaagttcgctgctgaggacaagatcaagaaggagcgtgtcgagatcgtcaactctgcggagaacatcgtccatgacacagagaccaagatggaggagttcaaggagcagttgcccgaggaggagtgtgccaagctgaaggaacagatcaccacggtcaaggacgtcctggccgacaaggacaacaagagccctgaagacatcagggaagcatcgtcagctctgcagcaagcatcgctcaagctctttgagatggcttataagaagatggcatcggagcgtgaatcatcaggtgggtccagctcagatacaacctcagattcaacctcggattcaagttcagattcaacctcagattcaagcagtaaagaccaagagaagaaagaaaactaa

SEQ ID NO: 48239 - protein, 701 aa, Strongylocentrotus purpuratus
MLTAAKIATNCLRGTSSCVKQISQQRHFSSILRSSTCSVLNSDARHHQRHPSRCYASETVRGAVIGIDLGTTNSCVAIMEGKTPKVLENAEGARTTPSVVAFTKDNERLVGMPAKRQAVTNAENTLYATKRLIGRRFDDPETQKDIGTVSYKIVKASNGDAWVKANEKVYSPSQVGAFVLTKMKETAENYLGTPAKNAVVTVPAYFNDSQRQATKDAGQISGLNVLRVINEPTAAALAYGMDKSGDSVIVVYDLGGGTFDVSVLEIQKGVFEVKSTNGDTFLGGEDFDNTLVNFLVGEFKKDSGIDVTKDTMALQRVREAAEKAKIELSSALQICKNKHILFSGPKHMNLKLSRAKFESLTEHLIKRTVEPCKKAIQDAEINKSDIKEVLLVGGMSRMPKVQTLVQELFGRQPSKSVNPDEAVAVGAAIQGGVLAGDVTDVLLLDVSPLSLGIETLGGVFTKLINRNTTIPTKKAQVFSTAADGQTQVEIKVCQGEREMAGDNKTLGQFQLIGIPPAPRGVPQIEVTFDIDANGIVNVSARDKGTGKEQQIVIQSSGGLSNDEIENMVRAAEKFAAEDKIKKERVEIVNSAENIVHDTETKMEEFKEQLPEEECAKLKEQITTVKDVLADKDNKSPEDIREASSALQQASLKLFEMAYKKMASERESSGGSSSDTTSDSTSDSSSDSTSDSSSKDQEKKEN

SEQ ID NO: 48240 - DNA, 2127 bp, Strongylocentrotus purpuratus
  CDS (1)..(2127)
atgttgacggcagcaaaaatagcaacgaattgccttcgaggtacatctagctgtgtgaagcagatttctcagcaaagacatttttccagcattttgagatcgagcacatgcagtgtattaaactcagacgccagacatcatcagaggcacccatcaagatgttacgcatcagaaacagtccggggagccgtcattggtatagatctgggaaccacaaactcctgcgttgcaatcatggagggcaaaacgccaaaggtactggagaatgcagaaggagcccgaacgacgccctctgtggtggcatttacaaaggataatgagagactagttggcatgccagccaagaggcaggctgtcacgaatgcagagaacactctttatgccacaaaacgtctaattggaaggagattcgacgatcctgaaacacagaaagacattggaacggtatcatataaaatcgtcaaggcttcaaatggcgatgcttgggtgaaggccaatgaaaaggtctactctcccagtcaagtgggtgcgtttgtccttaccaagatgaaggaaacggcagagaactacctggggacaccagccaagaatgcagtcgtcacagtaccagcttatttcaatgactcacaaagacaggcaactaaagatgcaggtcagatttctggattgaatgtattgagagttatcaatgaacccactgctgcagcccttgcctatggtatggacaaatcaggagacagtgtcatcgttgtgtacgatcttggcggcggaacctttgatgtgtcggttcttgagatccagaagggagtatttgaagtgaaatcaaccaacggagatacattccttggaggagaggactttgacaatacacttgtcaacttccttgtcggagaattcttagcatctgaaatgcatgtgtctggcattgacgtgaccaaagacaccatggcattacagagggtgagagaagcagcagagaaagccaagatcgaactctcaagcgctcttcagacggacatcaatctcccctacctgaccatggaccagtctggacctaagcacatgaacctgaagctgtccagagccaagtttgaatccctgacagagcacttgatcaagaggaccgtggagccatgtaagaaggccattcaggatgctgagatcaacaagtcggatatcaaggaggttctgctcgtcggtggtatgtccaggatgccaaaggttcaaacgctagtccaggagttgtttggacgtcagcccagtaagtctgtcaaccctgatgaagctgtcgctgtaggagctgctatccaaggcggagtcctcgctggtgatgtcaccgatgttctcctcctggacgtctcgcccctttccctcggtatcgagacccttggaggagtcttcaccaagcttatcaacaggaacaccaccatccccaccaagaaagcacaggtgttctccacagcagccgacggtcagacccaggtcgagatcaaagtatgtcagggagagagagagatggctggagataacaagacacttggacagttccaactgattggtatccctccagcaccacgtggagtcccccagatcgaagtgacctttgacattgatgctaacggtattgtgaatgtatccgccagggacaagggaacaggaaaggaacaacagattgtgatccagtcatcgggtggtcttagcaacgatgagatcgagaacatggtcagagctgcagagaagttcgctgctgaggacaagatcaagaaggagcgtgtcgagatcgtcaactctgcggagaacatcgtccatgacacagagaccaagatggaggagttcaaggagcagttgcccgaggaggagtgtgccaagctgaaggaacagatcaccacggtcaaggacgtcctggccgacaaggacaacaagagccctgaagacatcagggaagcatcgtcagctctgcagcaagcatcgctcaagctctttgagatggcttataagaagatggcatcggagcgtgaatcatcaggtgggtccagctcagatacaacctcagattcaacctcggattcaagttcagattcaacctcagattcaagcagtaaagaccaagagaagaaagaaaactaa

SEQ ID NO: 48241 - protein, 708 aa, Strongylocentrotus purpuratus
MLTAAKIATNCLRGTSSCVKQISQQRHFSSILRSSTCSVLNSDARHHQRHPSRCYASETVRGAVIGIDLGTTNSCVAIMEGKTPKVLENAEGARTTPSVVAFTKDNERLVGMPAKRQAVTNAENTLYATKRLIGRRFDDPETQKDIGTVSYKIVKASNGDAWVKANEKVYSPSQVGAFVLTKMKETAENYLGTPAKNAVVTVPAYFNDSQRQATKDAGQISGLNVLRVINEPTAAALAYGMDKSGDSVIVVYDLGGGTFDVSVLEIQKGVFEVKSTNGDTFLGGEDFDNTLVNFLVGEFLASEMHVSGIDVTKDTMALQRVREAAEKAKIELSSALQTDINLPYLTMDQSGPKHMNLKLSRAKFESLTEHLIKRTVEPCKKAIQDAEINKSDIKEVLLVGGMSRMPKVQTLVQELFGRQPSKSVNPDEAVAVGAAIQGGVLAGDVTDVLLLDVSPLSLGIETLGGVFTKLINRNTTIPTKKAQVFSTAADGQTQVEIKVCQGEREMAGDNKTLGQFQLIGIPPAPRGVPQIEVTFDIDANGIVNVSARDKGTGKEQQIVIQSSGGLSNDEIENMVRAAEKFAAEDKIKKERVEIVNSAENIVHDTETKMEEFKEQLPEEECAKLKEQITTVKDVLADKDNKSPEDIREASSALQQASLKLFEMAYKKMASERESSGGSSSDTTSDSTSDSSSDSTSDSSSKDQEKKEN

SEQ ID NO: 48242 - DNA, 2103 bp, Strongylocentrotus purpuratus
  CDS (1)..(2103)
atgttgacggcagcaaaaatagcaacgaattgccttcgaggtacatctagctgtgtgaagcagatttctcagcaaagacatttttccagcattttgagatcgagcacatgcagtgtattaaactcagacgccagacatcatcagaggcacccatcaagatgttacgcatcagaaacagtccggggagccgtcattggtatagatctgggaaccacaaactcctgcgttgcaatcatggagggcaaaacgccaaaggtactggagaatgcagaaggagcccgaacgacgccctctgtggtggcatttacaaaggataatgagagactagttggcatgccagccaagaggcaggctgtcacgaatgcagagaacactctttatgccacaaaacgtctaattggaaggagattcgacgatcctgaaacacagaaagacattggaacggtatcatataaaatcgtcaaggcttcaaatggcgatgcttgggtgaaggccaatgaaaaggtctactctcccagtcaagtgggtgcgtttgtccttaccaagatgaaggaaacggcagagaactacctggggacaccagccaagaatgcagtcgtcacagtaccagcttatttcaatgactcacaaagacaggcaactaaagatgcaggtcagatttctggattgaatgtattgagagttatcaatgaacccactgctgcagcccttgcctatggtatggacaaatcaggagacagtgtcatcgttgtgtacgatcttggcggcggaacctttgatgtgtcggttcttgagatccagaagggagtatttgaagtgaaatcaaccaacggagatacattccttggaggagaggactttgacaatacacttgtcaacttccttgtcggagagttcaagaaagattctggcattgacgtgaccaaagacaccatggcattacagagggtgagagaagcagcagagaaagccaagatcgaactctcaagcgctcttcaggtaagtttgctggtaactttactaagactgggccaacacatgaacctgaagctgtccagagccaagtttgaatccctgacagagcacttgatcaagaggaccgtggagccatgtaagaaggccattcaggatgctgagatcaacaagtcggatatcaaggaggttctgctcgtcggtggtatgtccaggatgccaaaggttcaaacgctagtccaggagttgtttggacgtcagcccagtaagtctgtcaaccctgatgaagctgtcgctgtaggagctgctatccaaggcggagtcctcgctggtgatgtcaccgatgttctcctcctggacgtctcgcccctttccctcggtatcgagacccttggaggagtcttcaccaagcttatcaacaggaacaccaccatccccaccaagaaagcacaggtgttctccacagcagccgacggtcagacccaggtcgagatcaaagtatgtcagggagagagagagatggctggagataacaagacacttggacagttccaactgattggtatccctccagcaccacgtggagtcccccagatcgaagtgacctttgacattgatgctaacggtattgtgaatgtatccgccagggacaagggaacaggaaaggaacaacagattgtgatccagtcatcgggtggtcttagcaacgatgagatcgagaacatggtcagagctgcagagaagttcgctgctgaggacaagatcaagaaggagcgtgtcgagatcgtcaactctgcggagaacatcgtccatgacacagagaccaagatggaggagttcaaggagcagttgcccgaggaggagtgtgccaagctgaaggaacagatcaccacggtcaaggacgtcctggccgacaaggacaacaagagccctgaagacatcagggaagcatcgtcagctctgcagcaagcatcgctcaagctctttgagatggcttataagaagatggcatcggagcgtgaatcatcaggtgggtccagctcagatacaacctcagattcaacctcggattcaagttcagattcaacctcagattcaagcagtaaagaccaagagaagaaagaaaactaa

SEQ ID NO: 48243 - protein, 700 aa, Strongylocentrotus purpuratus
MLTAAKIATNCLRGTSSCVKQISQQRHFSSILRSSTCSVLNSDARHHQRHPSRCYASETVRGAVIGIDLGTTNSCVAIMEGKTPKVLENAEGARTTPSVVAFTKDNERLVGMPAKRQAVTNAENTLYATKRLIGRRFDDPETQKDIGTVSYKIVKASNGDAWVKANEKVYSPSQVGAFVLTKMKETAENYLGTPAKNAVVTVPAYFNDSQRQATKDAGQISGLNVLRVINEPTAAALAYGMDKSGDSVIVVYDLGGGTFDVSVLEIQKGVFEVKSTNGDTFLGGEDFDNTLVNFLVGEFKKDSGIDVTKDTMALQRVREAAEKAKIELSSALQVSLLVTLLRLGQHMNLKLSRAKFESLTEHLIKRTVEPCKKAIQDAEINKSDIKEVLLVGGMSRMPKVQTLVQELFGRQPSKSVNPDEAVAVGAAIQGGVLAGDVTDVLLLDVSPLSLGIETLGGVFTKLINRNTTIPTKKAQVFSTAADGQTQVEIKVCQGEREMAGDNKTLGQFQLIGIPPAPRGVPQIEVTFDIDANGIVNVSARDKGTGKEQQIVIQSSGGLSNDEIENMVRAAEKFAAEDKIKKERVEIVNSAENIVHDTETKMEEFKEQLPEEECAKLKEQITTVKDVLADKDNKSPEDIREASSALQQASLKLFEMAYKKMASERESSGGSSSDTTSDSTSDSSSDSTSDSSSKDQEKKEN

SEQ ID NO: 48244 - DNA, 2106 bp, Strongylocentrotus purpuratus
  CDS (1)..(2106)
atgttgacggcagcaaaaatagcaacgaattgccttcgaggtacatctagctgtgtgaagcagatttctcagcaaagacatttttccagcattttgagatcgagcacatgcagtgtattaaactcagacgccagacatcatcagaggcacccatcaagatgttacgcatcagaaacagtccggggagccgtcattggtatagatctgggaaccacaaactcctgcgttgcaatcatggagggcaaaacgccaaaggtactggagaatgcagaaggagcccgaacgacgccctctgtggtggcatttacaaaggataatgagagactagttggcatgccagccaagaggcaggctgtcacgaatgcagagaacactctttatgccacaaaacgtctaattggaaggagattcgacgatcctgaaacacagaaagacattggaacggtatcatataaaatcgtcaaggcttcaaatggcgatgcttgggtgaaggccaatgaaaaggtctactctcccagtcaagtgggtgcgtttgtccttaccaagatgaaggaaacggcagagaactacctggggacaccagccaagaatgcagtcgtcacagtaccagcttatttcaatgactcacaaagacaggcaactaaagatgcaggtcagatttctggattgaatgtattgagagttatcaatgaacccactgctgcagcccttgcctatggtatggacaaatcaggagacagtgtcatcgttgtgtacgatcttggcggcggaacctttgatgtgtcggttcttgagatccagaagggagtatttgaagtgaaatcaaccaacggagatacattccttggaggagaggactttgacaatacacttgtcaacttccttgtcggagagttcaagaaagattctggcattgacgtgaccaaagacaccatggcattacagagggtgagagaagcagcagagaaagccaagatcgaactctcaagcgctcttcaggtaaacattcaggttcatagtatcttttttcaaaaagttgagttctgggaagagctgtccagagccaagtttgaatccctgacagagcacttgatcaagaggaccgtggagccatgtaagaaggccattcaggatgctgagatcaacaagtcggatatcaaggaggttctgctcgtcggtggtatgtccaggatgccaaaggttcaaacgctagtccaggagttgtttggacgtcagcccagtaagtctgtcaaccctgatgaagctgtcgctgtaggagctgctatccaaggcggagtcctcgctggtgatgtcaccgatgttctcctcctggacgtctcgcccctttccctcggtatcgagacccttggaggagtcttcaccaagcttatcaacaggaacaccaccatccccaccaagaaagcacaggtgttctccacagcagccgacggtcagacccaggtcgagatcaaagtatgtcagggagagagagagatggctggagataacaagacacttggacagttccaactgattggtatccctccagcaccacgtggagtcccccagatcgaagtgacctttgacattgatgctaacggtattgtgaatgtatccgccagggacaagggaacaggaaaggaacaacagattgtgatccagtcatcgggtggtcttagcaacgatgagatcgagaacatggtcagagctgcagagaagttcgctgctgaggacaagatcaagaaggagcgtgtcgagatcgtcaactctgcggagaacatcgtccatgacacagagaccaagatggaggagttcaaggagcagttgcccgaggaggagtgtgccaagctgaaggaacagatcaccacggtcaaggacgtcctggccgacaaggacaacaagagccctgaagacatcagggaagcatcgtcagctctgcagcaagcatcgctcaagctctttgagatggcttataagaagatggcatcggagcgtgaatcatcaggtgggtccagctcagatacaacctcagattcaacctcggattcaagttcagattcaacctcagattcaagcagtaaagaccaagagaagaaagaaaactaa

SEQ ID NO: 48245 - protein, 701 aa, Strongylocentrotus purpuratus
MLTAAKIATNCLRGTSSCVKQISQQRHFSSILRSSTCSVLNSDARHHQRHPSRCYASETVRGAVIGIDLGTTNSCVAIMEGKTPKVLENAEGARTTPSVVAFTKDNERLVGMPAKRQAVTNAENTLYATKRLIGRRFDDPETQKDIGTVSYKIVKASNGDAWVKANEKVYSPSQVGAFVLTKMKETAENYLGTPAKNAVVTVPAYFNDSQRQATKDAGQISGLNVLRVINEPTAAALAYGMDKSGDSVIVVYDLGGGTFDVSVLEIQKGVFEVKSTNGDTFLGGEDFDNTLVNFLVGEFKKDSGIDVTKDTMALQRVREAAEKAKIELSSALQVNIQVHSIFFQKVEFWEELSRAKFESLTEHLIKRTVEPCKKAIQDAEINKSDIKEVLLVGGMSRMPKVQTLVQELFGRQPSKSVNPDEAVAVGAAIQGGVLAGDVTDVLLLDVSPLSLGIETLGGVFTKLINRNTTIPTKKAQVFSTAADGQTQVEIKVCQGEREMAGDNKTLGQFQLIGIPPAPRGVPQIEVTFDIDANGIVNVSARDKGTGKEQQIVIQSSGGLSNDEIENMVRAAEKFAAEDKIKKERVEIVNSAENIVHDTETKMEEFKEQLPEEECAKLKEQITTVKDVLADKDNKSPEDIREASSALQQASLKLFEMAYKKMASERESSGGSSSDTTSDSTSDSSSDSTSDSSSKDQEKKEN

SEQ ID NO: 48246 - DNA, 2103 bp, Strongylocentrotus purpuratus
  CDS (1)..(2103)
atgttgacggcagcaaaaatagcaacgaattgccttcgaggtacatctagctgtgtgaagcagatttctcagcaaagacatttttccagcattttgagatcgagcacatgcagtgtattaaactcagacgccagacatcatcagaggcacccatcaagatgttacgcatcagaaacagtccggggagccgtcattggtatagatctgggaaccacaaactcctgcgttgcaatcatggagggcaaaacgccaaaggtactggagaatgcagaaggagcccgaacgacgccctctgtggtggcatttacaaaggataatgagagactagttggcatgccagccaagaggcaggctgtcacgaatgcagagaacactctttatgccacaaaacgtctaattggaaggagattcgacgatcctgaaacacagaaagacattggaacggtatcatataaaatcgtcaaggcttcaaatggcgatgcttgggtgaaggccaatgaaaaggtctactctcccagtcaagtgggtgcgtttgtccttaccaagatgaaggaaacggcagagaactacctggggacaccagccaagaatgcagtcgtcacagtaccagcttatttcaatgactcacaaagacaggcaactaaagatgcaggtcagatttctggattgaatgtattgagagttatcaatgaacccactgctgcagcccttgcctatggtatggacaaatcaggagacagtgtcatcgttgtgtacgatcttggcggcggaacctttgatgtgtcggttcttgagatccagaagggagtatttgaagtgaaatcaaccaacggagatacattccttggaggagaggactttgacaatacacttgtcaacttccttgtcggagagttcaagaaagattctggcattgacgtgaccaaagacaccatggcattacagagggtgagagaagcagcagagaaagccaagatcgaactctcaagcgctcttcaggtaagcatgtctaaggtacatgtatttgagaaagttgagttctgggaagagctgtccagagccaagtttgaatccctgacagagcacttgatcaagaggaccgtggagccatgtaagaaggccattcaggatgctgagatcaacaagtcggatatcaaggaggttctgctcgtcggtggtatgtccaggatgccaaaggttcaaacgctagtccaggagttgtttggacgtcagcccagtaagtctgtcaaccctgatgaagctgtcgctgtaggagctgctatccaaggcggagtcctcgctggtgatgtcaccgatgttctcctcctggacgtctcgcccctttccctcggtatcgagacccttggaggagtcttcaccaagcttatcaacaggaacaccaccatccccaccaagaaagcacaggtgttctccacagcagccgacggtcagacccaggtcgagatcaaagtatgtcagggagagagagagatggctggagataacaagacacttggacagttccaactgattggtatccctccagcaccacgtggagtcccccagatcgaagtgacctttgacattgatgctaacggtattgtgaatgtatccgccagggacaagggaacaggaaaggaacaacagattgtgatccagtcatcgggtggtcttagcaacgatgagatcgagaacatggtcagagctgcagagaagttcgctgctgaggacaagatcaagaaggagcgtgtcgagatcgtcaactctgcggagaacatcgtccatgacacagagaccaagatggaggagttcaaggagcagttgcccgaggaggagtgtgccaagctgaaggaacagatcaccacggtcaaggacgtcctggccgacaaggacaacaagagccctgaagacatcagggaagcatcgtcagctctgcagcaagcatcgctcaagctctttgagatggcttataagaagatggcatcggagcgtgaatcatcaggtgggtccagctcagatacaacctcagattcaacctcggattcaagttcagattcaacctcagattcaagcagtaaagaccaagagaagaaagaaaactaa

SEQ ID NO: 48247 - protein, 700 aa, Strongylocentrotus purpuratus
MLTAAKIATNCLRGTSSCVKQISQQRHFSSILRSSTCSVLNSDARHHQRHPSRCYASETVRGAVIGIDLGTTNSCVAIMEGKTPKVLENAEGARTTPSVVAFTKDNERLVGMPAKRQAVTNAENTLYATKRLIGRRFDDPETQKDIGTVSYKIVKASNGDAWVKANEKVYSPSQVGAFVLTKMKETAENYLGTPAKNAVVTVPAYFNDSQRQATKDAGQISGLNVLRVINEPTAAALAYGMDKSGDSVIVVYDLGGGTFDVSVLEIQKGVFEVKSTNGDTFLGGEDFDNTLVNFLVGEFKKDSGIDVTKDTMALQRVREAAEKAKIELSSALQVSMSKVHVFEKVEFWEELSRAKFESLTEHLIKRTVEPCKKAIQDAEINKSDIKEVLLVGGMSRMPKVQTLVQELFGRQPSKSVNPDEAVAVGAAIQGGVLAGDVTDVLLLDVSPLSLGIETLGGVFTKLINRNTTIPTKKAQVFSTAADGQTQVEIKVCQGEREMAGDNKTLGQFQLIGIPPAPRGVPQIEVTFDIDANGIVNVSARDKGTGKEQQIVIQSSGGLSNDEIENMVRAAEKFAAEDKIKKERVEIVNSAENIVHDTETKMEEFKEQLPEEECAKLKEQITTVKDVLADKDNKSPEDIREASSALQQASLKLFEMAYKKMASERESSGGSSSDTTSDSTSDSSSDSTSDSSSKDQEKKEN

SEQ ID NO: 48248 - DNA, 2094 bp, Strongylocentrotus purpuratus
  CDS (1)..(2094)
atgttgacggcagcaaaaatagcaacgaattgccttcgaggtacatctagctgtgtgaagcagatttctcagcaaagacatttttccagcattttgagatcgagcacatgcagtgtattaaactcagacgccagacatcatcagaggcacccatcaagatgttacgcatcagaaacagtccggggagccgtcattggtatagatctgggaaccacaaactcctgcgttgcaatcatggagggcaaaacgccaaaggtactggagaatgcagaaggagcccgaacgacgccctctgtggtggcatttacaaaggataatgagagactagttggcatgccagccaagaggcaggctgtcacgaatgcagagaacactctttatgccacaaaacgtctaattggaaggagattcgacgatcctgaaacacagaaagacattggaacggtatcatataaaatcgtcaaggcttcaaatggcgatgcttgggtgaaggccaatgaaaaggtctactctcccagtcaagtgggtgcgtttgtccttaccaagatgaaggaaacggcagagaactacctggggacaccagccaagaatgcagtcgtcacagtaccagcttatttcaatgactcacaaagacaggcaactaaagatgcaggtcagatttctggattgaatgtattgagagttatcaatgaacccactgctgcagcccttgcctatggtatggacaaatcaggagacagtgtcatcgttgtgtacgatcttggcggcggaacctttgatgtgtcggttcttgagatccagaagggagtatttgaagtgaaatcaaccaacggagatacattccttggaggagaggactttgacaatacacttgtcaacttccttgtcggagagttcaagaaagattctggcattgacgtgaccaaagacaccatggcattacagagggtgagagaagcagcagagaaagccaagatcgaactctcaagcgctcttcaggtaagttgtttttgttctggacctaagcacatgaacctgaagctgtccagagccaagtttgaatccctgacagagcacttgatcaagaggaccgtggagccatgtaagaaggccattcaggatgctgagatcaacaagtcggatatcaaggaggttctgctcgtcggtggtatgtccaggatgccaaaggttcaaacgctagtccaggagttgtttggacgtcagcccagtaagtctgtcaaccctgatgaagctgtcgctgtaggagctgctatccaaggcggagtcctcgctggtgatgtcaccgatgttctcctcctggacgtctcgcccctttccctcggtatcgagacccttggaggagtcttcaccaagcttatcaacaggaacaccaccatccccaccaagaaagcacaggtgttctccacagcagccgacggtcagacccaggtcgagatcaaagtatgtcagggagagagagagatggctggagataacaagacacttggacagttccaactgattggtatccctccagcaccacgtggagtcccccagatcgaagtgacctttgacattgatgctaacggtattgtgaatgtatccgccagggacaagggaacaggaaaggaacaacagattgtgatccagtcatcgggtggtcttagcaacgatgagatcgagaacatggtcagagctgcagagaagttcgctgctgaggacaagatcaagaaggagcgtgtcgagatcgtcaactctgcggagaacatcgtccatgacacagagaccaagatggaggagttcaaggagcagttgcccgaggaggagtgtgccaagctgaaggaacagatcaccacggtcaaggacgtcctggccgacaaggacaacaagagccctgaagacatcagggaagcatcgtcagctctgcagcaagcatcgctcaagctctttgagatggcttataagaagatggcatcggagcgtgaatcatcaggtgggtccagctcagatacaacctcagattcaacctcggattcaagttcagattcaacctcagattcaagcagtaaagaccaagagaagaaagaaaactaa

SEQ ID NO: 48249 - protein, 697 aa, Strongylocentrotus purpuratus
MLTAAKIATNCLRGTSSCVKQISQQRHFSSILRSSTCSVLNSDARHHQRHPSRCYASETVRGAVIGIDLGTTNSCVAIMEGKTPKVLENAEGARTTPSVVAFTKDNERLVGMPAKRQAVTNAENTLYATKRLIGRRFDDPETQKDIGTVSYKIVKASNGDAWVKANEKVYSPSQVGAFVLTKMKETAENYLGTPAKNAVVTVPAYFNDSQRQATKDAGQISGLNVLRVINEPTAAALAYGMDKSGDSVIVVYDLGGGTFDVSVLEIQKGVFEVKSTNGDTFLGGEDFDNTLVNFLVGEFKKDSGIDVTKDTMALQRVREAAEKAKIELSSALQVSCFCSGPKHMNLKLSRAKFESLTEHLIKRTVEPCKKAIQDAEINKSDIKEVLLVGGMSRMPKVQTLVQELFGRQPSKSVNPDEAVAVGAAIQGGVLAGDVTDVLLLDVSPLSLGIETLGGVFTKLINRNTTIPTKKAQVFSTAADGQTQVEIKVCQGEREMAGDNKTLGQFQLIGIPPAPRGVPQIEVTFDIDANGIVNVSARDKGTGKEQQIVIQSSGGLSNDEIENMVRAAEKFAAEDKIKKERVEIVNSAENIVHDTETKMEEFKEQLPEEECAKLKEQITTVKDVLADKDNKSPEDIREASSALQQASLKLFEMAYKKMASERESSGGSSSDTTSDSTSDSSSDSTSDSSSKDQEKKEN

SEQ ID NO: 48250 - DNA, 2103 bp, Strongylocentrotus purpuratus
  CDS (1)..(2103)
atgttgacggcagcaaaaatagcaacgaattgccttcgaggtacatctagctgtgtgaagcagatttctcagcaaagacatttttccagcattttgagatcgagcacatgcagtgtattaaactcagacgccagacatcatcagaggcacccatcaagatgttacgcatcagaaacagtccggggagccgtcattggtatagatctgggaaccacaaactcctgcgttgcaatcatggagggcaaaacgccaaaggtactggagaatgcagaaggagcccgaacgacgccctctgtggtggcatttacaaaggataatgagagactagttggcatgccagccaagaggcaggctgtcacgaatgcagagaacactctttatgccacaaaacgtctaattggaaggagattcgacgatcctgaaacacagaaagacattggaacggtatcatataaaatcgtcaaggcttcaaatggcgatgcttgggtgaaggccaatgaaaaggtctactctcccagtcaagtgggtgcgtttgtccttaccaagatgaaggaaacggcagagaactacctggggacaccagccaagaatgcagtcgtcacagtaccagcttatttcaatgactcacaaagacaggcaactaaagatgcaggtcagatttctggattgaatgtattgagagttatcaatgaacccactgctgcagcccttgcctatggtatggacaaatcaggagacagtgtcatcgttgtgtacgatcttggcggcggaacctttgatgtgtcggttcttgagatccagaagggagtatttgaagtgaaatcaaccaacggagatacattccttggaggagaggactttgacaatacacttgtcaacttccttgtcggagagttcaagaaagattctggcattgacgtgaccaaagacaccatggcattacagagggtgagagaagcagcagagaaagccaagatcgaactctcaagcgctcttcaggtaaacattcagtttaactatcttaaagagaaagttgagttctgggaagagctgtccagagccaagtttgaatccctgacagagcacttgatcaagaggaccgtggagccatgtaagaaggccattcaggatgctgagatcaacaagtcggatatcaaggaggttctgctcgtcggtggtatgtccaggatgccaaaggttcaaacgctagtccaggagttgtttggacgtcagcccagtaagtctgtcaaccctgatgaagctgtcgctgtaggagctgctatccaaggcggagtcctcgctggtgatgtcaccgatgttctcctcctggacgtctcgcccctttccctcggtatcgagacccttggaggagtcttcaccaagcttatcaacaggaacaccaccatccccaccaagaaagcacaggtgttctccacagcagccgacggtcagacccaggtcgagatcaaagtatgtcagggagagagagagatggctggagataacaagacacttggacagttccaactgattggtatccctccagcaccacgtggagtcccccagatcgaagtgacctttgacattgatgctaacggtattgtgaatgtatccgccagggacaagggaacaggaaaggaacaacagattgtgatccagtcatcgggtggtcttagcaacgatgagatcgagaacatggtcagagctgcagagaagttcgctgctgaggacaagatcaagaaggagcgtgtcgagatcgtcaactctgcggagaacatcgtccatgacacagagaccaagatggaggagttcaaggagcagttgcccgaggaggagtgtgccaagctgaaggaacagatcaccacggtcaaggacgtcctggccgacaaggacaacaagagccctgaagacatcagggaagcatcgtcagctctgcagcaagcatcgctcaagctctttgagatggcttataagaagatggcatcggagcgtgaatcatcaggtgggtccagctcagatacaacctcagattcaacctcggattcaagttcagattcaacctcagattcaagcagtaaagaccaagagaagaaagaaaactaa

SEQ ID NO: 48251 - protein, 700 aa, Strongylocentrotus purpuratus
MLTAAKIATNCLRGTSSCVKQISQQRHFSSILRSSTCSVLNSDARHHQRHPSRCYASETVRGAVIGIDLGTTNSCVAIMEGKTPKVLENAEGARTTPSVVAFTKDNERLVGMPAKRQAVTNAENTLYATKRLIGRRFDDPETQKDIGTVSYKIVKASNGDAWVKANEKVYSPSQVGAFVLTKMKETAENYLGTPAKNAVVTVPAYFNDSQRQATKDAGQISGLNVLRVINEPTAAALAYGMDKSGDSVIVVYDLGGGTFDVSVLEIQKGVFEVKSTNGDTFLGGEDFDNTLVNFLVGEFKKDSGIDVTKDTMALQRVREAAEKAKIELSSALQVNIQFNYLKEKVEFWEELSRAKFESLTEHLIKRTVEPCKKAIQDAEINKSDIKEVLLVGGMSRMPKVQTLVQELFGRQPSKSVNPDEAVAVGAAIQGGVLAGDVTDVLLLDVSPLSLGIETLGGVFTKLINRNTTIPTKKAQVFSTAADGQTQVEIKVCQGEREMAGDNKTLGQFQLIGIPPAPRGVPQIEVTFDIDANGIVNVSARDKGTGKEQQIVIQSSGGLSNDEIENMVRAAEKFAAEDKIKKERVEIVNSAENIVHDTETKMEEFKEQLPEEECAKLKEQITTVKDVLADKDNKSPEDIREASSALQQASLKLFEMAYKKMASERESSGGSSSDTTSDSTSDSSSDSTSDSSSKDQEKKEN

SEQ ID NO: 48252 - DNA, 1977 bp, Strongylocentrotus purpuratus
  CDS (1)..(1977)
atggccaaagcaccagcagtaggaattgatcttggaacaacatactcgtgtgttggagtatttcagcatgggaaagttgaaatcattgctaacgaccaaggaaacaggacaaccccaagctatgtagccttcactgatacagagcgtctgatcggagatgcagcaaagaaccagaccgccatgaatccaaacaacaccgtctttgatgctaagcgcctcattggtcgaaacttcggagacgcatgtgtgaaggctgatatgaagcattggccattcgatgtgattgaggagggtggcagacccaagatacagatcgagttcaagggagaaaccaagacgttctatgctgaggagatcagttccatggtgctgctgaagatgaaagatactgcagaggcatacctaggaaagaaagtaacagatgctgttgttactgtaccagcctacttcaatgactcccagagacaggcaacgaaggatgctggtgttatctctggtatgaacatcttgcgtatcatcaatgaacctactgcagctgctattgcttatggtcttgacaagaaggtcggtgctgaacgcaacgtcctgatctttgacctgggaggtggaaccttcgatgtgtctgtgctcacaatcgaagagggtatctttgaagtgaagtcgacctccggcgacactcacttgggtggtgaggactttgacaaccgcatggtcaaccacttcatcacagagttcaagaggaagcacaagaaagacatcacccccaacaagagggcagtgaggagactgaggacggcttgtgaaagggccaagaggacactctcatcaagcacacaggccaacattgagatcgattccctgtttgagggtatcgactactacacctccatcacccgtgctcgatttgaggaactcaactctgaccttttccgtggcaccctggagcctgttgaaaatgcccttcgtgatgccaaattggataaggataagatccatgagattgtcttggttggtggctccaccaggatccccaagatccagaagctcctgcaggacttcttcaatggcaaagaactcaacaagagcatcaaccctgatgaggctgtcgcttatggagcagctgttcaagctgccatcctgtctggggacaagtccagtgaagtccaagacctgctccttctggatgttgccccactgtccatgggtatcgagacggctggtggtgtcatgacccctcttatcaagaggaacacaaccatcccaaccaagcagaccaacacctttacaacctatgctgacaatcaaccaggtgtgctcattcaagtctacgagggagagcgtaccatgaccaagaacaacaacctccttgggaagtttgagctgtccggtattccaccagcaccaaggggagtcccccagatcgatgtgtcatttgacattgatgccaatggtatcctcaacgtatctgcagtggataagagtactggcaaggagaacaaaattaccatcaccaacgacaagggacgtctcagcaaggaggagattgagaagatggttgccgatgccgagaagtacaaggaggaagatgacaaggaaaaggacaggatctcggccaagaatgcccttgagagctatgcctacaacatgaagagcaccatggaagatgagaagatcaaggataagatcgcagaggacgacaagactaagatcatggacaagtgcaaggaagtcttggattggctggacgccaaccagactgctgagaaggaggagtatgagcaccaacagaaagaattggaaggtatctgcacccccatcatcaccaagatgtaccaagctgctggtggtgcccccggtggcatgccaggtggtatgccaggtggtatgcccggtggtatgcctggtggtatgcccggtggtcccagtggtggagacagtggtaccggtggtggccccaccattgaggaggttgattaa

SEQ ID NO: 48253 - protein, 658 aa, Strongylocentrotus purpuratus
MAKAPAVGIDLGTTYSCVGVFQHGKVEIIANDQGNRTTPSYVAFTDTERLIGDAAKNQTAMNPNNTVFDAKRLIGRNFGDACVKADMKHWPFDVIEEGGRPKIQIEFKGETKTFYAEEISSMVLLKMKDTAEAYLGKKVTDAVVTVPAYFNDSQRQATKDAGVISGMNILRIINEPTAAAIAYGLDKKVGAERNVLIFDLGGGTFDVSVLTIEEGIFEVKSTSGDTHLGGEDFDNRMVNHFITEFKRKHKKDITPNKRAVRRLRTACERAKRTLSSSTQANIEIDSLFEGIDYYTSITRARFEELNSDLFRGTLEPVENALRDAKLDKDKIHEIVLVGGSTRIPKIQKLLQDFFNGKELNKSINPDEAVAYGAAVQAAILSGDKSSEVQDLLLLDVAPLSMGIETAGGVMTPLIKRNTTIPTKQTNTFTTYADNQPGVLIQVYEGERTMTKNNNLLGKFELSGIPPAPRGVPQIDVSFDIDANGILNVSAVDKSTGKENKITITNDKGRLSKEEIEKMVADAEKYKEEDDKEKDRISAKNALESYAYNMKSTMEDEKIKDKIAEDDKTKIMDKCKEVLDWLDANQTAEKEEYEHQQKELEGICTPIITKMYQAAGGAPGGMPGGMPGGMPGGMPGGMPGGPSGGDSGTGGGPTIEEVD

SEQ ID NO: 48254 - DNA, 2316 bp, Tribolium castaneum
  CDS (1)..(2316)
atgttcagaaccagtttctatttggcactttttgcacttgttgcatcaacgttggccttgccagccgaagagtacaactatgacctcgaacccgattaccaattttatcgacttagacgttccgtagaacaggacatcccagctgaagaaaatgaatacgttccagctgaaatgttgtatgaactccaccgagaaagacgttcactgcaacctggagctccgaacatcccaggaccttcgaaacaagacggaggatggtcggtgaatcccagcgtttcaagagatgaccgtggaaacacccaaacgaatgttgaagttggtcataagggaaagaatcacgattttaatgctgggtgggggaaagttgtcagaggacctggaaaagcgaaacctacttggcatgtgggtggaacctacagcaaaatgggcaaaaccccagcgattggcatcgacttgggcacgacgtactcctgtgtgggtgtgtggcagcaaggcaaagtggagatcatcgccaacgagcagggaaatcgcaccactcccagctatgtggccttcaccgacacggagcgcctcatcggcgacgcggccaagaaccaagtggcgatgaatcccagcaacacggtgttcgatgcgaagaggctgattgggaggaaattcgacgatccgaagattcagcaggatatgaagcattggccgttcaaggtggtgaatgacggagggaagccgaagatccaggtggagtttaaaggggaggttaagaggtttgcgccggaggagattagtagtatggtgttgaggaagatgaaggagacggccgatgcgtttttgggaaaggagaccaaggatgcggttattacggttccggcgtattttaacgactcgcagaggcaggctaccaaggacgctgggatgatcgcaggtatcaacgttttacgaataatcaacgaaccaacagctgcagctctagcctacggcttggacaaaaacctaaaaggcgaacgcaacgtccttattttcgatttaggcggtggcacttttgacgtttcaattctaacaatcgacgaaggttcacttttcgaagtcaaagcaacagccggcgatacacatttaggaggcgaagactttgataaccgccttgttaatcatttcgccgacgaatttaaacgcaaatacaaaaaagacttaaccaaaaacccgcgagctttgcgccgtcttcgaacggccgcagaaagagctaagcgaactctgagttctagcacggaagcatctcttgaaattgacgctctgtttgaagggattgacttttatacgaagatttcaagagctaggtttgaagaactcaactctgatttattcagaggtactttggaaccggtcgaaaaggcactgaacgatgccaagatggataagtctatgatacatgatgttgtgctggttgggggttcgaccagaattcccaaaattcaaaatttgctccagaattatttttcggggaagaccctaaatttgagtattaatcccgacgaagctgttgcttatggtgcggctgttcaagctgcaattttgagtggtgatagcagttcgaaaatacaagacgtgttgcttgttgatgttacacctttatcacttggtatcgaaacagcaggaggtgttatgtcgaagattgtagaacgcaatgcgagaattccctgcaaacaaactcaaacttttaccacttattccgataatcaaccagctgttagtattcaagtgtttgaaggggagagagccatgacaaaggataacaacctgttggggacgtttgatttgtctggaatcccacctgcaccacgtggcgtcccaaaaatcgacgttacttttgatttggacgcaaatggaattctgaatgtttctgcaaaggaggttagtaccgggaagtccaaaaacatcaccatcaagaacgacaaaggaagactgtcgcaaagagaaatcgagaaaatgttagccgatgcggaacgttacaaggaggaagatgacagacaaagggaacgaattggaagcaagaatcagctcgagagttatgtttttaatgtgaaacaagcggtggaagaagctgggaacaagctaagtgccgaagataagaaaaaagctttgaaggagtgtgaggcttgtattaaatggttggatagtaaccaaatggcggaaaaagaagagtttgagtataagttgaaagatttgacgaaaatttgcagtccgattatgaccaaattacatagaggtggtggttcaagtggtggtgggggaaatgatggcccaacaattgaagaagtggattaa

SEQ ID NO: 48255 - protein, 771 aa, Tribolium castaneum
MFRTSFYLALFALVASTLALPAEEYNYDLEPDYQFYRLRRSVEQDIPAEENEYVPAEMLYELHRERRSLQPGAPNIPGPSKQDGGWSVNPSVSRDDRGNTQTNVEVGHKGKNHDFNAGWGKVVRGPGKAKPTWHVGGTYSKMGKTPAIGIDLGTTYSCVGVWQQGKVEIIANEQGNRTTPSYVAFTDTERLIGDAAKNQVAMNPSNTVFDAKRLIGRKFDDPKIQQDMKHWPFKVVNDGGKPKIQVEFKGEVKRFAPEEISSMVLRKMKETADAFLGKETKDAVITVPAYFNDSQRQATKDAGMIAGINVLRIINEPTAAALAYGLDKNLKGERNVLIFDLGGGTFDVSILTIDEGSLFEVKATAGDTHLGGEDFDNRLVNHFADEFKRKYKKDLTKNPRALRRLRTAAERAKRTLSSSTEASLEIDALFEGIDFYTKISRARFEELNSDLFRGTLEPVEKALNDAKMDKSMIHDVVLVGGSTRIPKIQNLLQNYFSGKTLNLSINPDEAVAYGAAVQAAILSGDSSSKIQDVLLVDVTPLSLGIETAGGVMSKIVERNARIPCKQTQTFTTYSDNQPAVSIQVFEGERAMTKDNNLLGTFDLSGIPPAPRGVPKIDVTFDLDANGILNVSAKEVSTGKSKNITIKNDKGRLSQREIEKMLADAERYKEEDDRQRERIGSKNQLESYVFNVKQAVEEAGNKLSAEDKKKALKECEACIKWLDSNQMAEKEEFEYKLKDLTKICSPIMTKLHRGGGSSGGGGNDGPTIEEVD

SEQ ID NO: 48256 - DNA, 1896 bp, Tribolium castaneum
  CDS (1)..(1896)
atgggcaaagtaccaggaattggcatcgatttgggcaccacgtattcgtgtgtgggggtgtggcagcatggcaaagtggagatcatcgccaacgaccaaggcaacagaaccacccccagctatgtggccttcaccgacaccgagcggctcatcggagacgccgccaaaagtcaggttgcgatgaaccccaaaaacaccgtcttcgacgccaaacgcctaatcggccgcaaattcgacgacaccaaaatccaagaagacatgaaacactggccattcaccgtaatcaacgacggcggcaaaccaaaaatccaagtcgagtacaagggcgaaataaaaaaatttgcaccggaagaaatcagttcgatggttttgaccaaaatgaaggaaattgcggacacgtatttaggcgcaaaagtcaacgatgctgttatcacagttcctgcctacttcaacgactcgcaaagacaggccactaaggacgctggggccatagctgggctgaacgtcctgcggattattaacgagccaacggctgcggctctcgcctacgggctggataaaaacttgaaaggggaaaaaaacgttctgatttttgatctcgggggtggaacgttcgacgtgtctattctttcaatagacgaagggtcgctgtttgaagttaaatcaacggccggcgacacgcatttaggcggcgaagacttcgataatcgcctagtcaaccatttcatccaagaattcaaacgcaaacaccacaaggacttgagcagcaacaccagagcggtccgccggctgcgaactgcgtgcgaaagagccaaaaggacactgtcttcaagtgccgaagccagtattgaaatcgacgccctgcatgaaggcatcgatttctactccaaagtcagcagagcccgctttgaagaaatgtgcatggattatttcagatcgacacttcagccggttgaaagagccttggctgacgccaagctggacaaaggcgcaattcacgacattgtcctagtcgggggttccacccgtatcccgaaaatccagaaaatgttgcaggattttttctgcgggaaaccgctcaacctttcaatcaacccggacgaggccgtggcctatggagccgccgtccaagctgcgatcttaaccggagacaccagctcgcaaattcaggacgttttgctagtcgatgttgccccactgtctctagggattgaaacagcgggcggtgtcatgaccaaaattgtggaacgaaattcacgaattccgtgcaaacaacagcaaactttcaccacgtattctgataatcagaacgctgtcactatccaggtgtttgaaggagaacgggctatgactaaggacaataatctcctgggcactttcaacctgactgggatccccccagcacctcgtggtgtcccaaaaatcgaagtaacgttcgatttggatgccaatggcattctgaacgtttcagcaaaggacacaagcaccgggaagtccgaacgaatcacaattacgaacgacaaaggccgtttgtctaaggctgacattgacaaaatgctggcagaggcggagaaatacaaagctgaggatgataagcagaaggaacgaattgctgcgcgaaaccaactggagggttacatttttagtgtcaaacaggccggtgaggacgccccagctgataaactgacagaagatgataagaaaattatcagagagaagtgctccgctgccttgagttggttggactcgaaccaattggccgagaaggaagaatttgaggataagttgaaagagttgcaaaaggattgctccccgattatgatgaaactgcaccaaggagcgcaaggaggtgcagctcccggtgccaaaggccccacggttgaagaagtagactaa

SEQ ID NO: 48257 - protein, 631 aa, Tribolium castaneum
MGKVPGIGIDLGTTYSCVGVWQHGKVEIIANDQGNRTTPSYVAFTDTERLIGDAAKSQVAMNPKNTVFDAKRLIGRKFDDTKIQEDMKHWPFTVINDGGKPKIQVEYKGEIKKFAPEEISSMVLTKMKEIADTYLGAKVNDAVITVPAYFNDSQRQATKDAGAIAGLNVLRIINEPTAAALAYGLDKNLKGEKNVLIFDLGGGTFDVSILSIDEGSLFEVKSTAGDTHLGGEDFDNRLVNHFIQEFKRKHHKDLSSNTRAVRRLRTACERAKRTLSSSAEASIEIDALHEGIDFYSKVSRARFEEMCMDYFRSTLQPVERALADAKLDKGAIHDIVLVGGSTRIPKIQKMLQDFFCGKPLNLSINPDEAVAYGAAVQAAILTGDTSSQIQDVLLVDVAPLSLGIETAGGVMTKIVERNSRIPCKQQQTFTTYSDNQNAVTIQVFEGERAMTKDNNLLGTFNLTGIPPAPRGVPKIEVTFDLDANGILNVSAKDTSTGKSERITITNDKGRLSKADIDKMLAEAEKYKAEDDKQKERIAARNQLEGYIFSVKQAGEDAPADKLTEDDKKIIREKCSAALSWLDSNQLAEKEEFEDKLKELQKDCSPIMMKLHQGAQGGAAPGAKGPTVEEVD

SEQ ID NO: 48258 - DNA, 1941 bp, Tribolium castaneum
  CDS (1)..(1941)
atggtgaaatctccagcagttggtatcgacttgggaaccacctactcctgcgtgggagtctggcagcatggaaaagtcgagatcatcgccaacgaccaaggtaacagaaccaccccaagttatgttgccttcaccgacaccgagcgtcttctcggcgacgctgcgaagaaccaagttgccatgaaccccagcaacaccatcttcgacgcgaaacgattaattggaaggaaattcgacgacccgaagatccagcaagatatcaaacactggccgtttaaagttatcaatgactgcggcaaacccaagatccaagtcgagcacaaaggcgaaattaagaagtttgcaccggaggagatcagttcgatggtgctgacgaaaatgaaggaaaccgctgaagcgtatttgggaacatctgtaagggatgctgttatcacagtcccggcatatttcaacgactcccagaggcaagctacgaaagatgccggtgttatcgccggtttgaacgtcatgaggatcatcaatgaaccgacagcagcggctttggcttatgggcttgacaagaatttgaagggcgaacgaaacgtccttattttcgacctgggtggcggcactttcgatgtttccatcttaaccatcgacgaagggtcgttgttcgaagttaaagccactgcaggtgacacccacctgggtggtgaagacttcgacaaccgccttgttaaccacttggccgacgaattcaaacgcaaatacaagaaagatctgagaagcaatccgagggctttacggcgattgagaaccgccgctgaaagagcgaagcgaaccttgtcttcaagcaccgaagcatcgattgaaatcgacgccctcttcgacggaatcgacttctacaccaagatcagtcgagcaaggttcgaagaaatgaacgccgatttgttcagggggacactacaacctgtcgagaaagccctgaccgacgctaaaatggacaagggaatgatccacgacatcgtcctcgtcggcggctccacccgaatcccgaaaatccaacaactgctccagaactatttcaacggaaaaccactgaatctctcaattaaccctgacgaagccgtcgcctacggtgccgccgtccaagcggctgtcttgagcggtgaaaccgattcgaagatccaggacgtgctcctcgtagacgtgactcccctatcactaggtatcgaaaccgccggaggcgtgatgacgaagatcatcgaacgcaacgcaagaatcccatgcaagcaaacgcaaaccttcacaacttacgccgacaaccaaccggccgtcaccatccaagtcttcgagggtgaaagagccatgacaaaagacaacaaccttttgggaaccttcgatttaacgggaattccaccagcaccacgtggagtcccgaaaatcgaagtcactttcgacctggacgccaacggcatcctgaacgtctccgctaaagacaccagctccggtaattcacgcaatattaccatcaagaacgacaaaggaagattatcacagaaagacatcgataggatggtggcagaggctgaacaatataaagaggaggatgagaagcagagacagagaattgcggccaggaatcaattagagggttacatcttccaattgaaacagactatttccgaacaagggagcaaattaagcgaagctgacaaagaaactgtaacgagggaatgtgacagctgcttgcagtggttggatgccaacactctggccgagaaggaggaatatgaagataaacagaaacaattatcgtccatctgtgctccaattatggctaaattgtaccaacaaggcggtcagggaggtatgcctggggctggaggaagctgtggacaacaggccggcggctttggaggtcaacgacaaggaggaccaacaattgaagaagttgattaa

SEQ ID NO: 48259 - protein, 646 aa, Tribolium castaneum
MVKSPAVGIDLGTTYSCVGVWQHGKVEIIANDQGNRTTPSYVAFTDTERLLGDAAKNQVAMNPSNTIFDAKRLIGRKFDDPKIQQDIKHWPFKVINDCGKPKIQVEHKGEIKKFAPEEISSMVLTKMKETAEAYLGTSVRDAVITVPAYFNDSQRQATKDAGVIAGLNVMRIINEPTAAALAYGLDKNLKGERNVLIFDLGGGTFDVSILTIDEGSLFEVKATAGDTHLGGEDFDNRLVNHLADEFKRKYKKDLRSNPRALRRLRTAAERAKRTLSSSTEASIEIDALFDGIDFYTKISRARFEEMNADLFRGTLQPVEKALTDAKMDKGMIHDIVLVGGSTRIPKIQQLLQNYFNGKPLNLSINPDEAVAYGAAVQAAVLSGETDSKIQDVLLVDVTPLSLGIETAGGVMTKIIERNARIPCKQTQTFTTYADNQPAVTIQVFEGERAMTKDNNLLGTFDLTGIPPAPRGVPKIEVTFDLDANGILNVSAKDTSSGNSRNITIKNDKGRLSQKDIDRMVAEAEQYKEEDEKQRQRIAARNQLEGYIFQLKQTISEQGSKLSEADKETVTRECDSCLQWLDANTLAEKEEYEDKQKQLSSICAPIMAKLYQQGGQGGMPGAGGSCGQQAGGFGGQRQGGPTIEEVD

SEQ ID NO: 48260 - DNA, 2073 bp, Tribolium castaneum
  CDS (1)..(2073)
atgttggccgctgctcgtgttctcagtcgtaaagctgttgaatgctcgaaatttagctacgatgttgtggggaaaaggaatttcagctacttgacaaacaacacctcctcgtacactttacacccgaaatatgacattcagactcgtttcaagtctgagggcgtcaaaggcgccgttattggcatcgatttgggtactacaaactcatgtgttgccgtcatggaaggcaaacaggcaaaagtaattgaaaattccgaaggttcccgcacaactccctcagttgttgcgtttacgaaagacggtgaacgtttggtgggcatgccggcaaaacggcaagccgtcactaactcagccaacacattctatgccacaaaacggttaattggtagacgattcgatgacagtgaggtcaaaaaagacatgaataacgtttcgtataaaatcgtcaaagcttccaacggcgacgcttgggtgcaaggaagcgacggaaaaatgtattctcccagccagatcggtgcctttattttgacaaaaatgaaagaaacggctgaggcctatttgaatactaaagttaaaaatgctgttatcaccgtgccagcgtactttaacgactcgcaaaggcaggcgacgaaagatgctggacaaattgcaggtttgaacgtcttgagggtcatcaatgagccgacagcggccgcattagcctacggcatggacaaaaccgaggacaaaataattgccgtttacgatttgggcggcggcactttcgatatctcaattctcgaaatccaaaagggcgttttcgaggtgaaatcaaccaacggtgacactttcttgggtggtgaagatttcgacaacgtccttgtcaatcacttagtgtctgaattcaaaaaagagcaggggattgacgttactaaagaccccatggccatgcagcgtctcaaagaagctgccgagaaagctaaaatcgaattatcatcgtcaatgcaaactgatataaatctaccgtatttgacgatggatgcctctgggccaaagcacatgaatctcaaattatctcgctcgaaattcgaaagtctggtcggtgaattggtcaaacgcacagttcagccttgtcagaaggctctaaaagatgccgaagttgctaaaaacgagattggggaggttttgcttgtcgggggtatgacaaggatgccgaaggtgcagagcaccgttcaggatattttcggtaaacagccgagtcgtgccgttaaccctgatgaagctgtggctgttggggctgcagtccaagggggtgttttggctggtgatgtcactgatgtgctcttgttggacgttacaccgttgtctctcggaatcgagactttgggcggtgttttcactagacttatctcgagaaatacaacgattccgactaagaaaagtcaagtgttttcgaccgctgccgatggacaaacacaagtcgagattaaagtacaccaaggtgaacgtgaaatggccgcagataataagcttttggggcaattctcgcttgttggaattccaccagcgccgagaggagtgcctcagattgaagttactttcgatattgatgctaacggtatcgtccatgtctcggcaagggataagggaacaggaaaggaacaacaaattgttatccagtcatctggtggtttgagcaaggaagagatcgagaacatggtgcgcagagctgaagaatacgcaaaggaagataagattaagaaggagcgagttgaagctatcaatcaagctgaaggaattgtgcacgatactgagaccaaaatggaagaatacaaagaccagttgcccaaagaagagtgtgataaattgaaagaagagatcgccaaagttagggaaatgttggcgaagaaagacgaagccgatcccgaagaaatccgcaaagtcacaggcacacttcaacagtcgtcacttaagttgttcgaaatggcgtacaagaagatggcagcagaccgcgaaggcagcggtggcagcagcagcggttcgtccgaacaacaatcagaagaaccgaaggaaaagaaagaagataaaaattaa

SEQ ID NO: 48261 - protein, 690 aa, Tribolium castaneum
MLAAARVLSRKAVECSKFSYDVVGKRNFSYLTNNTSSYTLHPKYDIQTRFKSEGVKGAVIGIDLGTTNSCVAVMEGKQAKVIENSEGSRTTPSVVAFTKDGERLVGMPAKRQAVTNSANTFYATKRLIGRRFDDSEVKKDMNNVSYKIVKASNGDAWVQGSDGKMYSPSQIGAFILTKMKETAEAYLNTKVKNAVITVPAYFNDSQRQATKDAGQIAGLNVLRVINEPTAAALAYGMDKTEDKIIAVYDLGGGTFDISILEIQKGVFEVKSTNGDTFLGGEDFDNVLVNHLVSEFKKEQGIDVTKDPMAMQRLKEAAEKAKIELSSSMQTDINLPYLTMDASGPKHMNLKLSRSKFESLVGELVKRTVQPCQKALKDAEVAKNEIGEVLLVGGMTRMPKVQSTVQDIFGKQPSRAVNPDEAVAVGAAVQGGVLAGDVTDVLLLDVTPLSLGIETLGGVFTRLISRNTTIPTKKSQVFSTAADGQTQVEIKVHQGEREMAADNKLLGQFSLVGIPPAPRGVPQIEVTFDIDANGIVHVSARDKGTGKEQQIVIQSSGGLSKEEIENMVRRAEEYAKEDKIKKERVEAINQAEGIVHDTETKMEEYKDQLPKEECDKLKEEIAKVREMLAKKDEADPEEIRKVTGTLQQSSLKLFEMAYKKMAADREGSGGSSSGSSEQQSEEPKEKKEDKN

SEQ ID NO: 48262 - DNA, 1920 bp, Tribolium castaneum
  CDS (1)..(1920)
atggctaaagcacccgctgttggtatcgatctgggaaccacctactcgtgtgtgggggttttccagcacggaaaagtggaaatcatcgccaacgaccaaggcaacaggaccacaccttcctatgtcgccttcaccgacacggagcgtctcatcggagacgcggccaagaaccaggtcgccatgaaccccaataacacaatttttgatgccaaacgtcttattgggcgtcgattcgacgatcccgccattcaagccgacatgaaacattggccttttgatgtcctcaacgacggcggcaaacccaaaatcaaagtcgaatacaaaggcgaatctaagactttctatcctgaagagatcagttccatggtacttacaaaaatgaaggaaactgccgaagcctatttaggcaaatcggtcacaaatgccgttatcaccgtaccagcctatttcaacgattcgcaaaggcaggcaactaaagatgccggtactatttccggcttgcaagttttgcgtattattaacgaacctacggctgctgccattgcctacggtttggataagaagggaactggggaacgtaatgtcttgatttttgatctgggtggtggtacttttgatgtgagcattttgaccattgaggatggcattttcgaggtcaagtccaccgctggtgatacgcatttgggtggcgaagatttcgataatcgaatggttaatcatttcgtgcaagagtttaagaggaagtataagaaggatttgacttcgaataagcgggctttgcgtcggttgagaacttcgtgcgaaagggcgaaacgtacgctttcgtcctcgactcaagctagtatcgaaatcgattcactgtttgaagggattgatttttacacttccatcactcgggctcgtttcgaagaactcaatgctgatcttttccgctcgactatggaaccggtggagaagtcaatccgtgatgctaagatggacaagagtcagatccatgatatagtgttggttggaggatccacacgtatccccaaagtacaaaaactcctccaggacttcttcaatgggaaagaattgaacaagtcgattaaccctgatgaggctgttgcctatggagctgccgtccaagccgccattttgcacggtgataagtcggaagaggttcaagatttgctacttttggacgttactccactttcattgggtattgaaacagcaggcggtgtgatgactgctttgatcaagcgtaacactactattccaaccaaacaaacgcaaactttcaccacctactctgataaccaacccggtgtattgatccaagtgtacgaaggcgaacgagcgatgactaaagacaataaccttttgggtaaattcgaattgactggaatcccaccggcaccaagaggtgttccccaaatcgaagtcacctttgatattgacgccaacgggattttgaacgtcacagccatcgagaagagcaccaacaaggagaacaaaatcaccatcaccaatgataagggacgtttgagcaaggaagatatcgaacggatggtcaacgaagccgagaagtaccgtaacgaagatgagaagcagaagagtaccattgcggcgaagaacggtctcgagtcgtactgcttcaatatcaagagtaccatggaagatgagaaggtcaaggataaggtcagtgattctgaaaggcagagcgtgctagataaatgcaacgaggttattgcctggttggacgctaaccaattggccgagaaggaggaatacgaacataagcagaaggagttggagaatttgtgtaatcccatcattgccaagatgtatcaaggcgcaggaggtgctccaggaggtatgcccggtgctgcacctggagctggaggtgctggacctaccatcgaggaggtcgattaa

SEQ ID NO: 48263 - protein, 639 aa, Tribolium castaneum
MAKAPAVGIDLGTTYSCVGVFQHGKVEIIANDQGNRTTPSYVAFTDTERLIGDAAKNQVAMNPNNTIFDAKRLIGRRFDDPAIQADMKHWPFDVLNDGGKPKIKVEYKGESKTFYPEEISSMVLTKMKETAEAYLGKSVTNAVITVPAYFNDSQRQATKDAGTISGLQVLRIINEPTAAAIAYGLDKKGTGERNVLIFDLGGGTFDVSILTIEDGIFEVKSTAGDTHLGGEDFDNRMVNHFVQEFKRKYKKDLTSNKRALRRLRTSCERAKRTLSSSTQASIEIDSLFEGIDFYTSITRARFEELNADLFRSTMEPVEKSIRDAKMDKSQIHDIVLVGGSTRIPKVQKLLQDFFNGKELNKSINPDEAVAYGAAVQAAILHGDKSEEVQDLLLLDVTPLSLGIETAGGVMTALIKRNTTIPTKQTQTFTTYSDNQPGVLIQVYEGERAMTKDNNLLGKFELTGIPPAPRGVPQIEVTFDIDANGILNVTAIEKSTNKENKITITNDKGRLSKEDIERMVNEAEKYRNEDEKQKSTIAAKNGLESYCFNIKSTMEDEKVKDKVSDSERQSVLDKCNEVIAWLDANQLAEKEEYEHKQKELENLCNPIIAKMYQGAGGAPGGMPGAAPGAGGAGPTIEEVD

SEQ ID NO: 48264 - DNA, 1908 bp, Prochlorococcus marinus str. AS9601
  CDS (1)..(1908): transl_table=11
atgggtaaggtagtaggaattgatttaggaacaactaatagttgtgtcgctgtaatggaaggtggtaagcctactgtaatagcaaatgctgagggtttcagaactactccgtcagttgttgcatatacaaaaaatcaagatcagcttgttggacaaatagcaaaaagacaagctgtaatgaaccctgaaaatactttttattctgcaaaacgttttgttggtagaagagttgatgaagttaatgaagaatctaaagaagttagttattctgttgaaaaatctggttctagtgtcaaattaaaatgtcctattttggataaacagttttctcctgaagaggtgagttctcaagttttaagaaagctagcagatgatgcaggtaagtatcttggtgataaagttacacaggcagtaattacagttccagcttattttaatgattcccaaagacaggctacgaaagatgctggaaagattgcaggattagaagttctcagaatcgttaatgagccaactgctgcggctttagcgtatggtttggataaagaaaatgaaaaaattcttgtttttgatttagggggaggtacatttgacgtttcagttattgaagctggtgatggagtaactgaagttctatctacatctggagacacacatttaggtggtgatgattttgatagatgcatcgtagatcacttagccaatacttttaaatccaatgagggaatagatctcagacaagataagcaagctttgcaaagattgactgaagctgcagaaaaagcaaaaatagagctctcaaatgctacgcaaagtgaaataaatttaccttttattacagcgacgcctgaaggaccaaaacatttggatttgaaccttactagagcaaagtttgaggaattagcagcttctttaattgataggtgtaagactcctgttgagagagctataagtgatgcaaaaatttctactagtgaaattgatgaagttgttatggtgggaggctcatctagaatacctgctgtcttagatttagttaaaaaaataattggtaaagaaccaaatcaaactgttaatcctgatgaggtagtagctgttggagctgcgattcagggaggggttttagcaggagaggttaaagatatattgttgcttgacgttactccactttctttaggtgtagagactttaggtggagtaatgacaaaaatgatcaaccgaaatactacagtacctacgaagaaatctgaaacatattcaactgctgtagacggtcaaacaaatgttgaaatacacgttttacagggtgaaagagaaatggcttctgataataaaagcttaggaactttcagattagatggtataccttcagcaccaagaggagtaccgcaaatcgaagttactttcgatatcgatgcaaatggtattcttagtgttactgctaaggataaaggtagtggtaaagagcaaagtatttctatcactggtgcttcaacgttatctgataatgaagttgaaaaaatggtaaaagatgctgaatcaaatgcatctgcagataaagaaaaaagagaaaaaatcgatttaaaaaatcaagctgaaacactcgtgtatcagacagaaaaacaactcggtgagttgggagataaaattgatgctgcaacaaagtctaaagttgaagaaaaaagtaattctttaaaagaggcaacttcaaaagaagactatgaatcaatgaaaaaacttcttgaagaactccagcaagaactttatgcagttggttcatctgtttatcagcaacccggtaatcagccaccttcacctggtgcagcaagcggttctgatcagagtgattcaaatgaaaaaggtggagatgatgtaattgatgcagactttactgaaacgaaagattaa

SEQ ID NO: 48265 - protein, 635 aa, Prochlorococcus marinus str. AS9601
MGKVVGIDLGTTNSCVAVMEGGKPTVIANAEGFRTTPSVVAYTKNQDQLVGQIAKRQAVMNPENTFYSAKRFVGRRVDEVNEESKEVSYSVEKSGSSVKLKCPILDKQFSPEEVSSQVLRKLADDAGKYLGDKVTQAVITVPAYFNDSQRQATKDAGKIAGLEVLRIVNEPTAAALAYGLDKENEKILVFDLGGGTFDVSVIEAGDGVTEVLSTSGDTHLGGDDFDRCIVDHLANTFKSNEGIDLRQDKQALQRLTEAAEKAKIELSNATQSEINLPFITATPEGPKHLDLNLTRAKFEELAASLIDRCKTPVERAISDAKISTSEIDEVVMVGGSSRIPAVLDLVKKIIGKEPNQTVNPDEVVAVGAAIQGGVLAGEVKDILLLDVTPLSLGVETLGGVMTKMINRNTTVPTKKSETYSTAVDGQTNVEIHVLQGEREMASDNKSLGTFRLDGIPSAPRGVPQIEVTFDIDANGILSVTAKDKGSGKEQSISITGASTLSDNEVEKMVKDAESNASADKEKREKIDLKNQAETLVYQTEKQLGELGDKIDAATKSKVEEKSNSLKEATSKEDYESMKKLLEELQQELYAVGSSVYQQPGNQPPSPGAASGSDQSDSNEKGGDDVIDADFTETKD

SEQ ID NO: 48266 - DNA, 1905 bp, Prochlorococcus marinus str. MIT 9515
  CDS (1)..(1905): transl_table=11
atggggaaggttgttggaatcgatttaggaacaactaatagttgtgttgctgtgatggaagggggtaaacctactgtaatagcaaatgcagagggtttcagaacaacaccatctgtagttgcatatactaaaaaccaagatcagcttgttggacagattgcaaaacgacaagctgtaatgaaccctgaaaatactttttattcagctaagcgttttgttggtagaagagtcgacgaagttaatgaagaatctaaagatgttagttatgggattgaaaaagctggatcaaatgtaaaattaaaatgtccagttttagataaacaattttctcctgaagaggttagtgctcaggttttaagaaaactttctgaagatgctggtaagtatttaggtgaaaacatcactcaagctgtaataacagttccagcctattttaatgattctcaaagacaggctacaaaagatgcgggtaaaattgcaggattagaggttttaagaataattaatgaacctacagctgcggctttagcttatggattagataaaaaaagtaatgagaggattttagtttttgatttaggaggtggaacttttgatgtttcagttttagaagttggagacggtgttttcgaagttttatcaacatctggggatactcatttaggaggtgatgatttcgatagatgtattgtcaatcatctggcgagcgtttttaaaagcaatgaagggattgacttgagagaggacaaacaagccttacaacgtcttactgaagcagctgaaaaggcaaagattgaactttcaaatgctactcaaagcgaaataaatttacctttcattactgctacaccagatggtccaaagcatcttgatttgaatttgactagagctaattttgaagaactagcctccaagttaatcgatagatgtagagttcctgtagagcaagctcttaaggatgcaaagctttctacaggtgagattgatgaaatagttatggttggaggttcaacaagaatgccagctgtacaggagttagtaaagagagtaacaggtaaagacccgaatcaaactgtaaatccagatgaggttgtagctgtgggtgcagcgatacaagggggtgtgttagcaggtgaggttaaagacatattattgttagacgttactccgttatctctaggtgtggagactttaggaggagtgatgactaagatgattactcgtaatacaacagtaccaactaaaaaatctgagacttactcaactgctgttgatggtcaaactaatgtcgaaattcatgtccttcaaggagagagggaaatggcctcagataataaaagtttaggaacatttagacttgacgggattccctccgcaccaaggggtgttccacaaatagaggtaacatttgatattgatgccaatggaatcctaagtgttactgctaaagataaaggaagtggaaaggagcaatctatctcaataacaggtgcttcaactctctcagataatgaagttgataaaatggtaaaagatgcagagtcaaatgcttcagtagataaagaaaaaagagaaaagattgatttaaagaatcaagcagaaactctcgtttatcaaacagaaaaacagttaggggaacttggtgacaaggttgacgattctgctaaagcgaaggtagaagaaaaaagtaaagctttgaaagaggctacttctaaagaagattatgattctatgaagaaattgttagaggaactacaacaagaactttatgcaataggctcttcagtctatcaacagccaggtaatcaaccacctgccccaggaggtccaaacgcaaatgcttctgatgataaaggtcctgatgatgatgttattgatgctgactttacagaaacaaaagattaa

SEQ ID NO: 48267 - protein, 634 aa, Prochlorococcus marinus str. MIT 9515
MGKVVGIDLGTTNSCVAVMEGGKPTVIANAEGFRTTPSVVAYTKNQDQLVGQIAKRQAVMNPENTFYSAKRFVGRRVDEVNEESKDVSYGIEKAGSNVKLKCPVLDKQFSPEEVSAQVLRKLSEDAGKYLGENITQAVITVPAYFNDSQRQATKDAGKIAGLEVLRIINEPTAAALAYGLDKKSNERILVFDLGGGTFDVSVLEVGDGVFEVLSTSGDTHLGGDDFDRCIVNHLASVFKSNEGIDLREDKQALQRLTEAAEKAKIELSNATQSEINLPFITATPDGPKHLDLNLTRANFEELASKLIDRCRVPVEQALKDAKLSTGEIDEIVMVGGSTRMPAVQELVKRVTGKDPNQTVNPDEVVAVGAAIQGGVLAGEVKDILLLDVTPLSLGVETLGGVMTKMITRNTTVPTKKSETYSTAVDGQTNVEIHVLQGEREMASDNKSLGTFRLDGIPSAPRGVPQIEVTFDIDANGILSVTAKDKGSGKEQSISITGASTLSDNEVDKMVKDAESNASVDKEKREKIDLKNQAETLVYQTEKQLGELGDKVDDSAKAKVEEKSKALKEATSKEDYDSMKKLLEELQQELYAIGSSVYQQPGNQPPAPGGPNANASDDKGPDDDVIDADFTETKD

SEQ ID NO: 48268 - DNA, 1914 bp, Prochlorococcus marinus str. MIT 9303
  CDS (1)..(1914): transl_table=11
atgggaaaggttgttggcattgaccttggaaccacgaacagttgtgtcgccgtaatggagggtggcaagcccgtcgtgattgctaacgctgaagggtttagaacaactccctccgtggtcgcgtataccaaaaatcaggatcaattggttggccagatcgccaagcgccaagcggtgatgaacactgataacaccttttattcagcgaagcgcttcgttggtcgtcgggttgatgaggtgaacgaagaatcgaaggaagtgagctatgaggttgagaagtctggctctaatgtgaggttgaagtgcccggttcttgataagcagttttctcctgaggaagtaagtgctcaggtgttgcgcaagttagctgaggacgctggtaagtatctcggtgagaacgtaacccaggccgtgatcacggtgcctgcctattttaatgattcacagagacaggccaccaaagacgccggcaagatagctggcttagaggtgctacgcatcattaacgagccaaccgcggctgcgttggcgtatggcctcgataagaagagcaatgagcgaattctggtgtttgacctgggtggtggaacctttgatgtttctgtgctcgaggtaggtgatggtgtttttgaggttctatctacctctggtgacactcatctaggcggagatgatttcgacaaagtgattgttgatcatctggctgcaacttttaaggccaatgaaggtattgatctgcgtcaggataagcaggctcttcagcggctcactgaggcggcagagaaagccaagatcgagctttccagtgctacgcaaagtgagatcaacctgccatttattactgctacctctgaggggcctaagcatctcgatctaaccctgacacgtgccaaatttgaggaattggcttcaaagctgattgatcgttgtcgtgtacctgtggagcaggctcttaaggacgccaaactctcttctggtgaacttgacgaaatcgtgatggtgggcggctccagccgcatgcctgcagttcaggaacttgttaagagggttacgggtaaagatcccaatcagactgtcaatcctgatgaggttgttgcagtaggcgctgccatacagggaggggtattggctggtgaagttaaggacatcttgctgcttgacgtcactcctctctccttgggtgtggagactcttggtggtgtgatgaccaagatgattacgcgtaatacgactgttcctacgaagaagtcggaaacgtattccacggcagttgatggacaaaccaatgtggagattcacgtgcttcagggtgaacgtgagatggcctctgataataagagcttgggaacattccgtcttgatggaattcctcctgcccctcgtggtgttcctcagattgaggtgacctttgatatcgatgctaacggtatccttagtgttaatgccaaggataagggtagcggtaaggagcaaagcatttcgattactggtgcttcaaccctctctgaaaatgaggttgagaagatggttaaggatgctgagaccaatgcctcagctgataaagaaaagcgtgagcgcattgacattaagaaccaggctgagactcttgtttatcaggcggaaaagcagctcggagagttggctgacaaggttgatgctgattcaaaggcaaaggtggaagataagcgcgtcaagcttaaggctgccattgagaaagatgactttgatgcgatgaagtcactattggaggaactgcagcaggagctttataccttaggcgcttctgtttatcagcaggcgggtgctgccgcggcggcagaatccggtgctgatgctggcgcggctggtgctggtgctggtgattccagtagtggtgatgatgtgattgacgcagaatttactgagtcgaagtga

SEQ ID NO: 48269 - protein, 637 aa, Prochlorococcus marinus str. MIT 9303
MGKVVGIDLGTTNSCVAVMEGGKPVVIANAEGFRTTPSVVAYTKNQDQLVGQIAKRQAVMNTDNTFYSAKRFVGRRVDEVNEESKEVSYEVEKSGSNVRLKCPVLDKQFSPEEVSAQVLRKLAEDAGKYLGENVTQAVITVPAYFNDSQRQATKDAGKIAGLEVLRIINEPTAAALAYGLDKKSNERILVFDLGGGTFDVSVLEVGDGVFEVLSTSGDTHLGGDDFDKVIVDHLAATFKANEGIDLRQDKQALQRLTEAAEKAKIELSSATQSEINLPFITATSEGPKHLDLTLTRAKFEELASKLIDRCRVPVEQALKDAKLSSGELDEIVMVGGSSRMPAVQELVKRVTGKDPNQTVNPDEVVAVGAAIQGGVLAGEVKDILLLDVTPLSLGVETLGGVMTKMITRNTTVPTKKSETYSTAVDGQTNVEIHVLQGEREMASDNKSLGTFRLDGIPPAPRGVPQIEVTFDIDANGILSVNAKDKGSGKEQSISITGASTLSENEVEKMVKDAETNASADKEKRERIDIKNQAETLVYQAEKQLGELADKVDADSKAKVEDKRVKLKAAIEKDDFDAMKSLLEELQQELYTLGASVYQQAGAAAAAESGADAGAAGAGAGDSSSGDDVIDAEFTESK

SEQ ID NO: 48270 - DNA, 1935 bp, Mannheimia succiniciproducens MBEL55E
  CDS (1)..(1935): transl_table=11
atgaatttaacgaggagaattaaaatgggcaaaattattggtattgacttaggtacaacaaactcttgcgtagcggtaatggacggcgataaaccgcgtgtaattgaaaatgcggaaggtgaacgtacaaccccgtcaattatcgcatatacacaagataacgaagtattggtaggtcaaccggcaaaacgccaggcggtaacaaacccgaaaaatacattatttgcaatcaaacgtttaatcggtcgtcgttttgaagaccaagaagtacaacgcgacgttaacattatgccgttccaaattatcaaagcggacaacggcgatgcatgggttgatgtgaaaggtgataaattagcgccaccgcaaatctctgccgaagtattgaaaaaaatgaagaaaaccgcagaagatttcctgggcgaaacggtaaccgaagcggtaattacagtacctgcatattttaacgatgcgcaacgccaggcaactaaagatgccggtcgtatcgcaggtttagaagttaaacgtatcatcaacgaaccgacagcggcggcattggcttatggtttagacaaaggtaaaggtaaccaaactatcgcggtttatgacttaggtggcggtacttttgacttatcaatcattgaaattgacgaagtgggcggtgaaaaaacttttgaagtattggcaaccaacggtgatactcacttaggtggtgaagacttcgataaccgtgtaattaattacttggttgatgagtttaaaaaagaacagggtgtggatttacgcaacgatccgttagcaatgcaacgtttgaaagaagcgggcgaaaaagcgaaaatcgaactttcttccgcgcaacaaactgatgtgaatcttccatacatcacagcggatgcaacaggtccaaaacatttaaatattaaattgacccgtgcgaaattagaagcattggtagaagatttagtagcgcgttcaatggaacctgtaaaagtagcgttaagcgatgccggtttaagcgtgtcacaaattgatgatgttatcctggtaggcggtcaaacccgtatgccgttggttcaacaaaaagtggccgaattcttcggtaaagaaccgcgtaaagacgtaaaccctgacgaagcggtggcggttggtgcggcggtacaaggcggcgtattagcaggtaacgtaaccgacgtattattgttagacgtaacaccgttatcattaggtatcgaaactatgggcggcgtgatgactaccttaattgagaaaaatactacgattccgactaaaaaatcgcaagtattctcaaccgcggaagataaccaaagtgcggtaactattcacgtattacaaggtgaacgtaaacaggcgagtgccaataagtctttaggtcaattcaacctggaaggcattaacccggcaccgcgcggtatgccgcaaattgaagtgactttcgatatcgacgcggacggtattatccatgtttcggcgaaagataaaggcacaggtaaagaacagcaaattaccattaaagcttcttcaggtttaagcgatgaagaaattcaacaaatggtacgcgatgcggaagcaaacgcagaagccgaccgtaaatttgaagaattagttcaagcccgtaaccaggccgatgcgttggttcacagcacacgtaaacaattaacggaagccggtgacaaattatcagcagacgataaagcaccgattgaaaaagcggtaaatgaacttgaagctgcggcgaaaggtgaagataaagctgaaatcgaagcgaaaatccaggcattaattcaggtttccgaaaaattaatgcaagcggcgcaacaacaagcccaagcggatgccggtgcgcaacaggcacaaggtaataacggcggtgatgatgttgtcgatgccgaatttgaagaagtgaaagacaataaataa

SEQ ID NO: 48271 - protein, 644 aa, Mannheimia succiniciproducens MBEL55E
MNLTRRIKMGKIIGIDLGTTNSCVAVMDGDKPRVIENAEGERTTPSIIAYTQDNEVLVGQPAKRQAVTNPKNTLFAIKRLIGRRFEDQEVQRDVNIMPFQIIKADNGDAWVDVKGDKLAPPQISAEVLKKMKKTAEDFLGETVTEAVITVPAYFNDAQRQATKDAGRIAGLEVKRIINEPTAAALAYGLDKGKGNQTIAVYDLGGGTFDLSIIEIDEVGGEKTFEVLATNGDTHLGGEDFDNRVINYLVDEFKKEQGVDLRNDPLAMQRLKEAGEKAKIELSSAQQTDVNLPYITADATGPKHLNIKLTRAKLEALVEDLVARSMEPVKVALSDAGLSVSQIDDVILVGGQTRMPLVQQKVAEFFGKEPRKDVNPDEAVAVGAAVQGGVLAGNVTDVLLLDVTPLSLGIETMGGVMTTLIEKNTTIPTKKSQVFSTAEDNQSAVTIHVLQGERKQASANKSLGQFNLEGINPAPRGMPQIEVTFDIDADGIIHVSAKDKGTGKEQQITIKASSGLSDEEIQQMVRDAEANAEADRKFEELVQARNQADALVHSTRKQLTEAGDKLSADDKAPIEKAVNELEAAAKGEDKAEIEAKIQALIQVSEKLMQAAQQQAQADAGAQQAQGNNGGDDVVDAEFEEVKDNK

SEQ ID NO: 48272 - DNA, 1950 bp, Legionella pneumophila subsp. pneumophila str. Philadelphia 1
  CDS (1)..(1950): transl_table=11
ttggagcaaaatagaatggctaaaataataggtatagacctgggtactacgaactcttgtgttgctgtcatggaaggtgacaaaccgaaggtaattgaaaatagtgaaggtcacagaacaactccttctatcgtagcatttactgatgataatgaaatattggtaggccaatcagccaagcgtcaatccgtgactaacccagagaaaacgctgtttgcgattaaacgattaattgggcgtcgatttgatgatcctatcgtgcaaaaagatattaagatggttccctacaaaattatgaaagcggacaatggggatgcttgggttagagtcaaagatcaagataaggcaccaccacaaatttctgctgaagtgttaagaaaaatgaaaaaaacagcagaagattatttgggtgaagaagtaaaagaagcagtgattactgtacctgcctatttcaacgattcgcaacgccaggcaaccaaagatgctggtcgtattgctggcctggaagtaaaacgaatcattaatgagcctaccgctgctgcactggcttatggtatggataaaaaacgcggtgactctgttattgcggtatatgatttagggggaggaacttttgatatttcaattattgaaattgccgaagtggatggtgaacatcaatttgaagtacttgcaaccaatggtgataccttcctcggtggagaagattttgatttggctttaattgagtatttggcttctgagttcaagaaagacactggtattgatttgcataatgatcctcttgctctgcaacgcttgaaagaggctgccgagaaagcaaaaattgaattgtcatctgcacaacaaactgatgtcaatttgccttacattacagcagatgcttctgggccaaaacatttaaatatcaaattgactcgcgcaaaactggaatctttagtggagaaactggttgagagaactattgagccatgtaaaacagctttaaaagatgcagggcttactgtctcacaaatcaacgaagttattctggtcggtgggcaaactcgtatgcctctggtacaaaaaactgtggaagaattctttggcaaagaacctcgtaaggatgtaaaccctgatgaggctgtggcagtaggtgctgcaattcaggcagcagtattgtccggtgaagtgaaagacattcttttactcgatgtcactcctttgtctctcggtatagaaaccatgggtggtgtaatgaccaaactcattgaaaaaaacacaactattcctacaaaggctacacaagtgttttcaacagccgatgataatcagacagcagtgactgtgcatgtattgcagggtgaaagagaacaggcttcagcaaacaagtcactgggacggtttgatttgcgtgacatccctcctgctcctcgtggtgttcctcaaattgaagtaacttttgatattgatgccaatggtatcttgaatgtttctgccaaagacaaggcaactggcaaggcacaatccattgtcatcaaagcttccagtggtttaagtgaagaagaggttgctgctatggtgaaagatgcccaatcgcatgctgaagaagataagaaattcaaggaaatggcagaactgcgcaatcaggcagatagtttgattcatagctgtgaaaaatctatgaaagatttggctgatgagttgtctgaggatgagaaaagaggcatcgaaacagcaatttctgagctgaaagaggcggtgcaaggaactgacaaggctcgtattgaagacaagctgaaagtattgacagacgcttccgcaaaaatggctgaacgtatttatgctaaaaaatcgtctgaaggtcaggcagctcaggggcaaacacaatctcaggaatctacaaaacctgcggaagagggagttgttgatgctgagtttgaagaagttaaagaagaggataaaaagtaa

SEQ ID NO: 48273 - protein, 649 aa, Legionella pneumophila subsp. pneumophila str. Philadelphia 1
MEQNRMAKIIGIDLGTTNSCVAVMEGDKPKVIENSEGHRTTPSIVAFTDDNEILVGQSAKRQSVTNPEKTLFAIKRLIGRRFDDPIVQKDIKMVPYKIMKADNGDAWVRVKDQDKAPPQISAEVLRKMKKTAEDYLGEEVKEAVITVPAYFNDSQRQATKDAGRIAGLEVKRIINEPTAAALAYGMDKKRGDSVIAVYDLGGGTFDISIIEIAEVDGEHQFEVLATNGDTFLGGEDFDLALIEYLASEFKKDTGIDLHNDPLALQRLKEAAEKAKIELSSAQQTDVNLPYITADASGPKHLNIKLTRAKLESLVEKLVERTIEPCKTALKDAGLTVSQINEVILVGGQTRMPLVQKTVEEFFGKEPRKDVNPDEAVAVGAAIQAAVLSGEVKDILLLDVTPLSLGIETMGGVMTKLIEKNTTIPTKATQVFSTADDNQTAVTVHVLQGEREQASANKSLGRFDLRDIPPAPRGVPQIEVTFDIDANGILNVSAKDKATGKAQSIVIKASSGLSEEEVAAMVKDAQSHAEEDKKFKEMAELRNQADSLIHSCEKSMKDLADELSEDEKRGIETAISELKEAVQGTDKARIEDKLKVLTDASAKMAERIYAKKSSEGQAAQGQTQSQESTKPAEEGVVDAEFEEVKEEDKK

SEQ ID NO: 48274 - DNA, 1890 bp, Anabaena variabilis ATCC 29413
  CDS (1)..(1890): transl_table=11
atggcaaaaatcgttggtattgatttaggaactaccaactcctgtatagctgtaatagagggcggacaacccgtcgtcattccgaacacagaaggcggtcgcacaactccgtctgtggttgcctacaccaagaagggcgaaaaacttgtcgggcaaattgccaagcgccagggtgtaatgaacccagaaaacactttttattctgtgaagcggttcatcgggcgcaggtatgatgaagtcacccaagaggcaaaacaagttacttacaaagtggtacgtgacagtaatggcaacgtcaagctacactgtcccgctctgaacaaggaattttcacccgaagaaatcgcggctgaggtagtccgcaagctgatagatgatgccagcacatatctgggggaaccagtgaggcaagcggtaattaccacccctgcctatttcaatgactctcaacggcaggccaccaaagatgccggtagaattgccgggattgaagttctgcgaattatcaacgagccaacggcggctgccctcgcttacggacttgacaaaaaaactaacgaaactatcttggtatttgacttaggcggtgggacgtttgatgtgtctatcctagaagtgggtgatggtgtgtttgaagtgaaagctaccagtggcgacacccacttgggcggtgatgactttgataagagaatcgtagactggctagcaactgaattccagcgtaacgaaggcatcgacctccgtaaagacaaacaagccctgcaacgcctcaccgaagcagcagaaaaagccaaaattgaactgtcaggcgcgacacagacgaacattaacttaccttttattactgcaaccccggaaggcccgaaacatctagatatgaccttaacgcgggtacagttcgagcaaatgtgcgccgacttgttcgatcgcagccgcattcctgtcgaacaagctctgcgcgatgctaaactgagtcccgcagatattgacgaagtaatcctagtgggtggtgcaactcgaatgccggctgtccagcaactggtacggcagataataggcaaagacccacaccaaggtgtcaacccggatgaagtcgtagcagtgggcgcagcgattcaggcgggtgtgcttgggggtgaggtaaaagacgtgctgctcctagatgtcacgccgttgtcgctaggtgttgaaactctaggtggcgtgacgaccaagattattccgcgcaataccactgtcccagtgaagaagtctgaggtgttctcaacggcggctgacgcacaaacaaacgtagaaatccatgttctgcaaggcgaacgcgaaatggcatccgacaacaagagcctgggaaccttccgactagatgggattcctccagctcccagaggtatgccacagatcgaagttacttttgacattgatgctaacgggattctgtcagcaactgccagagaaaaagccacaggtaaagaacagtccattagcatcacaggtgcgtctaccctcgataaatctgaagttgagcggatggtgaaagaagccgatcgcaatgcggaagaagaccgtaggcggcgcgaacaaattgataccaaaaatatggcggattctgttgcctatcaagccgagaaacaacttcaggatttgggcgacaaagtgccaccagcagacaagtcccgcgtggaaggcttaattcgagacttgcgtcaggcaattgagcagaacaacatcgatcgcatgaagtccctcaccaacgaaattcaacaagccctgatgcaaatcggcactgcggtctactcacaagcaggtgcatctccaaacggtggtacttctacagaccgtcaaggcggcggtgaagatgtcatcgatgcagactttgtggaacaaaagtaa

SEQ ID NO: 48275 - protein, 629 aa, Anabaena variabilis ATCC 29413
MAKIVGIDLGTTNSCIAVIEGGQPVVIPNTEGGRTTPSVVAYTKKGEKLVGQIAKRQGVMNPENTFYSVKRFIGRRYDEVTQEAKQVTYKVVRDSNGNVKLHCPALNKEFSPEEIAAEVVRKLIDDASTYLGEPVRQAVITTPAYFNDSQRQATKDAGRIAGIEVLRIINEPTAAALAYGLDKKTNETILVFDLGGGTFDVSILEVGDGVFEVKATSGDTHLGGDDFDKRIVDWLATEFQRNEGIDLRKDKQALQRLTEAAEKAKIELSGATQTNINLPFITATPEGPKHLDMTLTRVQFEQMCADLFDRSRIPVEQALRDAKLSPADIDEVILVGGATRMPAVQQLVRQIIGKDPHQGVNPDEVVAVGAAIQAGVLGGEVKDVLLLDVTPLSLGVETLGGVTTKIIPRNTTVPVKKSEVFSTAADAQTNVEIHVLQGEREMASDNKSLGTFRLDGIPPAPRGMPQIEVTFDIDANGILSATAREKATGKEQSISITGASTLDKSEVERMVKEADRNAEEDRRRREQIDTKNMADSVAYQAEKQLQDLGDKVPPADKSRVEGLIRDLRQAIEQNNIDRMKSLTNEIQQALMQIGTAVYSQAGASPNGGTSTDRQGGGEDVIDADFVEQK

SEQ ID NO: 48276 - DNA, 1962 bp, Anabaena variabilis ATCC 29413
  CDS (1)..(1962): transl_table=11
atgggaaaagttattgggatcgacttaggcacgacaaatagttgtgttgcggttttggaaggtggtcaaccgatagtgatcgctaattctgaaggcggaagaactacaccaagtattgtggggtttggcaaaagtggcgatcgcttggtcggtcaactagcaaaacgccaagctgtaactaatgccgaaaatacgatttttagtattaaacggtttatcggtcgtcgttgggaagatacagaaatagaacgcgatcgtgtaccttatggttgtgtcaaaggtcgagacgatactgttgatgtgcagattcgtggacgcaattacacgcctcaagaaatatctgctatggttctgcaaaaacttaagcaagatgcagaaaattttttgggtgaagcagttacacaagcagtaattaccgtacctgcctattttactgatgctcaaagacaagccactaaagatgctggtactattgccgggctggaagtcttacgaattatcaatgaaccaacggctgcggctttagcttttggactagaaaagcaagatcaagagcagctaattttagtttttgacttgggcggcggaacttttgacgtatcaatcctccaattaggggacggtgtatttgaagtcaaagccaccggtggtaataatcaattaggcggtgatgactttgacggctgtgtcgtgtgttggatgattgaacgcttccaacaacaggaaaaaatcgacctagcccaagataagatggcgctgcaacgcttacgagaagcagccgagaaagccaaaattgaactctccagcatggcaagtacctccattaacttgccttttattacggctgatgaaactggacccaagcatctagaaatggaacttagccgttctaagtttgaagagttggtagggcagttaattgaagctaccatccagccaatgattcaagccctcaaagatgcagacctgaaaccacaagatatagataagattattttggtgggtggttctacccgtattccggcggtgcagaatgccttaatcaagttttttaatggtaaagccccagaccgttctgttaatccggatgaagccgtagcactgggtgcagcaattcaagctggggtactaggtggcgaagttgataatctcctactactagatgtcacacctttatctctagggattgaaactttaggagaagtattcaccaaaatcattgaacgtaacaccacaattcctactagcaaatctcaaatattttccactgctgtggatggtcaaacctcggtagaaatccacatcctccaaggtgaacggacaatggcacgggataacaagagcttaggcaaatttcttttggcaggcattcccccagcaccccgtggagtcccacaaatcgaagtttcctttgaaattgatgtcaacggcattctcaaagttgctgctcaagataaaggcacaggcagagaacaaagtattagaattactaatactggtggattaagtaccaatgaagtggaaagaatgcggcaagaagcagaagtttttgccgaagaagatagaagacgcaaagaactggtcgaactaaaaaatcaagcagataatttgttgattatttatgaatctaccttaaaagacaatggtgaattaattggagaacaaataaaagttctagccaacgaaaaagttgcacaaattcagagtgtaatgactaatcctgccatttccctgaaagagtttcaacaatgtttagatgatttccaacaaaccctcttttctatcggtgctaatgtttaccaacgagctaacactcaaaccgatgatgaagtagaggtaatatctgatagttcatcacctttagatatagaacaccccatcagtggaaccttaataccacaatttaactttgattttgatgatgaaagtacagcacaagctgattatgaagcgatagattag

SEQ ID NO: 48277 - protein, 653 aa, Anabaena variabilis ATCC 29413
MGKVIGIDLGTTNSCVAVLEGGQPIVIANSEGGRTTPSIVGFGKSGDRLVGQLAKRQAVTNAENTIFSIKRFIGRRWEDTEIERDRVPYGCVKGRDDTVDVQIRGRNYTPQEISAMVLQKLKQDAENFLGEAVTQAVITVPAYFTDAQRQATKDAGTIAGLEVLRIINEPTAAALAFGLEKQDQEQLILVFDLGGGTFDVSILQLGDGVFEVKATGGNNQLGGDDFDGCVVCWMIERFQQQEKIDLAQDKMALQRLREAAEKAKIELSSMASTSINLPFITADETGPKHLEMELSRSKFEELVGQLIEATIQPMIQALKDADLKPQDIDKIILVGGSTRIPAVQNALIKFFNGKAPDRSVNPDEAVALGAAIQAGVLGGEVDNLLLLDVTPLSLGIETLGEVFTKIIERNTTIPTSKSQIFSTAVDGQTSVEIHILQGERTMARDNKSLGKFLLAGIPPAPRGVPQIEVSFEIDVNGILKVAAQDKGTGREQSIRITNTGGLSTNEVERMRQEAEVFAEEDRRRKELVELKNQADNLLIIYESTLKDNGELIGEQIKVLANEKVAQIQSVMTNPAISLKEFQQCLDDFQQTLFSIGANVYQRANTQTDDEVEVISDSSSPLDIEHPISGTLIPQFNFDFDDESTAQADYEAID

SEQ ID NO: 48278 - DNA, 1917 bp, Geobacter metallireducens GS-15
  CDS (1)..(1917): transl_table=11
atgagcaaagtcatcggtatcgacctgggtaccaccaactcctgcgttgccatcatggaggggggggagcccgttgtcatagccaactccgaggggagccgcaccacgccgtccatggtggcctttgccgagagcggcgagcgtctggtgggacagcaggccaagcgccaggcagtcaccaacccggagaacaccctcttcgccatcaagcgcctcatcggccgcaagttcgacaccgacgaggtccgcaaggacatctccatctcccccttcaagatcgtcaaggccgacaacggcgacgcctgggtggacgtacggggcaagatgtactccccccctgaggtctcggccatcgtgctccagaagatgaagaagaccgctgaggactacctcggtgagacggtcaccgacgcggtcatcaccgtgccggcctacttcaacgactcccaacgccaggccaccaaggacgccggcaagatcgcggggctcaacgtcctgcggatcatcaacgagccgaccgctgcggccctggcctacggcctcgacaagaagaaggacgagaagatcgccgtcttcgacctgggtgggggtaccttcgatatctccatcctggagctgggtgatggcgtgttcgaggtgaagtccaccaacggcgacaccttcctcgggggcgaggacttcgaccagcgggtcatcgactggatcgccgacgagttcaagaaggaccaggggattgatctccgcggcgacaagatggccctccagcgcctgaaggaggcggcggagaaggccaagtgcgagctctcctcctccatggagaccgacatcaacctgccgttcattaccgccgacgccaccgggcccaagcacctcaccatgaagctctcccgtgccaagctggaggccctctgcgccgagctcctcgacaagctggaaggtccctgccgcaccgccctcaaggatgccggcctctccccctccgaggtggacgaggtgatcctcgtggggggcatgacccggatgccggccgtccagaagcgggtccaggaaatcttcggcaaggcacccaacaaaggggttaaccccgacgaagtcgttgccatcggcgctggcatccagggcggggttctccggggcgatgtgaaagacgtgctcctgctggacgtgacgccgctctccctggggatcgagaccctcggcagcgtcatgaccaagctcattgacaagaacaccaccatcccgtgccggaaatcccaggtcttctccacggccagcgacaaccagccggcggtcaccatccatgtcctccagggcgagcgggagatggcctccgacaacaagaccctcggcaacttcgagctgaccggcatcccgccggcaccccgcggtgtcccccagatcgaggtcaccttcgacatcgatgccaacggcatcgtccacgtgtcggccaaggacctcggcaccggcaaggagcagtcgatccggatcaccgcttcgtcgggcctctccaaggaggagatcgacaagatggtccgggaggccgagtcccacgccgccgatgacaagaagaagcgggagttgatcgaggcccgcaaccatgccgacaccctggcctactccaccgaaaagtccctcaaggagtacggcgacaagatcggcgacgacgagaagaagaagatcgaagaggccgtggccgccctcaagaaggccatggaaggggacgacgtcgacgccatcaaacaggccaccgacgccctgacccaggcatcccacaaactggccgaggcggtctacgccaagacccagaccgagggcggagcccagccgggcgccgaggccgacggcgacaccggcgccaagggtggcgagaaggtggtggatgccgactttgaagaagtgaaggacgacaagaagtaa

SEQ ID NO: 48279 - protein, 638 aa, Geobacter metallireducens GS-15
MSKVIGIDLGTTNSCVAIMEGGEPVVIANSEGSRTTPSMVAFAESGERLVGQQAKRQAVTNPENTLFAIKRLIGRKFDTDEVRKDISISPFKIVKADNGDAWVDVRGKMYSPPEVSAIVLQKMKKTAEDYLGETVTDAVITVPAYFNDSQRQATKDAGKIAGLNVLRIINEPTAAALAYGLDKKKDEKIAVFDLGGGTFDISILELGDGVFEVKSTNGDTFLGGEDFDQRVIDWIADEFKKDQGIDLRGDKMALQRLKEAAEKAKCELSSSMETDINLPFITADATGPKHLTMKLSRAKLEALCAELLDKLEGPCRTALKDAGLSPSEVDEVILVGGMTRMPAVQKRVQEIFGKAPNKGVNPDEVVAIGAGIQGGVLRGDVKDVLLLDVTPLSLGIETLGSVMTKLIDKNTTIPCRKSQVFSTASDNQPAVTIHVLQGEREMASDNKTLGNFELTGIPPAPRGVPQIEVTFDIDANGIVHVSAKDLGTGKEQSIRITASSGLSKEEIDKMVREAESHAADDKKKRELIEARNHADTLAYSTEKSLKEYGDKIGDDEKKKIEEAVAALKKAMEGDDVDAIKQATDALTQASHKLAEAVYAKTQTEGGAQPGAEADGDTGAKGGEKVVDADFEEVKDDKK

SEQ ID NO: 48280 - DNA, 1938 bp, Prochlorococcus marinus str. MIT 9312
  CDS (1)..(1938): transl_table=11
atggagaatatcaaatataagaatttacccatgggtaaggttgtaggaatcgatttaggaacaactaatagttgtgtcgctgtaatggaaggtggtaaacccactgtaatagcaaatgctgagggtttcagaactactccatcagttgttgcatatacaaaaaatcaagatcagcttgttggacaaatcgcaaaaagacaagctgtaatgaatcctgaaaatactttttattctgcaaagcgttttgtaggtcgaagagttgatgaagttaatgaagaatctaaagaagttagttattctgttgaaaaatctggctctagtgtcaaattaaagtgccctattttaaataagcagttttctcctgaagaggtaagttctcaagttttaagaaagttagcagatgatgcaggtaaataccttggccaacaagttacacaggctgtaattacagttccagcttattttaatgactctcaaaggcaggctacaaaagacgcaggaaagattgctggtttagaagttctcagaattgtgaatgagccaactgctgcagctttagcgtatggtttggataaagaaaatgaaaaaattcttgtttttgatttaggtggaggaacatttgatgtctcagttattgaagctggtgatggagtcactgaagtcctatctacatctggagatacccatcttggtggtgatgattttgatagatgtatcgtagatcatttagctagtaattttaaatcaaatgaggggatcgaccttagacaagataagcaggctttacaaagactgactgaagcagcagaaaaagcaaaaatcgagctttctaatgctacgcaaagtgaaataaatttaccttttatcacagcgacccctgaaggtccaaaacatttggatttgaacttaactcgagcaaagtttgaggaattagccgcttctttaattgataggtgcaagactccagttgagagagctataagtgatgcaaaaatttctactagtgaaattgatgaagttgtaatggtgggaggctcatcaagaatacctgctgttttagatttggttaaaaaaataattggtaaagaaccaaatcaaactgttaatcctgatgaagtggtagctgttggagctgccattcagggaggggttttagcaggagaggttaaagatatattgttgcttgacgttactccactttctttaggcgtagagactttagggggagtaatgacaaaaatgataaatcgaaatactacagtgcctactaagaaatctgaaacatattcaactgctgtggacggtcaaacaaatgttgaaattcacgtattacagggtgaacgggaaatggcttctgataacaaaagtttaggaacttttagattggatggcataccttcagcaccaagaggcgttccgcagattgaagttacattcgatattgatgcaaatggtattctgagtgttactgctaaagataagggtagtggtaaagaacaaagtatttccataactggtgcttctactttatccgataatgaagtagaaaaaatggtaaaagatgctgaatcaaatgcatctgctgataaagataaaagagaaaaaattgatttaaagaatcaagctgaaacacttgtttatcagacagaaaagcaacttagtgaactgggagataaaattgatgctgcagcaaagtctaaagttgaagaaaaaagtaatgctttaaaagaggcaacatcaaaagaagattatgaatcaatgaaaaaattgcttgaagagcttcagcaagaactctatgcagttggctcatctgtttatcagcaacccggtaatcagcctccatcccctggctcaacaggtagtcctgatcagaacgactcaaatgaaaaagatggagatgatgtaattgatgcagacttcactgaaacaaaagattaa

SEQ ID NO: 48281 - protein, 645 aa, Prochlorococcus marinus str. MIT 9312
MENIKYKNLPMGKVVGIDLGTTNSCVAVMEGGKPTVIANAEGFRTTPSVVAYTKNQDQLVGQIAKRQAVMNPENTFYSAKRFVGRRVDEVNEESKEVSYSVEKSGSSVKLKCPILNKQFSPEEVSSQVLRKLADDAGKYLGQQVTQAVITVPAYFNDSQRQATKDAGKIAGLEVLRIVNEPTAAALAYGLDKENEKILVFDLGGGTFDVSVIEAGDGVTEVLSTSGDTHLGGDDFDRCIVDHLASNFKSNEGIDLRQDKQALQRLTEAAEKAKIELSNATQSEINLPFITATPEGPKHLDLNLTRAKFEELAASLIDRCKTPVERAISDAKISTSEIDEVVMVGGSSRIPAVLDLVKKIIGKEPNQTVNPDEVVAVGAAIQGGVLAGEVKDILLLDVTPLSLGVETLGGVMTKMINRNTTVPTKKSETYSTAVDGQTNVEIHVLQGEREMASDNKSLGTFRLDGIPSAPRGVPQIEVTFDIDANGILSVTAKDKGSGKEQSISITGASTLSDNEVEKMVKDAESNASADKDKREKIDLKNQAETLVYQTEKQLSELGDKIDAAAKSKVEEKSNALKEATSKEDYESMKKLLEELQQELYAVGSSVYQQPGNQPPSPGSTGSPDQNDSNEKDGDDVIDADFTETKD

SEQ ID NO: 48282 - DNA, 1920 bp, Rhodospirillum rubrum ATCC 11170
  CDS (1)..(1920): transl_table=11
atgagcaaggttatcggcatcgacctcggcacgacgaattcgtgcgttgccgttatggacggcaaggatgtccgggttatcgagaacgcggaaggggcgcgtaccacgccctcgcaggtcgctttcactgaatcgggcgaacgtctggtcggccagccggccaagcgccaggcggtgaccaatcccgagaataccctgtttgcgatcaagcgcctgatcggacggcgctatagcgaccccacggtcgagaaggacaagggcctcgttccctaccggatcgtcaagggcgacaatggcgacgcctgggttcagacccgcgacgagaaatacgccccgagccagctttccgccttcatcttgcaaaagatgaaagagaccgccgaagcccatctgggcgagccggtgacccaggcggtgatcaccgttccggcctatttcaacgattcccagcgtcaggcgaccaaggacgccggcaagatcgccggtcttgaggtgctgcgcatcatcaacgagccgacggccgccgccctggcctatggcatggacaagaagaacaccggaaccatcgccgtcttcgaccttggcggcggtaccttcgacgtgtccgtgctggaaatcggcgatggcgtcttcgaagtgaagtcgaccaacggcgataccttcctgggcggcgaggacttcgacgcccggatcatcgactatctggcgagcgagttcaaaaaagagcagggcatcgacttgcggaccgatcgtctggcccttcagcgtttgaaggaagccgccgaaaaggccaagatcgagctgtcgagctcgatgcagaccgaggtcaatctgcccttcatcaccgccgatcaggccggtccgaagcatctgaacatcaagctgacccgggccaagctcgaggcgctggtcgatgatctggtccagcgcacggtcgagccgtgccgcaaggccctggccgacgctggcattaaggccagcgagatcgacgaggtgatcctggtcggcggcatgacccgcatgcccaaggtccagcaggtggtcaaggacttcttcggccgcgagccccacaagggcgtcaaccccgatgaagtcgtggccatgggcgcggccattcagggcggcgtgctcaagggcgacgtcaaggacgtgctgctgctcgacgtgaccccgttgtcgctgggcatcgagaccctgggcggcgtgttcacccggctgatcgaccgcaacaccaccatcccgacccgcaagtcccagaccttctcgacggccgaggatagtcagacggccgtgaccatccgggtcttccagggcgagcgcgagatggccgccgacaacaagatgctgggccagttcgatctggtggggctgccctcggcgccgcgcggcgtgccgcagatcgaggtgaccttcgacatcgacgccaacggcatcgtcaatgtcagcgccaaggacaaggcgacgggcaaggagcaggcgatccgcatccaggcttcgggcgggctgtcggacaacgacatcgagcgcatggtcaaggaagccgaactgaacgccgaggccgaccgcaagcgcaaggaggcggtggaagcccgcaaccacgccgatggtctgatccatgccaccgagaagaacctcaaggaatacggtgacaagattccggccgaggacaaggcgaaggtcgaaggcgatctgacggctctcaaggccgttctcgactccgaggacgccgaatcgatcaaggccaagaccgatgccttgatgcagtcggcgatgaagctgggcgaagccgcctatagcgccggccagtcggccgagggcgccccccatgccgccggcgccgaggcttcggcccagagccgcaccgacgatggggtggtcgacgccgacttcgaggaagtcgacgagaaaaaaggccactaa

SEQ ID NO: 48283 - protein, 639 aa, Rhodospirillum rubrum ATCC 11170
MSKVIGIDLGTTNSCVAVMDGKDVRVIENAEGARTTPSQVAFTESGERLVGQPAKRQAVTNPENTLFAIKRLIGRRYSDPTVEKDKGLVPYRIVKGDNGDAWVQTRDEKYAPSQLSAFILQKMKETAEAHLGEPVTQAVITVPAYFNDSQRQATKDAGKIAGLEVLRIINEPTAAALAYGMDKKNTGTIAVFDLGGGTFDVSVLEIGDGVFEVKSTNGDTFLGGEDFDARIIDYLASEFKKEQGIDLRTDRLALQRLKEAAEKAKIELSSSMQTEVNLPFITADQAGPKHLNIKLTRAKLEALVDDLVQRTVEPCRKALADAGIKASEIDEVILVGGMTRMPKVQQVVKDFFGREPHKGVNPDEVVAMGAAIQGGVLKGDVKDVLLLDVTPLSLGIETLGGVFTRLIDRNTTIPTRKSQTFSTAEDSQTAVTIRVFQGEREMAADNKMLGQFDLVGLPSAPRGVPQIEVTFDIDANGIVNVSAKDKATGKEQAIRIQASGGLSDNDIERMVKEAELNAEADRKRKEAVEARNHADGLIHATEKNLKEYGDKIPAEDKAKVEGDLTALKAVLDSEDAESIKAKTDALMQSAMKLGEAAYSAGQSAEGAPHAAGAEASAQSRTDDGVVDADFEEVDEKKGH

SEQ ID NO: 48284 - DNA, 1839 bp, Moorella thermoacetica ATCC 39073
  CDS (1)..(1839): transl_table=11
atgagtaaagtaatcggtattgaccttggtacgactaactcctgcgtggccgtcatggaaggcggtgaggcagtagttattcccaatgccgaaggcggccggaccactccttccgtggtcgcctttaccaaagagggcgagcggatcgtgggccaggtggccaaacgccaggccataaccaatcctgaccggacggtaatatccattaagcggcatatggggaccaactacaaggtaaaaattgataataaagagtatacgccgcaggagatctcagccatgatcctgcagaaactgaaagccgacgcggaagcctacctgggcgaaaaggttacccaggccgtcatcaccgtgccggcttacttcaccgacagccagcgccaggcaaccaaggacgccgggcgcattgccggcctggaagtcctgcgcatcatcaacgaaccgacagcagcttccctggcctatggcctggataaaggcgaggaccagaccatcctggtttacgacctgggcggcggcacctttgatgtttccatcctggagctgggagacggcgtctttgaggttaaagccaccagcggtaataaccgcctgggaggcgacgacttcgaccagcgaataatggactatctggtggatatctgccgccgcgagcatggcgttgacctgacccaggataagatggccatgcagcgcctgaaggaggctgccgagaaagccaagattgagctttccggcatgaccagcaccaatatcaacctgccctttatctcggcgacgcccaacggccccgtccacctggatgtcaacctgacccgggccaagtttgaggaactcatcgccgacctggtagagaagaccgtgggtccgaccaggcaggccctggccgatgccggcctggaacccaaagatatcgataaagtattgctggtaggcggttccacccgggtgcccctggtacaggagacggtgcgcaagatcttgggccaggagccccataaaggcatcaaccccgacgaatgtgttgccctgggagcggctatccagggaggcgtccttgccggtgaggtcaaagacgtgctgctgctggacgtcacgcccctttctctgggcattgaaaccctgggcggcgtgtttaccaaactcattgagcgcaatacaaccattcctacttccaagagccagatcttctccactgccgccgacaaccagactacggtggagattcatgtcctccagggcgagcgggctatggccgctgataacaagaccctgggccgcttccagctgacggggatccctccggcgccccggggagtgccccagattgaggtcaagttcgacattgacgccaatggtatcgtccacgtctcggccaaggatctgggtaccggcaaacagcaggccattaccatcacctcgtccagcggcctgagcgaggaagagatccagcgcatggtcaaggaagccgaggcttcggctgaggccgaccgccgccgtaaggaagagatcgagacccgcaaccaggcggactccctcatctaccaggccgagcgcaccttgaaggagttcaaggacaaagccgaccagaatgatgtagaccgcatcgaaaaggcgaagaaagagctccaggaggtcctggacagcaagaataatgacaagatcaaagaaaagatggaggccctctcccaggccctttataccctgaccaccaaggtgtaccagcaggctggtgctcaagccggagcccagggccagggcgcggccggcggccagaaacaggacggtaacgtctacgacgctgactataaagtcgtcgacgacgacaagaaagaatag

SEQ ID NO: 48285 - protein, 612 aa, Moorella thermoacetica ATCC 39073
MSKVIGIDLGTTNSCVAVMEGGEAVVIPNAEGGRTTPSVVAFTKEGERIVGQVAKRQAITNPDRTVISIKRHMGTNYKVKIDNKEYTPQEISAMILQKLKADAEAYLGEKVTQAVITVPAYFTDSQRQATKDAGRIAGLEVLRIINEPTAASLAYGLDKGEDQTILVYDLGGGTFDVSILELGDGVFEVKATSGNNRLGGDDFDQRIMDYLVDICRREHGVDLTQDKMAMQRLKEAAEKAKIELSGMTSTNINLPFISATPNGPVHLDVNLTRAKFEELIADLVEKTVGPTRQALADAGLEPKDIDKVLLVGGSTRVPLVQETVRKILGQEPHKGINPDECVALGAAIQGGVLAGEVKDVLLLDVTPLSLGIETLGGVFTKLIERNTTIPTSKSQIFSTAADNQTTVEIHVLQGERAMAADNKTLGRFQLTGIPPAPRGVPQIEVKFDIDANGIVHVSAKDLGTGKQQAITITSSSGLSEEEIQRMVKEAEASAEADRRRKEEIETRNQADSLIYQAERTLKEFKDKADQNDVDRIEKAKKELQEVLDSKNNDKIKEKMEALSQALYTLTTKVYQQAGAQAGAQGQGAAGGQKQDGNVYDADYKVVDDDKKE

SEQ ID NO: 48286 - DNA, 1914 bp, Syntrophus aciditrophicus SB
  CDS (1)..(1914): transl_table=11
atgggaagaattatcggaattgatttgggaaccaccaattcatgcgttgccgtaatggaagggggggaccccgttgttatagcaaatcaggaagggaacagaacgacgccgtcgattgttgcttttacggaaagcggtgaaagactggtgggacaggttgccaaacggcaggctgtaacgaactcggaaaatacagtttacgccgtaaagagacttatcggcaggaaatataattccaaggaagttcagtatgacaagagtatcagtcctttcaagatttccgaggcgcccaatggggatgcccagattgaggtgcgaggccgggcgtacagtcctgctgaaatatcctccatggttctggtgaaaatgaaacagaccgccgaagattatctgggcgaaaagattactgacgcagtgattaccgtcccggcatattttaatgactcccagcgtcaggccacgaaggacgcggggaagatcgcgggcttgaatgttctgagaatcatcaacgaaccgacggcggcagcccttgcttatggactggataagaaaaaggatgaaaaaatcgccgtcttcgacctgggtggcgggacgttcgatatctcaatcctcgagctgggcgaaggcgtttttgaagtcaaatccaccaacggggacacccatctcggaggggaagacttcgatcagcggatcatcgattatctggtcagcgaattcaagaaagaccaggggattgatatccgcagcgacaagatggccttgcagcggcttaaggaagcagcggaaaaagcgaagatggagctgtcctcctcgatggagacggacatcaatctgcccttcattaccgcggacgcgtcgggtccgaagcacatgaacatcaaattgacccgcgccagaatggaggcgctggtggaagaactgatcgacaggctcgagggtccctgccggaccgccctcaaggatgccggcctgagcccgaaggacatcgatgaagtcatcctcgtcgggggcatgacccgtatgcccagagtccagcagaaagtcaaggagatctttgatcgggaacctcacaaaggcgtgaatcccgatgaagtcgtggctgtcggcgcggcgattcagggcggagtcctgggtggagaagtgaaggatgttctgctgctcgacgtcacgcccctgtccctgggaatcgaaaccctgggtggcgtgatgaccaaactcatcgaaaagaacacaaccatcccgacccggaaaagccagatcttttccactgcggcggacaatcagcctgccgtgagcattcatgtccttcaaggggaacgctccatggcaggggacaaccggactctgggccggttcgacctcgttggaattcccccggcgccccgcggaattccccagatcgaagtgaccttcgacatcgatgccaacggcatcgtccatgtttccgcaaaggatctgggaaccggaaaggaacagagcataaagattacggcatcgagcggtctttccgagacggaaatcgagaagctggtcagggaagccgagtctcacggtgaagaggaccgcaaaaagaaggaactcgtggaggcaaggaattctgccgacgccatggcatacggcgtcgaaaagaatatcaaggaattcggcgacaaagttgatgccgcggaaaaggcaaggatcgaggatgccattgccaaagtgcggaaagccgttgaaggcgatgacatcaatgccatcaggtcggctcaggatgaattgacgacggcttcccacaagctggccgaggcgatgtatgcaaagacctctcaggccggggcgggtccacagcctggagcggggcctggcaccggcggacaggggccggggaaaaaggatgaagatgtggtcgatgcagattttgaagaagtgaaataa

SEQ ID NO: 48287 - protein, 637 aa, Syntrophus aciditrophicus SB
MGRIIGIDLGTTNSCVAVMEGGDPVVIANQEGNRTTPSIVAFTESGERLVGQVAKRQAVTNSENTVYAVKRLIGRKYNSKEVQYDKSISPFKISEAPNGDAQIEVRGRAYSPAEISSMVLVKMKQTAEDYLGEKITDAVITVPAYFNDSQRQATKDAGKIAGLNVLRIINEPTAAALAYGLDKKKDEKIAVFDLGGGTFDISILELGEGVFEVKSTNGDTHLGGEDFDQRIIDYLVSEFKKDQGIDIRSDKMALQRLKEAAEKAKMELSSSMETDINLPFITADASGPKHMNIKLTRARMEALVEELIDRLEGPCRTALKDAGLSPKDIDEVILVGGMTRMPRVQQKVKEIFDREPHKGVNPDEVVAVGAAIQGGVLGGEVKDVLLLDVTPLSLGIETLGGVMTKLIEKNTTIPTRKSQIFSTAADNQPAVSIHVLQGERSMAGDNRTLGRFDLVGIPPAPRGIPQIEVTFDIDANGIVHVSAKDLGTGKEQSIKITASSGLSETEIEKLVREAESHGEEDRKKKELVEARNSADAMAYGVEKNIKEFGDKVDAAEKARIEDAIAKVRKAVEGDDINAIRSAQDELTTASHKLAEAMYAKTSQAGAGPQPGAGPGTGGQGPGKKDEDVVDADFEEVK

SEQ ID NO: 48288 - DNA, 1926 bp, Frankia sp. CcI3
  CDS (1)..(1926): transl_table=11
atggcgaaggcagtcggcattgatctggggacgaccaattcggtgatcgccgcctgggagggtggcgagccgagggtcatcccgaacgcggagggtgcgcggacgacaccgtcggtggtggcgttcaccgagagcggtgaacgcctggtcgggcagctggcgcgacggcaggcgatcctgaacccgaagggcacgatctactcggccaagcggttcatcggccgccgctatgacgaggtgaccgaggaggccaaagcggtcgccttcgacgtcgtcccgggcccggagggcgccgcccggttcagaatccgggacaagctctacgcgccggaggagatcagcgcgctggtgctgcgcaagctggccgacgacgctgggcggaacctgggcgagaaggtcaccgaagcggtcatcacggtgccggcctacttcaacgacgcgcagcgcaccgcgacgaaggacgccggccggatcgccggcctgaacgtgctgcggatcatcaacgagccgaccgccgccgcattggcgtacgggctggacaagaagggccacgagaccgtcctggtcttcgatctcggcggcggcacgttcgacgtgagcatcctcgacgtcggcgacggggtggtcgaggtccgggccacggccggggacagccacctgggcggggacgacttcgaccgccggctggtcgactacctcgccgacgggttccaccgggaacagggcatcgacctgcgccgggacccccaggcactgcaacggctgttcgaggccgcggagaaggccaaggtcgaactgagcgcggtcacccagacccaggtgaacctgccgttcatcaccgccgacgccaccgggccgcggcacctgaccgccacggtcatgcgctccaccttcgaacagatcaccgccgacctggtcgaacggaccatgggaccggtccgccaggcgatggaggactccaagatcagtgccgacgacctcgacgaggtgatcctcgtcggcggcgccacccggatgcccgcggtgcaggcactggtccggcggctgaccggcggcaaggaaccgaacatgagcgtcaaccccgacgaggtcgtcgccctgggcgcggcgatccaggccggggtgctcaagggcgaagtctccgacgtgctcctgctcgacgtcaccccgctctccctcggggtggagacccgcggcggcctgatgacgaaaatcgtcgaacgcaacaccacgatcccggtgcgacgctccgaggtgttctccaccgcggaggacaaccagccggccgtggacatcgtggtactgcagggcgaacgcgaacgcgccgccgacaaccgggtactcggccgcttccgcctggaaaacatccgcccggcgccccgcggcgaaccgcaggtcgaggtcaccttcgacatcgacgccaacggcatcctcaacgtcaccgcccgcgacaaggacaccggagcccagcagtcgatcacgatcagtgagacctccaacctccccaaggaggaggtcgaacggatgatcaccgaggcggagcgtaaccgcaccaccgaccaggcgctacgcgccgcaatcgacgcccgcaacgagctggactcggtcgcctaccgcgtcgaacggctgctggccgaactcggtgacgccgccccgccccacgagaaggcccgcgccgacctgctggtcgccgacgcccgccaggccatcaaagaggaggctccggtggaccgggtccgcgccctgacctcggatctccaacagatctaccacggcctggccgccgcccgaaccggccaggccgcccccaccgagggaaccggcggcagcccgaccgacaccgccccgggcggcccacagccaccacctggcggcggcacccctggcggcgacgacgtggtagacgccgagttcgaccggggctga

SEQ ID NO: 48289 - protein, 641 aa, Frankia sp. CcI3
MAKAVGIDLGTTNSVIAAWEGGEPRVIPNAEGARTTPSVVAFTESGERLVGQLARRQAILNPKGTIYSAKRFIGRRYDEVTEEAKAVAFDVVPGPEGAARFRIRDKLYAPEEISALVLRKLADDAGRNLGEKVTEAVITVPAYFNDAQRTATKDAGRIAGLNVLRIINEPTAAALAYGLDKKGHETVLVFDLGGGTFDVSILDVGDGVVEVRATAGDSHLGGDDFDRRLVDYLADGFHREQGIDLRRDPQALQRLFEAAEKAKVELSAVTQTQVNLPFITADATGPRHLTATVMRSTFEQITADLVERTMGPVRQAMEDSKISADDLDEVILVGGATRMPAVQALVRRLTGGKEPNMSVNPDEVVALGAAIQAGVLKGEVSDVLLLDVTPLSLGVETRGGLMTKIVERNTTIPVRRSEVFSTAEDNQPAVDIVVLQGERERAADNRVLGRFRLENIRPAPRGEPQVEVTFDIDANGILNVTARDKDTGAQQSITISETSNLPKEEVERMITEAERNRTTDQALRAAIDARNELDSVAYRVERLLAELGDAAPPHEKARADLLVADARQAIKEEAPVDRVRALTSDLQQIYHGLAAARTGQAAPTEGTGGSPTDTAPGGPQPPPGGGTPGGDDVVDAEFDRG

SEQ ID NO: 48290 - DNA, 1851 bp, Frankia sp. CcI3
  CDS (1)..(1851): transl_table=11
atgatcgaaaggcacacagacatggcacgagcggtcggtatcgacctcggcaccacgaactccgtcgtgagcgtgctcgagggcggcgaacccacggtgatcgccaacgccgagggctcccggacgaccccgtcggtcgtggctttcgcgaagaacggcgaggtcctggtcggcgaggtcgccaagcgtcaggcggtgacgaacgtcgagcgcaccatccggtcggtcaaacgccacatgggcaccgactggaagatgaaggtcgacgcgaaggatctcacgccccaggagatcagcgcgttcatcctgcagaagctgaagcgggacgccgagtcctacctcggtgagacggttacggacgcggtcatcaccgtcccggcgtacttcgacgacgcccagcgtcaggccaccaccgaggcgggcacgatcgccgggctcaacgtcctgcggattgtcaacgagccgaccgccgcggccctcgcctacgggttggacaagggcgagaaggagcagaccatcctggtcttcgacctcggtggcggcaccttcgacgtctccctgctggagatcggcgacggtgtcgtcgaggtgaagtccacctccggtgacacccacctcggtggtgacgactgggatcagcgcatcaccgaccacctgatcaagaccttcaacggccagcacggggtcgacctcggcaaggacaagatggccctgcagcggctgcgggaggccgccgagaaggcgaagatcgagctttcgcagtccacccagaccgcgatcaacctgccctacatcaccgcgtcggccgagggtcccctgcacctcgacgtctcgctgtcgcgcgccgagttccagcggatgacctccgacctcatcgaccgctgcaggcaccccttccagcaggcggtgaaggacgcggggatcaaggtcagcgacattgaccacgtcgtcctcgtcggtggttccacccggatgcccgccgtcgtcgagctggtccgcgagctgaccgggggcaaggagccgaacaagggcgtcaacccggacgaggtcgtcgccgtcggcgcctcgctgcaggccggcgtgctcaagggcgaagtcaaggacgtcctgctcctcgacgtcaccccgctctcgctcggcatcgagacgaagggggggatcatgaccaagctcatcgagcgcaacaccacgatccccaccaagcgctcggagatcttcaccaccgccgaggacagccagccctccgtgcagatccaggtcttccagggcgagcgcgagatggccgcctacaacaagaagctcggcatgttcgagctgaccggcctgccgcccgccccgcggggcatgccccagatcgaggtcaccttcgacatcgacgcgaacggcatcgtgcacgtgtccgcgaaggacctgggcaccggcaaggagcagtcgatgaccatcaccggcggctcggcgctgccgaaggacgacatcgaccgcatggtccgcgacgccgagcagtacgccgaggaggaccgcaggcgccgggaggaggccgagacccgcaacaaggccgagacgctcgtctactcgaccgagcggttcctcgccgagaacggcgaaaagatcgacgccgcggtgaagagcgacgtggaggagaagctcggcacgctgcggggcgccgtcgccggcaccgacacggcggcgatccgcgaggcggccgacgcgctggccgcggcgagccaggcgatgggccaggccatgtacgcgcaggccgcccaggagggcgcgggtgcctccggcggcgccggagcagccgacgacgacgtggtcgacgcggagatcgtggatgaggaggacaagaagtga

SEQ ID NO: 48291 - protein, 616 aa, Frankia sp. CcI3
MIERHTDMARAVGIDLGTTNSVVSVLEGGEPTVIANAEGSRTTPSVVAFAKNGEVLVGEVAKRQAVTNVERTIRSVKRHMGTDWKMKVDAKDLTPQEISAFILQKLKRDAESYLGETVTDAVITVPAYFDDAQRQATTEAGTIAGLNVLRIVNEPTAAALAYGLDKGEKEQTILVFDLGGGTFDVSLLEIGDGVVEVKSTSGDTHLGGDDWDQRITDHLIKTFNGQHGVDLGKDKMALQRLREAAEKAKIELSQSTQTAINLPYITASAEGPLHLDVSLSRAEFQRMTSDLIDRCRHPFQQAVKDAGIKVSDIDHVVLVGGSTRMPAVVELVRELTGGKEPNKGVNPDEVVAVGASLQAGVLKGEVKDVLLLDVTPLSLGIETKGGIMTKLIERNTTIPTKRSEIFTTAEDSQPSVQIQVFQGEREMAAYNKKLGMFELTGLPPAPRGMPQIEVTFDIDANGIVHVSAKDLGTGKEQSMTITGGSALPKDDIDRMVRDAEQYAEEDRRRREEAETRNKAETLVYSTERFLAENGEKIDAAVKSDVEEKLGTLRGAVAGTDTAAIREAADALAAASQAMGQAMYAQAAQEGAGASGGAGAADDDVVDAEIVDEEDKK

SEQ ID NO: 48292 - DNA, 1908 bp, Novosphingobium aromaticivorans DSM 12444
  CDS (1)..(1908): transl_table=11
atggcaaaagttatcggcatcgacctgggtacgaccaacagctgcgttgcggtgatggacgggggcacgcccaaggtcattgagaactcggaaggtgcgcgcaccacgccgtcgatcgtcgccttcaccaaggatggcgagcgtctgatcggccagccggccaagcgccaggcggtgacgaacccggacaacacgattttcgcggtgaagcgcctcatcggccgccgctttgacgatccgatgacccagaaggacacggaactcgtcccctacaccatcaccaagggcaagaacggcgacgcctgggtcaaggcgggcgggcaggactacagcccttcgcagatctcggccttcaccctgcagaagatgaaggaaaccgccgaggcctatctcggcgagaccgtgacgcaggcggtgatcaccgttccggcatacttcaacgacgcgcagcgccaggcgaccaaggacgccggccagatcgcgggcctcgaagtgctgcgcatcatcaacgagccgaccgcggcggcgctggcctatggcctcgacaagcaggacggcaagacgatcgcggtctatgaccttggcggcggcaccttcgacatctcgatcctcgagatcggcgatggcgtgttcgaggtgaagtcgaccaacggcgacaccttcctcggcggcgaagacttcgacaccgcggtggtcgagtatctggcggacaagttcaaggccaaggaaggcatggacctgaagaccgacaagctcgccctgcagcgcctgaaggaagcggcggaaaaggccaagatcgagctttcgtcggcacagacgaccgagatcaacctgccgttcatcacggcccgcatggaaggcggcgcgaccacgccgctgcacctggtggaaaccgtcacccgcgccgaccttgaaaagcttgtcgccggcctgatccagcgcacgctcgatccgtgcaagaaggcgctggccgatgccggcatctcggccaaggagatcgacgacgtcgttctcgtgggcggcatgacccgcatgcccaaggtccgcgaagtggtgaaggacttcttcggcaaggaaccgcacaccggcgtgaatcctgacgaagtcgtggcgatgggcgcggcaatccaggccggcgttctccagggcgacgtcaaggacgtgctgcttctcgacgtgaccccgctttcgctgggcatcgagacgctgggcggcatcatgaccaagatgatcgaccgcaacaccacgatcccgaccaagaagagccaggtctattcgactgccgaggacaatcagcaggcggtgacgatccgggtcttccagggcgaacgcgaaatggcgcaggacaacaagctccttggccagttcgacctcgtcggcatcccgcccgcacggcgcggcgtgccgcagatcgaggtgacgttcgatatcgacgccaatggcatcgtcaacgtctcggccaaggacaagggcaccggcaaggagcagcagatccgcatccaggcctcgggcggtctttcggacgcagacatcgaccagatggtccgcgatgccgagaagttcgctgaagaggacaagaagcgccgtgcggcggccgaggcgaagaacaacgccgaaagcctgatccatgcgaccgagcgccagcttgaggaaaacggggacaaggtcgacgcgggcctcaaggccgagatcgaagcggccatcgccgaggcgaagacagccgtcgagagcggcgacatcgacgccatgaacgccaaggcgcaggccctgacggacaaggccatgaagatgggccaggccatctacgagaaggagcaggcaactgcggcttctccgggtgccgaagccccgaaggccgacgatgacgtcgtcgacgccgagttctcggaagtcgacgagaacaagtga

SEQ ID NO: 48293 - protein, 635 aa, Novosphingobium aromaticivorans DSM 12444
MAKVIGIDLGTTNSCVAVMDGGTPKVIENSEGARTTPSIVAFTKDGERLIGQPAKRQAVTNPDNTIFAVKRLIGRRFDDPMTQKDTELVPYTITKGKNGDAWVKAGGQDYSPSQISAFTLQKMKETAEAYLGETVTQAVITVPAYFNDAQRQATKDAGQIAGLEVLRIINEPTAAALAYGLDKQDGKTIAVYDLGGGTFDISILEIGDGVFEVKSTNGDTFLGGEDFDTAVVEYLADKFKAKEGMDLKTDKLALQRLKEAAEKAKIELSSAQTTEINLPFITARMEGGATTPLHLVETVTRADLEKLVAGLIQRTLDPCKKALADAGISAKEIDDVVLVGGMTRMPKVREVVKDFFGKEPHTGVNPDEVVAMGAAIQAGVLQGDVKDVLLLDVTPLSLGIETLGGIMTKMIDRNTTIPTKKSQVYSTAEDNQQAVTIRVFQGEREMAQDNKLLGQFDLVGIPPARRGVPQIEVTFDIDANGIVNVSAKDKGTGKEQQIRIQASGGLSDADIDQMVRDAEKFAEEDKKRRAAAEAKNNAESLIHATERQLEENGDKVDAGLKAEIEAAIAEAKTAVESGDIDAMNAKAQALTDKAMKMGQAIYEKEQATAASPGAEAPKADDDVVDAEFSEVDENK
